United States Patent Application Publication US 2005/0228172 A9 - sequence listing, part 158

SEQ ID NO: 713311 - DNA, 1091 bp, Homo sapiens
tgctacragtgatgttgataagggagctgctgctatgagtactgtttccaaatgtgatgttgctaagagccaattgctaagggtactctagctaaatacattgttaataaggacattgctgcaaatagtgctgctcacagagttgttgttaatggtgctgtttctaaggacactgttgatactgcaccaatgctaagggcctggttgttcatggcatttttattaaaggcagttataataatgaggttgtttttaaggtgttgatgccaagagtattgtttctaaagatatttttgctaagcatgctcttgctgatggccttgttttatagccactgtttctatgggaaatgatactaaaggtgttattgcttagggcattgttgctatggttggtagccaagaaaggttttgctaaattggcttttttccaagggtgctgtgcaaaggttgttaagtactgtggtaaggaaaatattattatgaatattattgttaaggccattgcctataagagttgctaaaggacattgtgagtcctttatcctatataaatataaaggatatttatattaagcacattgtcactgaggaacttgctgctaggtgttttgttgatgtggcctattgttgctaaggatattgtcactctgacaatgatattaggggcattgtagctaaggacattgacattaaggctctgttactaagactcatttttgctaagggtatttttgctaaggatgttgttattaagtacatttttgctagagcattcttgttcagtgtgttgttgctaaagggctagttgctagaagcacttttcctagaataattgttgcaaagagcattcatgctaaaatgttgatcctaagaccactgtttctaagaaactcatttgaagggcactgtcactgtgagtgtcgttgctaaggttgttgttgtaaagtcctttatggctaagggcattgttactatgttcattattgttaagtgtattacagtaaagaggcattgctactaaatacactgctgttaatgactctattgctcagggacttaatcctaagggtattgttgcaaagagagtta

SEQ ID NO: 713312 - DNA, 1091 bp, Homo sapiens
tgctacgagtgatgttgataagggagctgctgytatgagtactgtttccaaatgtgatgttgctaagagccaattgctaagggtactctagctaaatacattgttaataaggacattgctgcaaatagtgctgctcacagagttgttgttaatggtgctgtttctaaggacactgttgatactgcaccaatgctaagggcctggttgttcatggcatttttattaaaggcagttataataatgaggttgtttttaaggtgttgatgccaagagtattgtttctaaagatatttttgctaagcatgctcttgctgatggccttgttttatagccactgtttctatgggaaatgatactaaaggtgttattgcttagggcattgttgctatggttggtagccaagaaaggttttgctaaattggcttttttccaagggtgctgtgcaaaggttgttaagtactgtggtaaggaaaatattattatgaatattattgttaaggccattgcctataagagttgctaaaggacattgtgagtcctttatcctatataaatataaaggatatttatattaagcacattgtcactgaggaacttgctgctaggtgttttgttgatgtggcctattgttgctaaggatattgtcactctgacaatgatattaggggcattgtagctaaggacattgacattaaggctctgttactaagactcatttttgctaagggtatttttgctaaggatgttgttattaagtacatttttgctagagcattcttgttcagtgtgttgttgctaaagggctagttgctagaagcacttttcctagaataattgttgcaaagagcattcatgctaaaatgttgatcctaagaccactgtttctaagaaactcatttgaagggcactgtcactgtgagtgtcgttgctaaggttgttgttgtaaagtcctttatggctaagggcattgttactatgttcattattgttaagtgtattacagtaaagaggcattgctactaaatacactgctgttaatgactctattgctcagggacttaatcctaagggtattgttgcaaagagagtta

SEQ ID NO: 713313 - DNA, 1091 bp, Homo sapiens
tgctacgagtgatgttgataagggagctgctgctatgagtactgtttccaaatgtgatgttgctaagagccaattgctaagggtactctagctaaatacattgttaataaggacattgctgcaaatagtgctgctcacagagttgttgttaatggtgctgtttctaaggacactgttgatactgcaccaatgctaagggcctggttgttcatggcatttttattaaaggcagttataataatgaggttgtttttaaggtgttgatgccaagagtattgtttctaaagatatttttgctaagcatgctsttgctgatggccttgttttatagccactgtttctatgggaaatgatactaaaggtgttattgcttagggcattgttgctatggttggtagccaagaaaggttttgctaaattggcttttttccaagggtgctgtgcaaaggttgttaagtactgtggtaaggaaaatattattatgaatattattgttaaggccattgcctataagagttgctaaaggacattgtgagtcctttatcctatataaatataaaggatatttatattaagcacattgtcactgaggaacttgctgctaggtgttttgttgatgtggcctattgttgctaaggatattgtcactctgacaatgatattaggggcattgtagctaaggacattgacattaaggctctgttactaagactcatttttgctaagggtatttttgctaaggatgttgttattaagtacatttttgctagagcattcttgttcagtgtgttgttgctaaagggctagttgctagaagcacttttcctagaataattgttgcaaagagcattcatgctaaaatgttgatcctaagaccactgtttctaagaaactcatttgaagggcactgtcactgtgagtgtcgttgctaaggttgttgttgtaaagtcctttatggctaagggcattgttactatgttcattattgttaagtgtattacagtaaagaggcattgctactaaatacactgctgttaatgactctattgctcagggacttaatcctaagggtattgttgcaaagagagtta

SEQ ID NO: 713314 - DNA, 1091 bp, Homo sapiens
tgctacgagtgatgttgataagggagctgctgctatgagtactgtttccaaatgtgatgttgctaagagccaattgctaagggtactctagctaaatacattgttaataaggacattgctgcaaatagtgctgctcacagagttgttgttaatggtgctgtttctaaggacactgttgatactgcaccaatgctaagggcctggttgttcatggcatttttattaaaggcagttataataatgaggttgtttttaaggtgttgatgccaagagtattgtttctaaagatatttttgctaagcatgctcttgctgatggccttgttttatagccactgtttctatgggaaatgatactaaaggtgttattgcttagggcattgttgctatggttggtagccaagaaaggttttgctaaattggcttttttccaagggtgctgtgcaaaggttgttaagtactgtkgtaaggaaaatattattatgaatattattgttaaggccattgcctataagagttgctaaaggacattgtgagtcctttatcctatataaatataaaggatatttatattaagcacattgtcactgaggaacttgctgctaggtgttttgttgatgtggcctattgttgctaaggatattgtcactctgacaatgatattaggggcattgtagctaaggacattgacattaaggctctgttactaagactcatttttgctaagggtatttttgctaaggatgttgttattaagtacatttttgctagagcattcttgttcagtgtgttgttgctaaagggctagttgctagaagcacttttcctagaataattgttgcaaagagcattcatgctaaaatgttgatcctaagaccactgtttctaagaaactcatttgaagggcactgtcactgtgagtgtcgttgctaaggttgttgttgtaaagtcctttatggctaagggcattgttactatgttcattattgttaagtgtattacagtaaagaggcattgctactaaatacactgctgttaatgactctattgctcagggacttaatcctaagggtattgttgcaaagagagtta

SEQ ID NO: 713315 - DNA, 1069 bp, Homo sapiens
taacctccattaccagcccctggcaaccactattctatttcttgtctctatgaatttcactactctaggtacctcatataaatgaataacgtagtagttgtccttttgtgtctagcttattttccttagcataatgtcttgaaagttcatctgtgttacagtacgggccagaattttcttcctacactgcactaggcttctccgtttgtccatcaatggaaatttgggttgtttctcttttggctcttgtggatacacctgctstgaacattgatgtaacataacctaattattttatgtgtattaattcatttaatcttcacaacctattttactcaagttaactgtttcatgataggtactttactaatcccattttataactgaggaaacaaaaactcagggagataaaggaatttgtccaaagttacacagctagtaaggggtagagcctggatgattccaagcttatccctaatcactaaggataagatagcacccttccttcaaggaagttagaattgcacaaagtgtaagaaaagcatacaaacacctagtaagcacacaggcatgtgataaatgctgagagctttttaagggaaagtgccagacatatttagcatgtaggcttagtaaaaatctagattaggtctggcagccaaaatctagattatgacctgctttatatagccagagaactaagaatggttttacatttgtaaagcgttgcatttaaaaaaaaaaaacaaagagggtgggggctgggtatggtggctcaggcctgtaatcccaacattttgggacgctgaggtggctggactgcttgagcccaggaattcaagaccagcctgagcaacataatgagatcccatctttacaaaaaatataaatgttcgctgggtgttatgacatgtgactgtggtcccagctactcgggaggctggggtgggaggatcacctgagcccacggaggttgaggctacactaagctgtgatcttgccactgtactccaaacctgggcaacagagcaagactgtgtttcagaaaaagaaagagaaagagagaaga

SEQ ID NO: 713316 - DNA, 1069 bp, Homo sapiens
taacctccattaccagcccctggcaaccactattctatttcttgtctctatgaatttcactactctaggtacctcatataaatgaataacgtagtagttgtccttttgtgtctagcttattttccttagcataatgtcttgaaagttcatctgtgttacagtacgggccagaattttcttcctacactgcactaggcttctccgtttgtccatcaatggaaatttgggttgtttctcttttggctcttgtggatacacctgctctgaacattgatgtaacataacctaattattttatgtgtattaattcatttaatcttcacaacctattttactcaagttaactgtttcatgataggtactttactaatcccattttataactgaggaaacaaaaactcagggagataaaggaatttgtccaaagtyacacagctagtaaggggtagagcctggatgattccaagcttatccctaatcactaaggataagatagcacccttccttcaaggaagttagaattgcacaaagtgtaagaaaagcatacaaacacctagtaagcacacaggcatgtgataaatgctgagagctttttaagggaaagtgccagacatatttagcatgtaggcttagtaaaaatctagattaggtctggcagccaaaatctagattatgacctgctttatatagccagagaactaagaatggttttacatttgtaaagcgttgcatttaaaaaaaaaaaacaaagagggtgggggctgggtatggtggctcaggcctgtaatcccaacattttgggacgctgaggtggctggactgcttgagcccaggaattcaagaccagcctgagcaacataatgagatcccatctttacaaaaaatataaatgttcgctgggtgttatgacatgtgactgtggtcccagctactcgggaggctggggtgggaggatcacctgagcccacggaggttgaggctacactaagctgtgatcttgccactgtactccaaacctgggcaacagagcaagactgtgtttcagaaaaagaaagagaaagagagaaga

SEQ ID NO: 713317 - DNA, 1069 bp, Homo sapiens
taacctccattaccagcccctggcaaccactattctatttcttgtctctatgaatttcactactctaggtacctcatataaatgaataacgtagtagttgtccttttgtgtctagcttattttccttagcataatgtcttgaaagttcatctgtgttacagtacgggccagaattttcttcctacactgcactaggcttctccgtttgtccatcaatggaaatttgggttgtttctcttttggctcttgtggatacacctgctctgaacattgatgtaacataacctaattattttatgtgtattaattcatttaatcttcacaacctattttactcaagttaactgtttcatgataggtactttactaatcccattttataactgaggaaacaaaaactcagggagataaaggaatttgtccaaagttacacagctagtaaggggtagagcctggatgattccaagcttatccctaatcactaaggataagatagcacccttccttcaaggaagttagaattgcacaaagygtaagaaaagcatacaaacacctagtaagcacacaggcatgtgataaatgctgagagctttttaagggaaagtgccagacatatttagcatgtaggcttagtaaaaatctagattaggtctggcagccaaaatctagattatgacctgctttatatagccagagaactaagaatggttttacatttgtaaagcgttgcatttaaaaaaaaaaaacaaagagggtgggggctgggtatggtggctcaggcctgtaatcccaacattttgggacgctgaggtggctggactgcttgagcccaggaattcaagaccagcctgagcaacataatgagatcccatctttacaaaaaatataaatgttcgctgggtgttatgacatgtgactgtggtcccagctactcgggaggctggggtgggaggatcacctgagcccacggaggttgaggctacactaagctgtgatcttgccactgtactccaaacctgggcaacagagcaagactgtgtttcagaaaaagaaagagaaagagagaaga

SEQ ID NO: 713318 - DNA, 1069 bp, Homo sapiens
taacctccattaccagcccctggcaaccactattctatttcttgtctctatgaatttcactactctaggtacctcatataaatgaataacgtagtagttgtccttttgtgtctagcttattttccttagcataatgtcttgaaagttcatctgtgttacagtacgggccagaattttcttcctacactgcactaggcttctccgtttgtccatcaatggaaatttgggttgtttctcttttggctcttgtggatacacctgctctgaacattgatgtaacataacctaattattttatgtgtattaattcatttaatcttcacaacctattttactcaagttaactgtttcatgataggtactttactaatcccattttataactgaggaaacaaaaactcagggagataaaggaatttgtccaaagttacacagctagtaaggggtagagcctggatgattccaagcttatccctaatcactaaggataagatagcacccttccttcaaggaagttagaattgcacaaagtgtaagaaaagcatacaaacacctagtaagcacacwggcatgtgataaatgctgagagctttttaagggaaagtgccagacatatttagcatgtaggcttagtaaaaatctagattaggtctggcagccaaaatctagattatgacctgctttatatagccagagaactaagaatggttttacatttgtaaagcgttgcatttaaaaaaaaaaaacaaagagggtgggggctgggtatggtggctcaggcctgtaatcccaacattttgggacgctgaggtggctggactgcttgagcccaggaattcaagaccagcctgagcaacataatgagatcccatctttacaaaaaatataaatgttcgctgggtgttatgacatgtgactgtggtcccagctactcgggaggctggggtgggaggatcacctgagcccacggaggttgaggctacactaagctgtgatcttgccactgtactccaaacctgggcaacagagcaagactgtgtttcagaaaaagaaagagaaagagagaaga

SEQ ID NO: 713319 - DNA, 1069 bp, Homo sapiens
taacctccattaccagcccctggcaaccactattctatttcttgtctctatgaatttcactactctaggtacctcatataaatgaataacgtagtagttgtccttttgtgtctagcttattttccttagcataatgtcttgaaagttcatctgtgttacagtacgggccagaattttcttcctacactgcactaggcttctccgtttgtccatcaatggaaatttgggttgtttctcttttggctcttgtggatacacctgctctgaacattgatgtaacataacctaattattttatgtgtattaattcatttaatcttcacaacctattttactcaagttaactgtttcatgataggtactttactaatcccattttataactgaggaaacaaaaactcagggagataaaggaatttgtccaaagttacacagctagtaaggggtagagcctggatgattccaagcttatccctaatcactaaggataagatagcacccttccttcaaggaagttagaattgcacaaagtgtaagaaaagcatacaaacacctagtaagcacacaggcatrtgataaatgctgagagctttttaagggaaagtgccagacatatttagcatgtaggcttagtaaaaatctagattaggtctggcagccaaaatctagattatgacctgctttatatagccagagaactaagaatggttttacatttgtaaagcgttgcatttaaaaaaaaaaaacaaagagggtgggggctgggtatggtggctcaggcctgtaatcccaacattttgggacgctgaggtggctggactgcttgagcccaggaattcaagaccagcctgagcaacataatgagatcccatctttacaaaaaatataaatgttcgctgggtgttatgacatgtgactgtggtcccagctactcgggaggctggggtgggaggatcacctgagcccacggaggttgaggctacactaagctgtgatcttgccactgtactccaaacctgggcaacagagcaagactgtgtttcagaaaaagaaagagaaagagagaaga

SEQ ID NO: 713320 - DNA, 1156 bp, Homo sapiens
cttatttgtaaaaataaacacaaatatattaaatgayatattatcaaatttattccactgaaatgttaaaaggaaaatctacctttactaagaaaaaattaaaagtcaaagaagtattagaaaaattactcacgtaaataactgcactaatagacaaaggaaaagttatttgcttaagccaatgcacataaaaaacaaatatgtgttttcattcaacatccatttcaaacaaataaaaaactcactaatcaaaagaagcctcttaggaaaccagaaatagagagcaactcccttcacaagattaaggaatctgctggaaacattagcactgtacttcaagccctatatgatgaagacaggaaagaagaaaggttataaatatcagggaagcagagacaaaaatatcctttttatgagcagacaatataatcctctgcctaggctactggcaaatattagaactaacaagaaatttagtaatatgatttaagatccacaaacaaaaatagatagttagagagcaagtaagtgaaaatcatatattgtgagaaatgcaaaactttattgaaagatgtaaaaaaggcctgaaggagtgaacaaatataactcattcttgatgagatgtggtgttggaaggatgagaacagaacccaaatttatccataatgtcaatgcaatcccaataaaatcctaaaggtttttcatggaacttgacacattgacaatcaagtatatagaaaagagggaaaatgtagacccaaggcaactttgagaatagacaatgaagggaaacatgccccactagcagagctggatttctcatggaactaacaaacttgaatatcaggactcttcacttgcttggcccctctctaggaccagggaggcatgtggctatgtgctgacatgttatggtcttatgtttttgtaaaagttgccaaaataagatttcccaagcacatttattttttggctcagccttccatgcaatcacacttgaacttggtcccatgctggagtagtggcagaatgggttcaggatgggtggtggcaccatggcggttgctgggggctttggctacgttggatggcttagtattaaccaagtcatacacagaaatgatggaaactccatacatctatcccaaactcaact

SEQ ID NO: 713321 - DNA, 812 bp, Homo sapiens
atgctggtcctctctttcctgacaggcgggccatctctccagcttctgtgaggacagttcaaattatggaggagggggcaggtgcagggcagcagtgctgaggggagtaccatgcagttgggggagcagggactcatttttctttgtagctcagattcctaagcctgtgactttgagtatcggtgtcttccttgcaatgtttcaatctgaggttmttggggagagtgcagaattggagcccgatggaagactggtggggagaggggtgggtggagggaacatggagaatgtgtcaggtggtgtctattcctgacaccttactttgcctgctggagtttcccagtctgttccagatgcactctctcgaccctgaagggacctgatggaggatgtttgttgccagtgtgtgctcccctggactcaattggaattggtcccacaaagtgtttttatttatttatttatttatttatttatttatttatttatttatttgaagggagtctcgctctgtcacccaggctggagtgcagtgtggcaatctcagctcactgcaacctctgattcccaggttcaagtgattctcctgtttcagcctccctagtagttgggactacaggtgtccgccaccacaccttgctaaattttttatttttagtagaggcagggtttcacaatattggtcaggctggtctcgaactcctgaccaggtgatcgacccaccttggcctctcaaagtgctgggattacaggcgggagccatcacaccccgccaatcccacaaatttaggcattatggtgaattgctactt

SEQ ID NO: 713322 - DNA, 1763 bp, Homo sapiens
ctccatyttcaccgcctcggtgtctctatctcgtcccgatcaccgtcgcctctcctctggcggagagcaccagcattcccactggtctctgcttttcctcaaacgcatctctgtgtatatctcccctcaggatcactctgtggcccccactgctctgggtggaaccttctttccagtggtgtttcagtcccctgggtctgcctcactcctcaccaccgtcttgtgcttctgcactgagctccagccagaccacctgcctgcagccacctggcactacctgttcccgtgtgcttcctgcctttgcctggagagaataacaatctatagtccaaactcaaggacaaaaacaaactgctttttggctgtggtggcatgaaaccccaataagtcaatgacaatgctgcatgcttctgaaagctggccagtcagggacagccccacactacagaacaggcccaggcagcaagaaccttgtgcccctgaagtcaggctgaacactctcacttctgaaagctggacaatcctcaatgccaggcttcccaagagacttaatttgttttgctctgagagatggtcctataagcacagttcccctttgctctagtaagcaagatactcagcttcagcactgaccagcctcacaatctgtcctcaccaagtggagggccctccctccgggttcctccacggccgtatctgtctctgttcatacaccttcccctcagcacttagagacatgggctggcatggcgggtgctggcagcaggggtgagaaataaactttcagccctagatgaggagcccaagaggagagcatgccgtcacctggagtctctggtatgtgcctggcacctgtactgattgcattaaccactgtgattttttaaaagatgtactattttgaaatgtataatacatatggagaagtgtatgaaatatgtacaatttaaagataaggaaaaatgcatgcctgtgtgcccaccacctagtgaagaaatacaacctggacaccactttggaagcctgtctgtgttcacccgtcgcattctccctcctcccccagcccaggtatcctccatcctttagccatcccctgactttctttagtttcattgcctgaagtctgagctactagggaggctgaggcaggataatttcttgaacccaggagcagaggttgcagtgagccgagattgccccattgcactccaccctgggtgacagtgcgagactccctcaaaaaaaaaaagtttgtgggaccaattccaatcgagtcaaggggtctcaattggccaaggcagtctcaaacttctgacccaaagtgatctgcctggttcggcctcccaaagtgctgggattgtaggcgtgagccaccatgcccggcctcccctccttttcattcagggattttaaatgttttatttgctccatctgttatgtatgattgccttgacgatttcagcttgaattaaaattacatatttttgcctgtgtttattaatatttaaacatattaaaataatacatgttcataatgaaaatgaaacattacaaacaaatacacaggaaaggcagtattccccttccagttccactcttgaaataaccagttaacaagatgatgaacatctttccatgatgttctccaagattcatataattatttgcaatcatacaatggcatatacagctcatgtgcagtggctcatgcaagtaatcccagtactttgggagactgaactgggtggatcatttgaggtcag

SEQ ID NO: 713323 - DNA, 1763 bp, Homo sapiens
ctccatcttcaccgcctcggtgtctctatctcgtcccgatcaccgtcgcctctcctctggcggagagcaccagcattcccactggtctctgcttttcctcaaacgcatctctgtgtawatctcccctcaggatcactctgtggcccccactgctctgggtggaaccttctttccagtggtgtttcagtcccctgggtctgcctcactcctcaccaccgtcttgtgcttctgcactgagctccagccagaccacctgcctgcagccacctggcactacctgttcccgtgtgcttcctgcctttgcctggagagaataacaatctatagtccaaactcaaggacaaaaacaaactgctttttggctgtggtggcatgaaaccccaataagtcaatgacaatgctgcatgcttctgaaagctggccagtcagggacagccccacactacagaacaggcccaggcagcaagaaccttgtgcccctgaagtcaggctgaacactctcacttctgaaagctggacaatcctcaatgccaggcttcccaagagacttaatttgttttgctctgagagatggtcctataagcacagttcccctttgctctagtaagcaagatactcagcttcagcactgaccagcctcacaatctgtcctcaccaagtggagggccctccctccgggttcctccacggccgtatctgtctctgttcatacaccttcccctcagcacttagagacatgggctggcatggcgggtgctggcagcaggggtgagaaataaactttcagccctagatgaggagcccaagaggagagcatgccgtcacctggagtctctggtatgtgcctggcacctgtactgattgcattaaccactgtgattttttaaaagatgtactattttgaaatgtataatacatatggagaagtgtatgaaatatgtacaatttaaagataaggaaaaatgcatgcctgtgtgcccaccacctagtgaagaaatacaacctggacaccactttggaagcctgtctgtgttcacccgtcgcattctccctcctcccccagcccaggtatcctccatcctttagccatcccctgactttctttagtttcattgcctgaagtctgagctactagggaggctgaggcaggataatttcttgaacccaggagcagaggttgcagtgagccgagattgccccattgcactccaccctgggtgacagtgcgagactccctcaaaaaaaaaaagtttgtgggaccaattccaatcgagtcaaggggtctcaattggccaaggcagtctcaaacttctgacccaaagtgatctgcctggttcggcctcccaaagtgctgggattgtaggcgtgagccaccatgcccggcctcccctccttttcattcagggattttaaatgttttatttgctccatctgttatgtatgattgccttgacgatttcagcttgaattaaaattacatatttttgcctgtgtttattaatatttaaacatattaaaataatacatgttcataatgaaaatgaaacattacaaacaaatacacaggaaaggcagtattccccttccagttccactcttgaaataaccagttaacaagatgatgaacatctttccatgatgttctccaagattcatataattatttgcaatcatacaatggcatatacagctcatgtgcagtggctcatgcaagtaatcccagtactttgggagactgaactgggtggatcatttgaggtcag

SEQ ID NO: 713324 - DNA, 1763 bp, Homo sapiens
ctccatcttcaccgcctcggtgtctctatctcgtcccgatcaccgtcgcctctcctctggcggagagcaccagcattcccactggtctctgcttttcctcaaacgcatctctgtgtatatctcccctcaggatcactctgtggcccccactgctctgggtggaaccttctttccagtggtgtttcagtcccctgggtctgcctcactcctcaccaccgtcttgtgcttctgcactgagctccagccagaccacckgcctgcagccacctggcactacctgttcccgtgtgcttcctgcctttgcctggagagaataacaatctatagtccaaactcaaggacaaaaacaaactgctttttggctgtggtggcatgaaaccccaataagtcaatgacaatgctgcatgcttctgaaagctggccagtcagggacagccccacactacagaacaggcccaggcagcaagaaccttgtgcccctgaagtcaggctgaacactctcacttctgaaagctggacaatcctcaatgccaggcttcccaagagacttaatttgttttgctctgagagatggtcctataagcacagttcccctttgctctagtaagcaagatactcagcttcagcactgaccagcctcacaatctgtcctcaccaagtggagggccctccctccgggttcctccacggccgtatctgtctctgttcatacaccttcccctcagcacttagagacatgggctggcatggcgggtgctggcagcaggggtgagaaataaactttcagccctagatgaggagcccaagaggagagcatgccgtcacctggagtctctggtatgtgcctggcacctgtactgattgcattaaccactgtgattttttaaaagatgtactattttgaaatgtataatacatatggagaagtgtatgaaatatgtacaatttaaagataaggaaaaatgcatgcctgtgtgcccaccacctagtgaagaaatacaacctggacaccactttggaagcctgtctgtgttcacccgtcgcattctccctcctcccccagcccaggtatcctccatcctttagccatcccctgactttctttagtttcattgcctgaagtctgagctactagggaggctgaggcaggataatttcttgaacccaggagcagaggttgcagtgagccgagattgccccattgcactccaccctgggtgacagtgcgagactccctcaaaaaaaaaaagtttgtgggaccaattccaatcgagtcaaggggtctcaattggccaaggcagtctcaaacttctgacccaaagtgatctgcctggttcggcctcccaaagtgctgggattgtaggcgtgagccaccatgcccggcctcccctccttttcattcagggattttaaatgttttatttgctccatctgttatgtatgattgccttgacgatttcagcttgaattaaaattacatatttttgcctgtgtttattaatatttaaacatattaaaataatacatgttcataatgaaaatgaaacattacaaacaaatacacaggaaaggcagtattccccttccagttccactcttgaaataaccagttaacaagatgatgaacatctttccatgatgttctccaagattcatataattatttgcaatcatacaatggcatatacagctcatgtgcagtggctcatgcaagtaatcccagtactttgggagactgaactgggtggatcatttgaggtcag

SEQ ID NO: 713325 - DNA, 1763 bp, Homo sapiens
ctccatcttcaccgcctcggtgtctctatctcgtcccgatcaccgtcgcctctcctctggcggagagcaccagcattcccactggtctctgcttttcctcaaacgcatctctgtgtatatctcccctcaggatcactctgtggcccccactgctctgggtggaaccttctttccagtggtgtttcagtcccctgggtctgcctcactcctcaccaccgtcttgtgcttctgcactgagctccagccagaccacctgcctgcagccacctggcrctacctgttcccgtgtgcttcctgcctttgcctggagagaataacaatctatagtccaaactcaaggacaaaaacaaactgctttttggctgtggtggcatgaaaccccaataagtcaatgacaatgctgcatgcttctgaaagctggccagtcagggacagccccacactacagaacaggcccaggcagcaagaaccttgtgcccctgaagtcaggctgaacactctcacttctgaaagctggacaatcctcaatgccaggcttcccaagagacttaatttgttttgctctgagagatggtcctataagcacagttcccctttgctctagtaagcaagatactcagcttcagcactgaccagcctcacaatctgtcctcaccaagtggagggccctccctccgggttcctccacggccgtatctgtctctgttcatacaccttcccctcagcacttagagacatgggctggcatggcgggtgctggcagcaggggtgagaaataaactttcagccctagatgaggagcccaagaggagagcatgccgtcacctggagtctctggtatgtgcctggcacctgtactgattgcattaaccactgtgattttttaaaagatgtactattttgaaatgtataatacatatggagaagtgtatgaaatatgtacaatttaaagataaggaaaaatgcatgcctgtgtgcccaccacctagtgaagaaatacaacctggacaccactttggaagcctgtctgtgttcacccgtcgcattctccctcctcccccagcccaggtatcctccatcctttagccatcccctgactttctttagtttcattgcctgaagtctgagctactagggaggctgaggcaggataatttcttgaacccaggagcagaggttgcagtgagccgagattgccccattgcactccaccctgggtgacagtgcgagactccctcaaaaaaaaaaagtttgtgggaccaattccaatcgagtcaaggggtctcaattggccaaggcagtctcaaacttctgacccaaagtgatctgcctggttcggcctcccaaagtgctgggattgtaggcgtgagccaccatgcccggcctcccctccttttcattcagggattttaaatgttttatttgctccatctgttatgtatgattgccttgacgatttcagcttgaattaaaattacatatttttgcctgtgtttattaatatttaaacatattaaaataatacatgttcataatgaaaatgaaacattacaaacaaatacacaggaaaggcagtattccccttccagttccactcttgaaataaccagttaacaagatgatgaacatctttccatgatgttctccaagattcatataattatttgcaatcatacaatggcatatacagctcatgtgcagtggctcatgcaagtaatcccagtactttgggagactgaactgggtggatcatttgaggtcag

SEQ ID NO: 713326 - DNA, 1763 bp, Homo sapiens
ctccatcttcaccgcctcggtgtctctatctcgtcccgatcaccgtcgcctctcctctggcggagagcaccagcattcccactggtctctgcttttcctcaaacgcatctctgtgtatatctcccctcaggatcactctgtggcccccactgctctgggtggaaccttctttccagtggtgtttcagtcccctgggtctgcctcactcctcaccaccgtcttgtgcttctgcactgagctccagccagaccacctgcctgcagccacctggcactacctgttcccgtgtgcttcctgcctttgcctggagagaataacaatctatagtccaaactcaaggacaaaaacaaactgctttttggctgtggtggcatgaaaccccaataagtcaatgacaatgctgcatgcttctgaaagctggccagtcagggacagccccacactacagaacaggcccaggcagcaagaaccttgtgcccctgaagtcaggctgaacactctcacttctgaaagctggacaatcctcaatgccaggcttcccaagagacttaatttgttttgctctgagagatggtcctataagcacagttcccctttgctctagtaagcaagatactcagcttcagcactgaccagcctcacaatctgtcctcaccaagtggagggccctccctccgggttcctccacggccgtatctgtctctgttcatacaccttcccctcagcacttagagacatgggctggcatggcgggtgctggcagcaggggtgagaaataaactttcagccctagatgaggagcccaagaggagagcatgccgtcacctggagtctctggtatgtgcctggcacctgtactgattgcattaaccactgtgattttttaaaagatgtactattttgaaatgtataatacatatggagaagtgtatgaaatatgtacaatttaaagataaggaaaaatgcatgcctgtgtgcccaccacctagtgaagaaatacaacctggacaccactttggaagcctgtctgtgttcacccgtcgcattctccctcctcccccagcccaggtatcctccatcctttagccatcccctgactttctttagtttcattgcctgaagtctgagctactagggaggctgaggcaggataatttcttgaacccaggagcagaggttgcagtgagccgagattgccccattgcactccaccctgggtgacagtgcgagactccctcaaaaaaaaaaagtttgtgggaccaattccaatcgagtcaaggggtctcaattggccaaggcagtctcaaacttctgacccaaagtgatctgcctggttcggcctcccaaagtgctgggattgtaggcgtgagccaccatgcccggcctcccctccttttcattcagggattttaaatgttttatttgctccatctgttatgtatgattgccttgaygatttcagcttgaattaaaattacatatttttgcctgtgtttattaatatttaaacatattaaaataatacatgttcataatgaaaatgaaacattacaaacaaatacacaggaaaggcagtattccccttccagttccactcttgaaataaccagttaacaagatgatgaacatctttccatgatgttctccaagattcatataattatttgcaatcatacaatggcatatacagctcatgtgcagtggctcatgcaagtaatcccagtactttgggagactgaactgggtggatcatttgaggtcag

SEQ ID NO: 713327 - DNA, 861 bp, Homo sapiens
gtgccctagaacttagagtataataaaaaaaagttgtaaagataaattttgtctagaattcaactaagaggcacctagaaatttttaaggataattaaaattcgaagatgaaatttgaatgttaacataaagcaaaataaaagaaatgccaaatacatacaattttaaaactataacaacttcaaaattcaaaaagaaacttttatattattatgttatataatatttttatttttaaaggcacttttttcttgtgattaaaggtatgtgttctcttaaaaacatgtatttctctacatttaaaaaaatgattttttaacttaaaaaaataaattattttcttcctttttctattcctattttatttttttaaatttttttagacttttggccatttttcttaactttatatagcactaaatgacttataaaatactataattatataaattttgataggatgttagtggaaatttatatgctattctgttagtttattaaattaatgtttatttttatacaaacattaattattttcaaagtggcyactaaaatgaataataagcaatcataaaataattatacaaaattatatagataaataagggcagaaattgtttatttttatataattatttattttattttatttttttgagagggaatctcgctttgtcacccagtctggagtgcagtggcatgatttcggctcacggcaaactccatctcctgggttcacaccattctcctgcctcagcctccatagttgctgggactataggtgcccaccaccacatccagctaattttttttttttttgtatttttagcagagacaggatttcactgtgttagccaggat

SEQ ID NO: 713328 - DNA, 861 bp, Homo sapiens
gtgccctagaacttagagtataataaaaaaaagttgtaaagataaattttgtctagaattcaactaagaggcacctagaaatttttaaggataattaaaattcgaagatgaaatttgaatgttaacataaagcaaaataaaagaaatgccaaatacatacaattttaaaactataacaacttcaaaattcaaaaagaaacttttatattattatgttatataatatttttatttttaaaggcacttttttcttgtgattaaaggtatgtgttctcttaaaaacatgtatttctctacatttaaaaaaatgattttttaacttaaaaaaataaattattttcttcctttttctattcctattttatttttttaaatttttttagacttttggccatttttcttaactttatatagcactaaatgacttataaaatactataattatataaattttgataggatgttagtggaaatttatatgctattctgttagtttattaaattaatgtttatttttatacaaacattaattattttcaaagtggctactaaaatgaataataagcaatcataaaataattatacaaaattatatagataaataagggcagaaattgtttatttttatataaytatttattttattttatttttttgagagggaatctcgctttgtcacccagtctggagtgcagtggcatgatttcggctcacggcaaactccatctcctgggttcacaccattctcctgcctcagcctccatagttgctgggactataggtgcccaccaccacatccagctaattttttttttttttgtatttttagcagagacaggatttcactgtgttagccaggat

SEQ ID NO: 713329 - DNA, 861 bp, Homo sapiens
gtgccctagaacttagagtataataaaaaaaagttgtaaagataaattttgtctagaattcaactaagaggcacctagaaatttttaaggataattaaaattcgaagatgaaatttgaatgttaacataaagcaaaataaaagaaatgccaaatacatacaattttaaaactataacaacttcaaaattcaaaaagaaacttttatattattatgttatataatatttttatttttaaaggcacttttttcttgtgattaaaggtatgtgttctcttaaaaacatgtatttctctacatttaaaaaaatgattttttaacttaaaaaaataaattattttcttcctttttctattcctattttatttttttaaatttttttagacttttggccatttttcttaactttatatagcactaaatgacttataaaatactataattatataaattttgataggatgttagtggaaatttatatgctattctgttagtttattaaattaatgtttatttttatacaaacattaattattttcaaagtggctactaaaatgaataataagcaatcataaaataattatacaaaattatatagataaataagggcagaaattgtttatttttatataattatttattttattttatttttttgagagggaatctcgctytgtcacccagtctggagtgcagtggcatgatttcggctcacggcaaactccatctcctgggttcacaccattctcctgcctcagcctccatagttgctgggactataggtgcccaccaccacatccagctaattttttttttttttgtatttttagcagagacaggatttcactgtgttagccaggat

SEQ ID NO: 713330 - DNA, 861 bp, Homo sapiens
gtgccctagaacttagagtataataaaaaaaagttgtaaagataaattttgtctagaattcaactaagaggcacctagaaatttttaaggataattaaaattcgaagatgaaatttgaatgttaacataaagcaaaataaaagaaatgccaaatacatacaattttaaaactataacaacttcaaaattcaaaaagaaacttttatattattatgttatataatatttttatttttaaaggcacttttttcttgtgattaaaggtatgtgttctcttaaaaacatgtatttctctacatttaaaaaaatgattttttaacttaaaaaaataaattattttcttcctttttctattcctattttatttttttaaatttttttagacttttggccatttttcttaactttatatagcactaaatgacttataaaatactataattatataaattttgataggatgttagtggaaatttatatgctattctgttagtttattaaattaatgtttatttttatacaaacattaattattttcaaagtggctactaaaatgaataataagcaatcataaaataattatacaaaattatatagataaataagggcagaaattgtttatttttatataattatttattttattttatttttttgagagggaatctcgctttgtcacccagtctggagtgcagtggcaygatttcggctcacggcaaactccatctcctgggttcacaccattctcctgcctcagcctccatagttgctgggactataggtgcccaccaccacatccagctaattttttttttttttgtatttttagcagagacaggatttcactgtgttagccaggat

SEQ ID NO: 713331 - DNA, 861 bp, Homo sapiens
gtgccctagaacttagagtataataaaaaaaagttgtaaagataaattttgtctagaattcaactaagaggcacctagaaatttttaaggataattaaaattcgaagatgaaatttgaatgttaacataaagcaaaataaaagaaatgccaaatacatacaattttaaaactataacaacttcaaaattcaaaaagaaacttttatattattatgttatataatatttttatttttaaaggcacttttttcttgtgattaaaggtatgtgttctcttaaaaacatgtatttctctacatttaaaaaaatgattttttaacttaaaaaaataaattattttcttcctttttctattcctattttatttttttaaatttttttagacttttggccatttttcttaactttatatagcactaaatgacttataaaatactataattatataaattttgataggatgttagtggaaatttatatgctattctgttagtttattaaattaatgtttatttttatacaaacattaattattttcaaagtggctactaaaatgaataataagcaatcataaaataattatacaaaattatatagataaataagggcagaaattgtttatttttatataattatttattttattttatttttttgagagggaatctcgctttgtcacccagtctggagtgcagtggcatgatttcggctcackgcaaactccatctcctgggttcacaccattctcctgcctcagcctccatagttgctgggactataggtgcccaccaccacatccagctaattttttttttttttgtatttttagcagagacaggatttcactgtgttagccaggat

SEQ ID NO: 713332 - DNA, 1344 bp, Homo sapiens
ggggaggctgggaggtgggagggcactgtggaggatcttactctttccaccctcctctcactgatcctagttttgaacaagaaacaggtgatctgtttctctagttgcagctgaatagaaaccaggacaagaaagtgttgtcctccycagacacgtttctgtctcctgggtcctaaccagctgcctacttgagccatctgacttcaatccacagggcctcccaggagctgaatccagaagggcaagaacaaattagcaaagcaggaaagggcattcagaagagaacagcatgggcaaaggtcccaaggccagaggacttggaaactgcaagtccctcagtgtagagatgagtctgtagaggaggttgacacaagcttgtgaaagacccagtatgccaggctaagggggtgggaacagtgagggacactgagggttttatggcttaaattttgacaagtgtatctacatatagacaactaatgtaacactcctttttttttttttttttttttttttagagatggagtctcactctgtcgcccaggctagagtgcagtggtgagatcttggctcactgcaacctgcgcttcctgggttcaagtgattctcctgccttagcctcctgagtggctgggactacagactgatcccaccacatctggctaatgttttgtatttttggtggagacagggcttcgccatgttggccaggccggtctcgaactcctgagctcaagtgatccacctgcctcagcctcccaaagtgctgggattacaggcaacactttttttaattttcttttttgagacagagtcttgctttatcatccaggttagagtgaagtggctcagtcatagctcactgcagccttgacctcccgtactcaagcaatccttcctcctcagcctcctgagttgctttcaatttttttttttttttttttttgaagagacagggtctcactatgcggcctaggctagtctcaaacttcaagagaccaaggtgggaggatggctgggctcaagagatcctcctgccttggcttctcaaagtgctgggattgtaggcatgagtcactgcctgtccatataaagtaacactcttgaactcactatccagacttgaggttttgttaagttactgttaaaattttgtcaattttgctcttgagttttcaaaataaacaggtcattacagataaagttgaagttccctttgtcccttccccagtaccgttcccctccctttcagaagcaccaccatcatatattttttctatttttatcatagatatatatccatggataacattataaggcttcagtgcattttaaaaagaggtc

SEQ ID NO: 713333 - DNA, 651 bp, Homo sapiens
catgaagagctggaaccatcaagacactatgaactcgtgaaactgatcatctaatctccctctcatgataaaggcctgaaaggaactgtgtgagtgaaatcaaaatcacttacaataagggctatacaggttaaagtgggaaggaattctagctatsatgttttgaaacactgcatgaaagcaaccaaagagaaagctctatagagttaaaaaaataaataaacaacccatgctctttctagaactctgaaccatgctctttctaaaagttcagggaagtgttttacacaaaaatgagcaacaaaatatattgatggcaatactatactattataaaaaataagagaataacaagtagaataatcttcttatagtcattgaaagtgctccagaaagacatgctcacaaaatatatcaaaactttaacctattcttttaaaagaagctgaagcacttaatgttgttcaagacatgaaataacaacctaaccaaaattagaaaaacttagaaatttggaaagacagctcaagaaataaataaaaattttaaaatatatatatttcagaaatgaagacagcaaaagagaacaaacagcacataaacgcagcaaaaattacttaagaaatatagaaagtgaaagaaagaacatca

SEQ ID NO: 713334 - DNA, 654 bp, Homo sapiens
caatcccattcctgttgtttaagttgttccctgcctgccaccctactcccaaccccactccttggtcatgtggtctaagatccttccagatgccacagcatttactgggcactgactacactctaggaattggtctaagccctcttcttgaattatcttatttattcctcccaacaatcctattaggtggatgatattttcccagtatgacagataaaactgaggagtttagccaatgtcacaaagctaataagcaggacaatccatctccaaagcttccctcttacctatgaaatatatcctctgaaattcactgacagagaacccatgagaactttggtcccccaaaggatcatccctgaggggtgtcaatgtcacttgattataggctctttgtggggtaggggtttaaatgagattttctgtagggtccagccctacgggcttagcaggtgttctccccatgtgcagtgatgagagactgtaagaaataaagacacaagacaaagagataaagagaaaacagctgggcccgggggaccactaccaccaagatgaggggaccggtagtggcccagaatggctgggygcgctgacatttattgcaaacaatacaagggggacaaggtaaggagggtgagtcatccaagtgat

SEQ ID NO: 713335 - DNA, 1229 bp, Homo sapiens
cagtgccacccccagacacctgcgcatgttctgctctcggaggctccctgagccctgtccttttgggaaatttacagaggcttcattacgtaggcatgatggattaaactactggccactgaccaacccaacctgcagcccctcccctcccctgaaggctgggggtggggctgaagtcccagctctctaatcccgttgtccctcatcctgaagctccctggggacccccagtcaccagtcctctcattagcatacaaaagatgcccttgccactccagagattccaagggttttaagagctgtatgtcaggaaaccaaaatatccatctcacaatctcacaaaataagcaatgtcagaaaaccaaaatatccatctcacaatctcacaaaataaccacttcacgttctcacagtgaatggagcaaagatagcgctgaagcgttcaaggtttcttttcaagatgatgaaaatgggctaaaactgcgaatatggtaaaaaccactgagttacccactgtaaacgggtggattgtatggtgcgtgagaaaccactgaattacccactgtaaatgggtggattgtatgctgtgtgagaaaccactgaattagccactgtaaacgggtggattgtatggtgcgtgagaaaccactgaattagccactgtaaacgggtggattgtatggtgcgtgagaaaccactgaattacccactgtaaacgggtggattgtatggtgcgtgagaaaccactgaattacccactgtaaacgggtggattgtatgctgcatgacaaaccactgaattacccactgtaaacgggtggattgtatggtgcgtgagaaaccactgaattagccactgtaaacgggtggattgtatggtgcgtgagaaaccactgaattacccactgtaaacgggtggattgtatggtgcgtgagaaaccactgaattacccactgtaaacgggtggattgtatgctgcatgacaaaccactgaattacccactgtaaacgggtggattgtatggtgcgtgagaaaccactgaattagccactgtaaacgggtggattgtatggtgcgtgagaaaccactgaattacccactgtaaacgggtggattgtatgctgcgtgacaaaccactgaattacccactgtaaaygggtggattgtatggtgcgtgagaaaccactgaattacccactgtaaacgggtggattggatggtgcgtga

SEQ ID NO: 713336 - DNA, 1229 bp, Homo sapiens
cagtgccacccccagacacctgcgcatgttctgctctcggaggctccctgagccctgtccttttgggaaatttacagaggcttcattacgtaggcatgatggattaaactactggccactgaccaacccaacctgcagcccctcccctcccctgaaggctgggggtggggctgaagtcccagctctctaatcccgttgtccctcatcctgaagctccctggggacccccagtcaccagtcctctcattagcatacaaaagatgcccttgccactccagagattccaagggttttaagagctgtatgtcaggaaaccaaaatatccatctcacaatctcacaaaataagcaatgtcagaaaaccaaaatatccatctcacaatctcacaaaataaccacttcacgttctcacagtgaatggagcaaagatagcgctgaagcgttcaaggtttcttttcaagatgatgaaaatgggctaaaactgcgaatatggtaaaaaccactgagttacccactgtaaacgggtggattgtatggtgcgtgagaaaccactgaattacccactgtaaatgggtggattgtatgctgtgtgagaaaccactgaattagccactgtaaacgggtggattgtatggtgcgtgagaaaccactgaattagccactgtaaacgggtggattgtatggtgcgtgagaaaccactgaattacccactgtaaacgggtggattgtatggtgcgtgagaaaccactgaattacccactgtaaacgggtggattgtatgctgcatgacaaaccactgaattacccactgtaaacgggtggattgtatggtgcgtgagaaaccactgaattagccactgtaaacgggtggattgtatggtgcgtgagaaaccactgaattacccactgtaaacgggtggattgtatggtgcgtgagaaaccactgaattacccactgtaaacgggtggattgtatgctgcatgacaaaccactgaattacccactgtaaacgggtggattgtatggtgcgtgagaaaccactgaattagccactgtaaacgggtggattgtatggtgcgtgagaaaccactgaattacccactgtaaacgggtggattgtatgctgcgtgacaaaccactgaattacccactgtaaacgggtggattgtatggtgcgtgagaaaccactgarttacccactgtaaacgggtggattggatggtgcgtga

SEQ ID NO: 713337 - DNA, 1229 bp, Homo sapiens
cagtgccacccccagacacctgcgcatgttctgctctcggaggctccctgagccctgtccttttgggaaatttacagaggcttcattacgtaggcatgatggattaaactactggccactgaccaacccaacctgcagcccctcccctcccctgaaggctgggggtggggctgaagtcccagctctctaatcccgttgtccctcatcctgaagctccctggggacccccagtcaccagtcctctcattagcatacaaaagatgcccttgccactccagagattccaagggttttaagagctgtatgtcaggaaaccaaaatatccatctcacaatctcacaaaataagcaatgtcagaaaaccaaaatatccatctcacaatctcacaaaataaccacttcacgttctcacagtgaatggagcaaagatagcgctgaagcgttcaaggtttcttttcaagatgatgaaaatgggctaaaactgcgaatatggtaaaaaccactgagttacccactgtaaacgggtggattgtatggtgcgtgagaaaccactgaattacccactgtaaatgggtggattgtatgctgtgtgagaaaccactgaattagccactgtaaacgggtggattgtatggtgcgtgagaaaccactgaattagccactgtaaacgggtggattgtatggtgcgtgagaaaccactgaattacccactgtaaacgggtggattgtatggtgcgtgagaaaccactgaattacccactgtaaacgggtggattgtatgctgcatgacaaaccactgaattacccactgtaaacgggtggattgtatggtgcgtgagaaaccactgaattagccactgtaaacgggtggattgtatggtgcgtgagaaaccactgaattacccactgtaaacgggtggattgtatggtgcgtgagaaaccactgaattacccactgtaaacgggtggattgtatgctgcatgacaaaccactgaattacccactgtaaacgggtggattgtatggtgcgtgagaaaccactgaattagccactgtaaacgggtggattgtatggtgcgtgagaaaccactgaattacccactgtaaacgggtggattgtatgctgcgtgacaaaccactgaattacccactgtaaacgggtggattgtatggtgcgtgagaaaccactgaattacccactgtaaacgggtggattgkatggtgcgtga

SEQ ID NO: 713338 - DNA, 922 bp, Homo sapiens
taaatttttaaaaagtttagtcaaaacaacaaatataaaaatatgattttaaaagcagacattgagttcgaaagagacagaactacatctaacttcttattagcaacagtggaaggcaaaagacagtggaatgatgtaccaagagaaagtagctatcattctaaaattgtataaccagcaaaaaatgtctttcaagaatgacagtgcaataaagacatttaccaataagagaaactgaagagaacattttgccaccagacttccactaaaagaaacctcaatggatgtacttgaggcagacagaaaatgatgcaagatggaaggtcagagatccaatacaaaaataaaaaagtacagaaagcagcaagtgtgtgttcaaatttctgtgagcacgtactgtacaaaccatgaatactaatgtcaattccaagtgaattaaaaamctaaacctaaaaccaaaatctatagagctttcaaaagttaatgtccaaggacatcttcatgatcaaattatagagaatctggattaagaaaatgtggcacatatacaccatggaatactatgcagccataaaaaatgatgagttcatgtcctttgtagggacatggatgaaattggaaaccatcattctcagtaaactatcgcaagaacaaaaaaccaaacaccgcatattctcactcataggtgggaattgaacaatgagatcacatggacacaggaaggggaatatcacactctggggactgtggtggggagaggggaggggggagggatagcattgggagatatacctaatgctagatgacgagttagtgggtgcagcgcaccagcatggcacatgtatacatatgtaactaacctgcacaatgtgcacatgtaccctaaaacttaaagtataattaaaaaaaaaaaattaaacaa

SEQ ID NO: 713339 - DNA, 2127 bp, Homo sapiens
ttacattaaatgaagatgtgtgtacatatatgagaaatttgagaattttatgactactctatttaaagattttttcttaactaatgcttctagaataaaacaataaggcctctatttgtaaattcaattttttttggagagctttaatttttttcagattatctttgttcccttactgaagtaaaggcgcatttgtcgctgactgcaagttgaaaaatacaaacatgacatattttaatccatgaagactcagacttttgcataaaagctaaaattataaaagcagctatagttataaccttaaaatgtccctaaattactagactttataccaaactcctaacatttaccacttcctcagttggttgctagattgtgtgcatgtgtaagataaattggttttacaacagacacatattctaaaccaaatacccacatacacactaacatccacattgtagcatatagtttattgcaaactaaaaacttaatggaggatgtagatgacatttcaaagaattgaatatggctggtctccttttctttctattcttccttaatagtatgcagatgctgtctaaaattctgtgtgtcctatgtctttgtatttttcgctatactcttgggagaggggaggagcttcttatcaaagggcacaacgttcagataataaaatagcaattgatttattcccagtccttatgtgaataataaaatgtgacccgtagcacccatattttgatttctattattatttttcactaatgaaaccatagcttttagactatagttcaatcctaaaagaatttttttctatccaaattcttctgaaaatatcagagggtaatataataaggacaaaggaatggacttgaagaggcttctacactgactagcaataattagatttgtagatatagagaaaagttgaatctatacaggtaatttgtccactttttttttttttaattgagatggagtctcactctgtcgcccaggctggaatgcaatggcacaatctcggcttactgaaacctccgcctcccgggttcaagtgattctactgcctcagtctcccgagtagctgggattacaggtgcccaccactacatccaactactttttgtattcttagcagagaccgagtttcaccatgttggccaggctggtctcgaactcctgtcctcaagtgatcagcccgccttggcctcccaaggtgctgggattacaggtgtaagccactgcgcccggcctctccactcttatactctacaggggcagacattacaaactgtaaagacatatgagttcccagtggtgttcactaaagtgttatatgttgttccacaagtcatgcactaaaatttatactacccctaggctaacactcaaagatgacatataaaaattttaattgcacatagtattctttagaaataatgattgcttattttgtaaattttatatttaaagtattatagtagtgctgtttaataatgaatttaagatagcttacccatctagaaattgagccatgtaaaaccaaggtaaaawcatcagatatgtaaaactggtaatatacacaaggtatcaagatggttcttatcaaatgaatacgaaaggtattcttcatatataaaggttaaatattgaagcatctgaattgctccctgcctataaaaagtagagctgtgtaaaattaagataatacagaagtaattgattaaaacaacaattttgagataaaatagctctttctgacagagtggctgtgggtgccacctgctgggtggtggcttggacttaacgctacttaaacttcgggaacctgactgctcactgagccagactgtcctaacatactattgtgatagctaattttatgtgctaacttcactggggtgcgggtgaccagatatttggttaatcattattctggatgtgtctgtgaggatatttctggggaagattaacttttgaatccatagagttattatagtaaagcagactgtcctccgcaatgtggcagagctttcatcttggaagcctgaataaaacaaaactactgagtaaaagagagttcattctctctctctcctcctgtcttccagctggacatcgattatc

SEQ ID NO: 713340 - DNA, 2127 bp, Homo sapiens
ttacattaaatgaagatgtgtgtacatatatgagaaatttgagaattttatgactactctatttaaagattttttcttaactaatgcttctagaataaaacaataaggcctctatttgtaaattcaattttttttggagagctttaatttttttcagattatctttgttcccttactgaagtaaaggcgcatttgtcgctgactgcaagttgaaaaatacaaacatgacatattttaatccatgaagactcagacttttgcataaaagctaaaattataaaagcagctatagttataaccttaaaatgtccctaaattactagactttataccaaactcctaacatttaccacttcctcagttggttgctagattgtgtgcatgtgtaagataaattggttttacaacagacacatattctaaaccaaatacccacatacacactaacatccacattgtagcatatagtttattgcaaactaaaaacttaatggaggatgtagatgacatttcaaagaattgaatatggctggtctccttttctttctattcttccttaatagtatgcagatgctgtctaaaattctgtgtgtcctatgtctttgtatttttcgctatactcttgggagaggggaggagcttcttatcaaagggcacaacgttcagataataaaatagcaattgatttattcccagtccttatgtgaataataaaatgtgacccgtagcacccatattttgatttctattattatttttcactaatgaaaccatagcttttagactatagttcaatcctaaaagaatttttttctatccaaattcttctgaaaatatcagagggtaatataataaggacaaaggaatggacttgaagaggcttctacactgactagcaataattagatttgtagatatagagaaaagttgaatctatacaggtaatttgtccactttttttttttttaattgagatggagtctcactctgtcgcccaggctggaatgcaatggcacaatctcggcttactgaaacctccgcctcccgggttcaagtgattctactgcctcagtctcccgagtagctgggattacaggtgcccaccactacatccaactactttttgtattcttagcagagaccgagtttcaccatgttggccaggctggtctcgaactcctgtcctcaagtgatcagcccgccttggcctcccaaggtgctgggattacaggtgtaagccactgcgcccggcctctccactcttatactctacaggggcagacattacaaactgtaaagacatatgagttcccagtggtgttcactaaagtgttatatgttgttccacaagtcatgcactaaaatttatactacccctaggctaacactcaaagatgacatataaaaattttaattgcacatagtattctttagaaataatgattgcttattttgtaaattttatatttaaagtattatagtagtgctgtttaataatgaatttaagatagcttacccatctagaaattgagccatgtaaaaccaaggtaaaaacatcagatatgtaaaactggtaatatacacaaggtatcaagatggttcttatcaaatgaatacgaaaggtattcttcatatataaaggttaaatattgaagcatctgaattgctccctgcctataaaaagtagagctgtgtaaaattaagataatacagaagtaattgattaaaacaacaattttgagataaaatagctctttctgacagagtggctgtgggtgccacctgctgggtggtggcttggacttaacgctacttaaacttcgggaacctgactgctcactgagccagactgtcctaacatactattgtgatagctaattttatgtgctaacttcactggggtgcgggtgaccagatatttggttaatcattattctggatgtgtctgtgaggatatttctggggaagattaacttttgaatccrtagagttattatagtaaagcagactgtcctccgcaatgtggcagagctttcatcttggaagcctgaataaaacaaaactactgagtaaaagagagttcattctctctctctcctcctgtcttccagctggacatcgattatc

SEQ ID NO: 713341 - DNA, 846 bp, Homo sapiens
gctggctcctgtttagagtctcataaaggctcaaattaatgtgttggtgggactgcattcttctggagattctagggataaatctgcttccaagctcattctggttattggctgmattcagtttcttgcagttgaagaaatgaggttcccattttgtttctggctgtcagccaggagcttctatcagcttcttaaaaccacctgcatcccttgtcaacttgcctcctccatctttcaaccagcaacagcactggagtccttctaattatttttatttttatttttttgtagagatggggccttgctatattgcccaggctggtctcaaactcctggccccaagccatcctcccacctcagcctcccaaagtgctgggattccaggcaggcatgaaccattgcacccagcctggagtccttctttcacctcaggtctcttctgacttcccttccagccacatctcttttgcttttctcttttgttgcatctgtctgactccacccacccaaagttctctgcttttaagaaaaatggtgattagattggacacacttggataagctaggctaatctacctattttaaggtctataaccttaattatatctacaaagttcattttgccacacaaggttatatgttcacaggttcctgagattaggatgtgaacatcttgggagacctttattctgcctcccacaacatgaagtgactagaacaaatgagataaagaagcggaaggtgcagaatttacaggtggggaatattctggtggtaaggttcagggtgtatccacaggagtgagaggagtagagggaatgtcattggtggctagaaggccaaaga

SEQ ID NO: 713342 - DNA, 1338 bp, Homo sapiens
aaacttttgttctgttccactgattttctattcttaatacattttgtactgttttatttttaagctttataacatgtctcattacttggtattctaagtctctgataattattaattttttaattttcaaaatttcattactattcttgtctgttttctcctaattaaatttgcaaaggtcttaagaggttctaaaataaccttcaggcatttttatttagaattacattttgtattggagaatctgaggaaaatttaaatgtcttttgtaattwtgcatctgcattcttaggaatatgttatgtctatacagaaacttgttcaagttgtcttcagtcaggtgttaaggtattcttcatatagctcctactaatttattgttaaatttctctctatgtatttatatttaatgtacatagatatttttactcaaactatcatctcattaatatattaatagaaaagcaaatcatttgtatatatccatttatgatcaatctatttttttaatctgaatttttaaaatactttttcacttgattctggtgggcttcttgaatatatcatcaaataatgataattttgtctctactggatgataattttttcctaatagattgcaatcatagttttgtttccatccttttttgcataggataaagttgttacaataatgttaattttggattactagcaagcataattttctttactttaatggcaatgcaaagagagtttaagcttgtaataggcttgctgttgtttgaagtattctgtatctcattacggattttttttcttcctggtttaccaatagatagataacaggtagacaactgtttataattttgccaagtatctttcttgtgtctattgaaagatcatttaaaaattttataaagcctcatttgtaagatatgttgtcaccccagtaacatttctaatactgaaccaatgttgcttttccttgtttaataatgttacattattcttttaatataagcaaactaaccttggagtttaactattacttctatttattttatgaatttcttaagtccatttttatatgtgaaaaagttgaaaatataccttattgagatgtttaggatagtaggttgggcttttattgggtaaatttgtgacttagtgtatgagtgattactgaggggaaaaaaaataatcactaaagacattgtaagtgaaccagagtaaagttgtgttccttaagtgatgatagaggaggttgtggaatcgttttattttcctcattgcaatgcccaccagggagttttcttctaagttcagctgcaagatatccataggccacatgtgaca

SEQ ID NO: 713343 - DNA, 656 bp, Homo sapiens
taagaaagtttaacctgccaaattctctggtaggtcgttcctgccatcacccgcttccacttcatcctcttctgtatggtggagaatcctgggcatccctgaatctaacttaatgctttccaaaccacatgtcaactattgctttgtgtatgtgtctttatccccagtgaatacatacacctggagatgaagatcagagattgtctttttgcttagccartgttcagctcatggcaagcctctattatgtttattgaacacattgatgaatgaatgaagttttaagaaattgagcaaggggctaaaatgagaagggggattcagctatattttaactcttagaactcactaataaaatttgtcttactggcttagttatggatggtttcaccagtaggtagatgaaaacagtgggaatggagggataaagaattcagtagcttgttatctgcttgtgctaatgaaagtaaatacaaagccagagcactttctggattgttttgtgaggccataagttgctgcatctatgtcatcttgctaaattttattttttactttttctgatccccccatcctggcagaaaaatgcctgaaagaagagttgccaaattgcgatgtctatttcatagttgactattcctcgtcaataataacat

SEQ ID NO: 713344 - DNA, 656 bp, Homo sapiens
taagaaagtttaacctgccaaattctctggtaggtcgttcctgccatcacccgcttccacttcatcctcttctgtatggtggagaatcctgggcatccctgaatctaacttaatgctttccaaaccacatgtcaactattgctttgtgtatgtgtctttatccccagtgaatacatacacctggagatgaagatcagagattgtctttttgcttagccaatgttcagctcatggcaagcctctattatgtttattgaacacattgatgaatgaatgaagttttaagaaattgagcaaggggctaaaatgagaagggggattcagctatattttaactcttagaactcactaataaaatttgtcttactggcttagttatggatggtttcaccagtaggtagatgaaaacagtgggaatggagggataaagaattcagtagcttgttatctgcttgtgctaatgaaagtaaatacaaagccagagcactttctgrattgttttgtgaggccataagttgctgcatctatgtcatcttgctaaattttattttttactttttctgatccccccatcctggcagaaaaatgcctgaaagaagagttgccaaattgcgatgtctatttcatagttgactattcctcgtcaataataacat

SEQ ID NO: 713345 - DNA, 1022 bp, Homo sapiens
atgtgtgtgtgtgtgtgtrtatatatatatatatgtgtgtgtgtgtgtgtgtaggtgtgtgtgtacacatgtgtgtgtatatatgtatatatgtatatgtgtatatatatatgtgtatatatatatgaagctattaagtgacagagttgaggtctgaattctgtccgatatcaaagccaatattctgatccctgatgtataaaacctcaatttatccttcgattgtctagagagccctggaccattaacctattccttgcaagttcttaaccgatttgttctgatgttgacataacacagataaggcagttaagagtttaaaaccaaggaacgaacgagggcttagaaaattcagcagaactactaaaacaacttttgtcaaaatgtgtcactttattttgatagcttttaggttgataaagcaggaggcaggactctaagctagtatctctatatcaactcttctatcatgataaacttgtgagcaagatgagtaaatgggagctggttgatagtggagatgggcaatactggtgctgtgattattcagtacttgtattgatgagtgaagattagatatataaatatgtaaattatagaatttttagaggaggatttaaaaatgtgtaaaacagattattaaaaattttctgtttacaatattttagaaaatattttgagtgaataatgtactagaaatttttacatttaaaaaatcacaagactacatttataattgcaagtctacattctctaacttctctgaataaatacaaaatttaattaagaactatccatagaatggtagacatttggaatagaaaattaccctatatagttcacctctttcactggagtaatttatttgcagattgaacactcagtagagaaatttttccacatctaagggacagcatcaaccaggaagtcttcctctagaggaagtctctaaaagtattggagttcctagattacttaattggtcatgaaacaaaacactgcaagagaaagtaaatcaaacc

SEQ ID NO: 713346 - DNA, 1022 bp, Homo sapiens
atgtgtgtgtgtgtgtgtgtatatatatatatrtgtgtgtgtgtgtgtgtgtaggtgtgtgtgtacacatgtgtgtgtatatatgtatatatgtatatgtgtatatatatatgtgtatatatatatgaagctattaagtgacagagttgaggtctgaattctgtccgatatcaaagccaatattctgatccctgatgtataaaacctcaatttatccttcgattgtctagagagccctggaccattaacctattccttgcaagttcttaaccgatttgttctgatgttgacataacacagataaggcagttaagagtttaaaaccaaggaacgaacgagggcttagaaaattcagcagaactactaaaacaacttttgtcaaaatgtgtcactttattttgatagcttttaggttgataaagcaggaggcaggactctaagctagtatctctatatcaactcttctatcatgataaacttgtgagcaagatgagtaaatgggagctggttgatagtggagatgggcaatactggtgctgtgattattcagtacttgtattgatgagtgaagattagatatataaatatgtaaattatagaatttttagaggaggatttaaaaatgtgtaaaacagattattaaaaattttctgtttacaatattttagaaaatattttgagtgaataatgtactagaaatttttacatttaaaaaatcacaagactacatttataattgcaagtctacattctctaacttctctgaataaatacaaaatttaattaagaactatccatagaatggtagacatttggaatagaaaattaccctatatagttcacctctttcactggagtaatttatttgcagattgaacactcagtagagaaatttttccacatctaagggacagcatcaaccaggaagtcttcctctagaggaagtctctaaaagtattggagttcctagattacttaattggtcatgaaacaaaacactgcaagagaaagtaaatcaaacc

SEQ ID NO: 713347 - DNA, 652 bp, Homo sapiens
tgccaaatacaatattctgcaaattgctatgaatcattagtgagtaaattcatttgtagttcctaggtatttcctcttgcctgtgactgtcaaacaatggcagtatgatggattgagtcaccccaggcagatctcctctgactttaacgtcgaataaggttacagatctgactttaatgctcactgttaacatacttgggaataagttattttactttttkgacacattgtttttcatttctttgcattatatacacaatagttaaaaaggattgctaaggtataattggcagagcaattaagagctgcagtttggcatacttattactttttgaggataattcatttaagtcatttctcaaaacaatataaaaggatgaagatagaatatagtcttatgattagttagcattacatattcaataaacgtttgaaatgtactctcctgcttttccctgagataacttgaacttctaaagcattgtaatagaatgtcttttctagaaaaattccaaatggttgcaagtgcatgcaattttaggccaaattgatcaactcctcttgttttgttttagaatacagacataacaaaaccagtaagttacctaacatcatatagcttatattctggtgagatgacaatgtaagtgga

SEQ ID NO: 713348 - DNA, 1263 bp, Homo sapiens
aaaaatgccagtagtttccgtgtgtttcctaaacagcctataagatagagagtgaggtaagagggtagagttcagggatcagacaaatttaggttgaattctaggacccaccatacatgacattagacaagttacttaacctcttcaggtcttggttttcctgtaaaaataaaaagaagaaattccatgaagactaaattcaacagtgcgcccatcacatccagcctagcagatgacaagtactgctttatgtgagccagtttaccgtagtcatgtgcagtttataaaaattttcaataatagcaaaaaatgcattttttttyactggcaacccttaggccttcaaaacattctgcttctcagaatgttcattgaattgcagtcaaccaaaattcttctgtgcaccccagtttcacttcaggatcccgcagaagcaggccccctcatgaggagggtgctttgggggcctgcatggtgggtgtacacagcagacatgagctctgagttccaatcccggctcagcatgaacacggaggatgtcccaggatgcacagcttggtcacagtgataagagccagccttgacgatggcccgtggccggccccatgcaccaccgggatttacagagacacaaagctgatccctatcacagcccaagatctctgttttgcagatgaggaagccgagattaaattaggtgacctgtgcagagtcggaattcaggatgtggcagaggtgaggcttgagtcggcgaggtcggccaggctctgcaaggagttctctttggtgtgacacattcagctttcatccatttgtggaactcacactctggcaggcacagtgccagacgatgtggcagcgccctcacagagcccggcttccagcaagagacaggcagctcggccaggccagcgccatccggacgtttgataagtatcaattgacagtcagggaatgctcagcagaaagaattcaaacagaatagcaaggttctgggaagacttcctttctaagaggatgttcttgaaaacctaagaatctttaccaaattgaatagtgcatgcaaagggcccttgaaaccatatgctttcctcacccgcctcaagtgcagaacacaagaacacaggcctccaggtgtgtgcctgactctaggaccaaactgaaaataaaatggatcaaaagtccacttaaggggaatgtgaaatctctcctttcatgactcttaccgagcagttgtcaagggctgaaaagaaaaactccaca

SEQ ID NO: 713349 - DNA, 1263 bp, Homo sapiens
aaaaatgccagtagtttccgtgtgtttcctaaacagcctataagatagagagtgaggtaagagggtagagttcagggatcagacaaatttaggttgaattctaggacccaccatacatgacattagacaagttacttaacctcttcaggtcttggttttcctgtaaaaataaaaagaagaaattccatgaagactaaattcaacagtgcgcccatcacatccagcctagcagatgacaagtactgctttatgtgagccagtttaccgtagtcatgtgcagtttataaaaattttcaataatagcaaaaaatgcattttttttcactggcaacccttaggccttcaaaacattctgcttctcagaatgttcattgaattgcagtcaaccraaattcttctgtgcaccccagtttcacttcaggatcccgcagaagcaggccccctcatgaggagggtgctttgggggcctgcatggtgggtgtacacagcagacatgagctctgagttccaatcccggctcagcatgaacacggaggatgtcccaggatgcacagcttggtcacagtgataagagccagccttgacgatggcccgtggccggccccatgcaccaccgggatttacagagacacaaagctgatccctatcacagcccaagatctctgttttgcagatgaggaagccgagattaaattaggtgacctgtgcagagtcggaattcaggatgtggcagaggtgaggcttgagtcggcgaggtcggccaggctctgcaaggagttctctttggtgtgacacattcagctttcatccatttgtggaactcacactctggcaggcacagtgccagacgatgtggcagcgccctcacagagcccggcttccagcaagagacaggcagctcggccaggccagcgccatccggacgtttgataagtatcaattgacagtcagggaatgctcagcagaaagaattcaaacagaatagcaaggttctgggaagacttcctttctaagaggatgttcttgaaaacctaagaatctttaccaaattgaatagtgcatgcaaagggcccttgaaaccatatgctttcctcacccgcctcaagtgcagaacacaagaacacaggcctccaggtgtgtgcctgactctaggaccaaactgaaaataaaatggatcaaaagtccacttaaggggaatgtgaaatctctcctttcatgactcttaccgagcagttgtcaagggctgaaaagaaaaactccaca

SEQ ID NO: 713350 - DNA, 1263 bp, Homo sapiens
aaaaatgccagtagtttccgtgtgtttcctaaacagcctataagatagagagtgaggtaagagggtagagttcagggatcagacaaatttaggttgaattctaggacccaccatacatgacattagacaagttacttaacctcttcaggtcttggttttcctgtaaaaataaaaagaagaaattccatgaagactaaattcaacagtgcgcccatcacatccagcctagcagatgacaagtactgctttatgtgagccagtttaccgtagtcatgtgcagtttataaaaattttcaataatagcaaaaaatgcattttttttcactggcaacccttaggccttcaaaacattctgcttctcagaatgttcattgaattgcagtcaaccaaaattcttctgtgcaccccagtttcacttcaggatcccgcagaagcaggccccctcatgaggagggtgctttgggggcctgcatggtgggtgtacacagcagacatgagctctgagttccaatcccggctcagcatgaacacggaggatgtcccaggatgcacagcttggtcacagtgataagagccagccttgacgatggcccgtggccggccccatgcaccaccgggatttacagagacacaaagctgatccctatcacagcccaagatctctgttttgcagatgaggaagccgagattaaattaggtgacctgtgcagagtcggaattcaggatgtggcagaggtgaggcttgagtcggcgaggtcggccaggctctgcaaggagttctctttggtgtgacacattcagctttcatccatttgtggaactcacactctggcaggcacagtgccagacgatrtggcagcgccctcacagagcccggcttccagcaagagacaggcagctcggccaggccagcgccatccggacgtttgataagtatcaattgacagtcagggaatgctcagcagaaagaattcaaacagaatagcaaggttctgggaagacttcctttctaagaggatgttcttgaaaacctaagaatctttaccaaattgaatagtgcatgcaaagggcccttgaaaccatatgctttcctcacccgcctcaagtgcagaacacaagaacacaggcctccaggtgtgtgcctgactctaggaccaaactgaaaataaaatggatcaaaagtccacttaaggggaatgtgaaatctctcctttcatgactcttaccgagcagttgtcaagggctgaaaagaaaaactccaca

SEQ ID NO: 713351 - DNA, 915 bp, Homo sapiens
tatatattaattcatatgattgtcacagcaaccctgggaggtaggtgccagttggccaggataggacaaaaagaactcaagcatcagagggcagctgctcgaggtgaccggtaagtttctgtctatccaaacactggggacaatgcaaacacacatgagctggtgaatgggaaaatgttgtcgtgtcygtacagtggaacagcactcaacagtaaaaggaacatacttccgatacacacaacacaacagacggctgctcagtgaggtcaaacacacgaacgcacactgggctctcacccatatgaccttctggaaaagccagccctcagggagggaatggagatcagcagtgccaagggctggggtggagggggtgctgagagggaggggctcaggcgagactttgggtgatggaaaggctctacatcgtgatcgtggtagtggctgcacaactgtgtgtgttgatcagaactcacagctgtctaccctaaaggtgaattttactctttgtaaatcatacctcaataaacctgagttcagaaagagcccatttcaccctaggacaccgtcagtctacagaagggtgaggttccacgcccaggacacggtgtcaccaagagccacccgggaagggctctgcgagccagcccagaacctaaccccaggctctggtttgagcattctcagctgctccatggatctcccaaagcctttgtatttgttcatcagttatctgtcaacatgctttatagactcctggtcagcaaaactgcaaacagtaagaccttttcccacttcccaactcaaacgctgtagtgggtcagagcacgcatatgggtcaataacagacacacgtggacatcagctggcctttctgaagaggacagagattgatggatgtgcagacttcccata

SEQ ID NO: 713352 - DNA, 1020 bp, Homo sapiens
ctgggtttagctcggggcagtaggtgctggatcaatcaaaagtcttcccgaaatgctagtgataaagcaatatccaggaagccttaggtttktatattctgttattctcttcagtttgcaagctgctttaacatacattattttatctaattggctcctcacatcaaccaagttgagtatagccatgcaaagaattaaacacttcaaacaatattacattttaaaataacttaaatgtaattccctagagacctgcatccttagttccattctctaaaggggaatttcttgcgtatctttccagacatattttattaagcatataccatctcagatctttgggtgtgatctccatgtatatttttcataggcaaatgaggagtaaactacaatatattctgctttttaaaaaaagcatactgttttacattggagtgtagtgttttattgtatgaagtaccccaaattcagttaattctgagggaggggagacatttgagttgtcttcagtattttgctgtaatagctgatgctcttaggaacatcttttacaagatgatcatttttttctttgctcacataaataaaataaataacaaattccaaggagaggaattgctgtgtttaaggctgtgtttagttctgctaaatattgtaaaatcgccctcaaaaaacttttaacacatgcactccccactgatggtatatgagagtaactttttcctataccatggtcaattcggtatatgaaaaattttgatcttattttaaaatattgttgatttgtataaatttcagaggtacaagcacagttatgttacatgaatatattggtaatcgtgaaatctgggcttttagtgtagccatcacccatactttgtacccattaagtaatttctcatgcctcattccctcccaccattccgagtctccagtgtctattatttcatactctatgtacaagcacatgaacaatttaaaaagttttgttaataagatagggaaaaggcctggctcagt

SEQ ID NO: 713353 - DNA, 1020 bp, Homo sapiens
ctgggtttagctcggggcagtaggtgctggatcaatcaaaagtcttcccgaaatgctagtgataaagcaatatccaggaagccttaggtttttatattctgttattctcttcagtttgcaagctgctttaacatacattattttatctaattggctcctcacatcaaccaagttgagtatagccatgcaaagaattaaacacttcaaacaatattacattttaaaataacttaaatgtaattccctagagacctgcatccttagttccattctctaaaggggaatttcttgcgtatctttccagacatattttattaagcatataccatctcagatctttgggtgtgatctccatgtatatttttcataggcaaatgaggagtaaactacaatatattctgctttttaaaaaaagcatactgttttacattggagtgtagtgttttattgtatgaagtaccccaaattcagttaattctgagggaggggagacatttgagttgtcttcagtattttgctgtaatagctgatgctcttaggaacatcttttacaagatgatcatttttttctttgctcacataaataaaataaataacaaattccaaggagaggaattgctgtgtttaaggctgtgtttagttctgctaaatattgtaaaatcgccctcaaaaaacttttaacacatgcactccccactgatggtatatgagagtaactttttcctataccatggtcaattyggtatatgaaaaattttgatcttattttaaaatattgttgatttgtataaatttcagaggtacaagcacagttatgttacatgaatatattggtaatcgtgaaatctgggcttttagtgtagccatcacccatactttgtacccattaagtaatttctcatgcctcattccctcccaccattccgagtctccagtgtctattatttcatactctatgtacaagcacatgaacaatttaaaaagttttgttaataagatagggaaaaggcctggctcagt

SEQ ID NO: 713354 - DNA, 973 bp, Homo sapiens
gaaaagtaaattaattatattaaaatgataaggctaaatcttatttcctttttcaaaatgtcagtggaaaaatttgctaaaatgcagttcttttatttgcagtttttttagatcataaaaatagaatgttttcagttttgtatatgtgtaaagtgaatgtgtagaattagagctttaaaaatttttgatctggaaacaacctagacatcatctagccccgggcttgtttttacagatgaggaagtgagaaattccgagaagcatagtgactagtgagtcatgtggccattgcagaacaaaagggaagaaatyttctgtctcctgtctcccagtgtagggcccctttcactgtcctatgtcatttggatgcataggttgcatttctgctacatgtttggggtttatgacactagctatactccttaaacttgttaaatgaacagccatggttttctagcctagagggaaataagttgtactcaaactctgctcttttggagatatgattttgagctgctttaaccaaaaaaaaacaggctttaaaagctcttcctatacttctgcttacactgagttttaatattctgtcaaacattttaaacttttttctccgatttacttcaggttttcatagagtaaggacattttagaagaacccaagaagcaaatatgttcaagtttttaggctacaccaacacacattttttctgttgatattcaagcataatatatatttaaagcattcaaagttgatccaaactataataaaatcctagcatggctagcaaatttatttcagtttttttttcttgcaaatcttagttttgtttgtgttttaggctaaatgttaaaattaaggaaataaataccaataaattgacatgttcttcctgtggttggtgtgattttaattttaatttatttttctttaagctatcttgagttcatgtaaaatattaattgaaatgaaagt

SEQ ID NO: 713355 - DNA, 1399 bp, Homo sapiens
gaggtaggcagttgctagtgctgattctgctgttcagagaccaggctctttgacttctttgctctggccgttcatgcatatgttgactttcgttctcaggcttgtctctccctacttgccaaggtggctgccctagctctgggagaagggtgatggagtgtgtgtgcagtaaggggtggggggtagtgccagcctcatctgtctctcttatcaggaaaagaaaaagctgcccagaaattccaccagctgacttctatttaagtcatattggccagagagttggtacatgtcrtcttgtctatcccctgtccatgccccgttcctgccttatgaaaaggcagggaaagtgaatatttagctttgtcaaccttaaaagtagaggcaggcaagggagacaggtggttgacaataggtgttgagtgagccagcctacagtgcctgtcacagtcttaccgtaattctatttggagcaaatagcattggataaacattgagtgcacatcctcatagtttcctgccactgatgaattttgtgattattgcttctgagtgctaggcagctcttttctgctcacttctggggaaagtcaaatttaaagaactataattacatgggagaagagaaggggtgctggattcttaatagttctttgtcagtataactagctcatttttttttgggtgcaatagttacacatctaccttatcatcctttgtaaatgtttattttatgcatgcatgtaaattagttaagaattggaattaaactgtggccgcttgtcttaagaatggtgtaggatcagcaagccttggattgtgtgtgtttgcctagagctgagtgtttttatgaagaagcaaaaacctattcatgagtgtatttaaagctgcagccaagtgacgatgtatattctgtttctcaggtaagtgaaatgtaaagagaagttttggagtcagatggacttgtgctataatcctgggtcacctcctgaaccatggtccctccttttccaagtgaggataggggattcatgacatggcacatggctggcagcaccacagagctgggctaacttcactgtgttttaactctctttctttctagttctttgttttccatacaacaccatggcttgttgaacttggaagctgtttatctatttcccttgataaaaaggtttagtttttgtttcttacagaaaggggaagtaatttaaaagtgttggcccagtggacttcccttttgattaaatacacagcaattatgtttaataaaagagatacaagtgccagataaaattgtcataagttatcactttggagagagcatactctctaccaagaataaaagtgctccctcaaaatggaatccactgacatctctccccatcctccattcgtc

SEQ ID NO: 713356 - DNA, 1406 bp, Homo sapiens
cttggctactgggagtaaaaacctaaataacaagttaataacagattcagccccaaaaggataatcactgtgtcagactacccattcctggaatttaaaaaagtgatttatgtcgtgtagtcaagttycacagcatacatatatacatatatatatatatatatgtatatacacacatatacgcttatgtatgtatgtatattatatatagacatttctattcaaatagtaagggtccgtattcaaaagtttgtatcataatatatggaaaaaagttaagcaagcagtgcaaagcaacttactttctcctaaaaatgtaatgtcattcctacattttaagaaagcaacgtaaatattatgcttttatgacactagacaggaatgttgcaccactgcctagcagctttattaaacaatgaaaacaaaatgttaagatttacagttacccttctccatatattgggcaaaacactaaaacagaggaaagaggaaaatcagtaacttttcaaaactgatagtctttatcagcagaactagactgaatttcactacattttagaatgaacagctctcaacaacaaattatcaacatatttaaaagtaaaagattcacaatttgaagtctgaataatgatattgcaaaaacaactcaatattgcagacgaagcatccaaacatatcactgtgattttaccttggatacaaccatggtctgttacaaaaatagatcatacatacaaaggtataaagaacattaagtttttagctgaaggcagcagtctgtttaaagggacacccccggaaatccaatgagtagtagaatttaagtatattaagctcatgactatgctgaagaatgctgatgtcttattcagtagagtcttccacgactacgatttcttcgtgtgccccaacctcggccccctctactttccctgaaggctcctctcataattaaagttgcccaaattgctgctatatttctcactgggaggattataaatctgcctggcatctcttttttgttctgctgaagatttctggggtggtgaacctgaagttgtatattcactggctctcttttgcccaatctcaaccttttatacaggtttccaggatagtgttactgtgctcttacaagaaggaggaatgtggaagagatccttgattaaaacattgatattgtttgttgctttcaatgcaacaactttaattttgttctcttctgttttctgttcttttctgttctcacctgtttcacctggagagctaagtgaagttgtctgatataaacttgcaggcctcgtgcaaagtattgcagcctgattttgaaatctttgagtttttctgcattcagtttggctgttaagaaatctggaagtttttggcccaactggtgaaaactg

SEQ ID NO: 713357 - DNA, 1406 bp, Homo sapiens
cttggctactgggagtaaaaacctaaataacaagttaataacagattcagccccaaaaggataatcactgtgtcagactacccattcctggaatttaaaaaagtgatttatgtcgtgtagtcaagtttcacagcatacatatatacatatatatatatatatatgtatatacacacatataygcttatgtatgtatgtatattatatatagacatttctattcaaatagtaagggtccgtattcaaaagtttgtatcataatatatggaaaaaagttaagcaagcagtgcaaagcaacttactttctcctaaaaatgtaatgtcattcctacattttaagaaagcaacgtaaatattatgcttttatgacactagacaggaatgttgcaccactgcctagcagctttattaaacaatgaaaacaaaatgttaagatttacagttacccttctccatatattgggcaaaacactaaaacagaggaaagaggaaaatcagtaacttttcaaaactgatagtctttatcagcagaactagactgaatttcactacattttagaatgaacagctctcaacaacaaattatcaacatatttaaaagtaaaagattcacaatttgaagtctgaataatgatattgcaaaaacaactcaatattgcagacgaagcatccaaacatatcactgtgattttaccttggatacaaccatggtctgttacaaaaatagatcatacatacaaaggtataaagaacattaagtttttagctgaaggcagcagtctgtttaaagggacacccccggaaatccaatgagtagtagaatttaagtatattaagctcatgactatgctgaagaatgctgatgtcttattcagtagagtcttccacgactacgatttcttcgtgtgccccaacctcggccccctctactttccctgaaggctcctctcataattaaagttgcccaaattgctgctatatttctcactgggaggattataaatctgcctggcatctcttttttgttctgctgaagatttctggggtggtgaacctgaagttgtatattcactggctctcttttgcccaatctcaaccttttatacaggtttccaggatagtgttactgtgctcttacaagaaggaggaatgtggaagagatccttgattaaaacattgatattgtttgttgctttcaatgcaacaactttaattttgttctcttctgttttctgttcttttctgttctcacctgtttcacctggagagctaagtgaagttgtctgatataaacttgcaggcctcgtgcaaagtattgcagcctgattttgaaatctttgagtttttctgcattcagtttggctgttaagaaatctggaagtttttggcccaactggtgaaaactg

SEQ ID NO: 713358 - DNA, 1100 bp, Homo sapiens
actttttaaaactttgccatttattttctaatgacattttatgtagaaccttaaactcaaaatcattcatttagaactggaatttctgctctttcaaaaattcttcattgtgtgaatccctgaagtactagagaacctactagtattgcaaagagaaacaagaaatgagatacaaacatttgaaagaaaaggacataatgatcatcatttgtaatgcctctcttcgcctcaaaaaactgaaatgcaaacagacttggagaaaattatttgttcttttttaataaaataggaacagggcaagaacaaacaatatataaaagaagttcaaaatagttaacatatcaggaaaagaagtttaatctaaccaatgactgaaacacaaattaaagcaacaatggataaatctgaactttatacaaatgagaaaaataaaatatatgtaaaaaaatatagccatactatgaaatactatgaaaccattaaaaaacaatgatgcggccgggcatagtggctcacgcctgtaatcccagcactttgggaggctgaggtgggtggatcacaaggtcaggagatcgagaccattctggctaacatagtgaaaccccgtctctactaaaaatacaaaaaaattagccrggcgtggtggcaggtgtctgtagtcccagctacttgggaggctgaggcaggagaatgatgtgaacctgggaggcggagtttgcagtgagcggagactgtgccactgcactccagcctgggcgacagagcgagactctgtctcaaaaaacaaacaaacaaaaaaaacctatacgcacagacatgaaaagatatccaaaagataaagaaaagtgcaagttataaaataatacagagtattataaaaattttagctcaaacacacatatacactcacattgaccctcaacttcctcataaaaacaaatctgaggctgggtacagtggctgaagcctgtaatcccagcactttgggaggtcgaggtaggcagatcacctgaggtcaggagtttgagaccaccctggccaacatggtgagacccttgtctctactaaaaatacaaaaatcagctgggcatggtggcgca

SEQ ID NO: 713359 - DNA, 652 bp, Homo sapiens
cacctgtgccctctggtatttcacttgctgacggtttcatagtggggaggctcgtcctgcacctgccactctgccatggacgggcatggagtccatgaagacaaatctcttattttaaagtattgtttcaatgtgagacgtcctctccctcaaactgcccctgccaggcttgccctgtctacggcccctccttgctgcttgctgaagtctcgccctgtctacggccccagtgccctaaacaccccatctcgtctcaattgtcatccctgcccctttggtgcaccttgatgattatgggatgtactcttcggagtcaaagaaatacatatctcttgttaggttaaaaaaaatagggggctgggcaccgtggctcatgcctgtaatcccagcagtttgggaggccaaggcgggtggatcactggaggtcaggagttcgagaccagcctgaccatggtgaaaccccatctctactaaaagtataaaaattggccaggcgtggtggcagatgcctataatcccagctayttgggaggctaaggtgggagaatcgcttcaacccaggaagtggaggctgcaatggaccgagttcgcaccactgcactccagcctgggcgacaagagcgagactccatctcaaaaaaaaaaaaaaaaa

SEQ ID NO: 713360 - DNA, 652 bp, Homo sapiens
cacctgtgccctctggtatttcacttgctgacggtttcatagtggggaggctcgtcctgcacctgccactctgccatggacgggcatggagtccatgaagacaaatctcttattttaaagtattgtttcaatgtgagacgtcctctccctcaaactgcccctgccaggcttgccctgtctacggcccctccttgctgcttgctgaagtctcgccctgtctacggccccagtgccctaaacaccccatctcgtctcaattgtcatccctgcccctttggtgcaccttgatgattatgggatgtactcttcggagtcaaagaaatacatatctcttgttaggttaaaaaaaatagggggctgggcaccgtggctcatgcctgtaatcccagcagtttgggaggccaaggcgggtggatcactggaggtcaggagttcgagaccagcctgaccatggtgaaaccccatctctactaaaagtataaaaattggccaggcgtggtggcagatgcctataatcccagctacttgggaggctaaggtgggagaatcgcttcaacccaggaagtggaggctgcaatgraccgagttcgcaccactgcactccagcctgggcgacaagagcgagactccatctcaaaaaaaaaaaaaaaaa

SEQ ID NO: 713361 - DNA, 944 bp, Homo sapiens
gggattgcgccactgcactccagcctgggctacagagcaagattctgtctcaaaaaaaaaaaaaaaaaaaaaaggaaattaaacacgtacacaggtatgcacacacatacaaagagacattttaaaccaataaaagctaaaagaatgggaaaggaaatgacagcaaatgaagtgtggtaaaaagaaaagaaaagaaaaaagaaatgaaagaataaagaaagcagctgtgtaagtggtaactgatttgctaaatctgaaaaggctaaattttatgcctgaagagaggcatgccaacaggaagcaagacaatttgtgcaaaagaaacccagaatgacttaggaattggaggctctgagtatctctgaaggtgagggtaaagggtagaactgaagaatgaactcttagaaggaagtttgactactgtaatcccagcactttgggaggctgaagtgggtggatcacttgaactcaggagttcgagaccagcgtgggcaacatggcgaacccccgtctctaccaaaaatacaaaaattagccaggcgtggtggcatgcgcttgaggtcccagctacttggggggctgaggtaggaggatcacttgagccagggaggcagaagttgcagtgagccaagatctcaccactgactgtactccagcctgggcaacagagccagatcctgtctcaaaaaaaaaaaaaaaaagaagaagaagaaggaagtctgactaaataaaaaacaatcagacccccaagtgtcctcccttattccaatatctaggtgattacctctaactaagctgagaagacagaaaagtaatgattctggagaaattaaatctgagaagctctgagctccaggaacaggaagcrcagctaatagattaaatgaaatcctatggaaagaactcccgctagccgggcatggtggctcaggcctgtaatctca

SEQ ID NO: 713362 - DNA, 886 bp, Homo sapiens
attttacaggtgtggctggtgaagatgtcagctcactgctgtcctcacagtgactctattgaagaaagtcctaagcatttacccacatggtttttatcacagtgcgtacagactgcatcacacaggctgacttctccatttttcagggcgcagttcatccaaggttgctgtgggcctttcctcctcaggggaatcttagaagagggcgattaatgagacaaaccacagcccctaccgctgtagttggtcttgaggccataactgctatttatcctcttcctccttcactatctactctaagttttccatatccartgctatcccctctacaggtgctgatgtccaacctggtggcggacccctgtagtcccagctactcgggaggatgaggcaggagaatggcgtgaacccgggaggcggagcttgcagtgagccgagatcatgccaccgcactccagcctgggcgacagagcgagactccgtctcaaaaaaaaaaaaaaagaaaagaaaagaaaagaaaatgaggcaagaggtgaagtgacttgtccagggcctgatgagtagacagaaacagataaaaaaaagaagtcaattctctttttttactcactgcccaagagcttcctctctccagtcaccggactcctgctgcaacaggaccagctaaggaatatcgatccagtctgggaaaaaagttatcacactgcttaggcagatacacattctgaagaaaaggagaaagtgcaaatcctcttgcaggagtcctttcaactcagtttgtggctggttatgtaaatgaggaggccgtgcaagagaatggggtcatgagctgcctggggattaagcatgacaacgccgtctgtcctgggaagaaatgatactttgc

SEQ ID NO: 713363 - DNA, 886 bp, Homo sapiens
attttacaggtgtggctggtgaagatgtcagctcactgctgtcctcacagtgactctattgaagaaagtcctaagcatttacccacatggtttttatcacagtgcgtacagactgcatcacacaggctgacttctccatttttcagggcgcagttcatccaaggttgctgtgggcctttcctcctcaggggaatcttagaagagggcgattaatgagacaaaccacagcccctaccgctgtagttggtcttgaggccataactgctatttatcctcttcctccttcactatctactctaagttttccatatccagtgctatcccctctacaggtgctgatgtccaacctggtggcggacccctgtagtcccagctactcgrgaggatgaggcaggagaatggcgtgaacccgggaggcggagcttgcagtgagccgagatcatgccaccgcactccagcctgggcgacagagcgagactccgtctcaaaaaaaaaaaaaaagaaaagaaaagaaaagaaaatgaggcaagaggtgaagtgacttgtccagggcctgatgagtagacagaaacagataaaaaaaagaagtcaattctctttttttactcactgcccaagagcttcctctctccagtcaccggactcctgctgcaacaggaccagctaaggaatatcgatccagtctgggaaaaaagttatcacactgcttaggcagatacacattctgaagaaaaggagaaagtgcaaatcctcttgcaggagtcctttcaactcagtttgtggctggttatgtaaatgaggaggccgtgcaagagaatggggtcatgagctgcctggggattaagcatgacaacgccgtctgtcctgggaagaaatgatactttgc

SEQ ID NO: 713364 - DNA, 886 bp, Homo sapiens
attttacaggtgtggctggtgaagatgtcagctcactgctgtcctcacagtgactctattgaagaaagtcctaagcatttacccacatggtttttatcacagtgcgtacagactgcatcacacaggctgacttctccatttttcagggcgcagttcatccaaggttgctgtgggcctttcctcctcaggggaatcttagaagagggcgattaatgagacaaaccacagcccctaccgctgtagttggtcttgaggccataactgctatttatcctcttcctccttcactatctactctaagttttccatatccagtgctatcccctctacaggtgctgatgtccaacctggtggcggacccctgtagtcccagctactcgggaggatgaggcaggagaatggcgtgaacccgggaggcggagcttgcagtgagccgagatcatgccaccgcactccagcctgggcgacagagcgagactccgtctcaaaaaaaaaaaaaaagaaaagaaaagaaaagaaaatgaggcaagaggtgaagtgacttgtccagggcctgatgagtagacagaaacagataaaaaaaagaagtcaattctctttttttactcactgcccaagagcttcctctctccagtcaccggactcctgctgcaacaggaccagctaaggaatatcgatccagtctgggaaaaaagttatcmcactgcttaggcagatacacattctgaagaaaaggagaaagtgcaaatcctcttgcaggagtcctttcaactcagtttgtggctggttatgtaaatgaggaggccgtgcaagagaatggggtcatgagctgcctggggattaagcatgacaacgccgtctgtcctgggaagaaatgatactttgc

SEQ ID NO: 713365 - DNA, 1222 bp, Homo sapiens
tgaagttcttttaaatttgagcagggggccccgtatttttatttttcactaggtcccgcaaattatgtagcccatcctgccaatgactacatgatacatacttcccaacgtttcctgatttgacagttttttkttgttgttgttgttgttgttgttttgggttttgttttttttttttcttttttctttttgacagagtctcactctgtcaccaagctggagtgcagtggcatgatctcggctcactgcaagctctgcctcccgggttcaagggattcccctgcctcagcctccagagtagctgggactacaggcgcccgccattacacccggctaattttttgtattttagtagagacggggtttcaccatgttggccaggttggtcttgatctcctgacctcatgattcgcccacctctgcctcccaaagtgctgggactacaggcatgagccaccatgcgcctggccgattggacagttttaacactgaaattcctgaatctggaaaagcccttagtcctgggcaaaccaggagagttgtcaccttacttctggtcctcaaactgcaaaccaatgtgccatgcattactttgacctaatgacttacaagcagaaaaggttatttaggacacgtaagcttccccagcatattctatctgtgacccctataaataaatatttctaaacacaattctctgctaattacagttcaaggttttatcaactcaaacttttaagttacaagaaaccgatttcaaaaacagccagtaggaaaaggttgcagagtctaggtcaatgaaagagttccagcaagcctatgagccactgggaattcagtcattatttatctaaatttctgatttggaatgaggttggtaaattagtcaccagccagtttcatcttctataaactttccattcacattattgatccatatttctattgggctgtttgttttttctattggtttataagagtttgttgtatattctacaccaccatacctggctaatgtttatatatttttgtagagacaaggtctcacaatgttacccaggctggtctcaaactgctgggctcaagcaatgctcccgcctcagcctcccaaattgccaggattacaggcataagccatcgtgcccagcaagaatcctgtatttttgatggtcttgtcaaatctgtgagggtgttgggaggacaatgatgtgatatatatata

SEQ ID NO: 713366 - DNA, 1222 bp, Homo sapiens
tgaagttcttttaaatttgagcagggggccccgtatttttatttttcactaggtcccgcaaattatgtagcccatcctgccaatgactacatgatacatacttcccaacgtttcctgatttgacagtttttttttgttgttgttgttgttgttgttttgggttttgttttttttttttcttttttctttttgacagagtctcrctctgtcaccaagctggagtgcagtggcatgatctcggctcactgcaagctctgcctcccgggttcaagggattcccctgcctcagcctccagagtagctgggactacaggcgcccgccattacacccggctaattttttgtattttagtagagacggggtttcaccatgttggccaggttggtcttgatctcctgacctcatgattcgcccacctctgcctcccaaagtgctgggactacaggcatgagccaccatgcgcctggccgattggacagttttaacactgaaattcctgaatctggaaaagcccttagtcctgggcaaaccaggagagttgtcaccttacttctggtcctcaaactgcaaaccaatgtgccatgcattactttgacctaatgacttacaagcagaaaaggttatttaggacacgtaagcttccccagcatattctatctgtgacccctataaataaatatttctaaacacaattctctgctaattacagttcaaggttttatcaactcaaacttttaagttacaagaaaccgatttcaaaaacagccagtaggaaaaggttgcagagtctaggtcaatgaaagagttccagcaagcctatgagccactgggaattcagtcattatttatctaaatttctgatttggaatgaggttggtaaattagtcaccagccagtttcatcttctataaactttccattcacattattgatccatatttctattgggctgtttgttttttctattggtttataagagtttgttgtatattctacaccaccatacctggctaatgtttatatatttttgtagagacaaggtctcacaatgttacccaggctggtctcaaactgctgggctcaagcaatgctcccgcctcagcctcccaaattgccaggattacaggcataagccatcgtgcccagcaagaatcctgtatttttgatggtcttgtcaaatctgtgagggtgttgggaggacaatgatgtgatatatatata

SEQ ID NO: 713367 - DNA, 1222 bp, Homo sapiens
tgaagttcttttaaatttgagcagggggccccgtatttttatttttcactaggtcccgcaaattatgtagcccatcctgccaatgactacatgatacatacttcccaacgtttcctgatttgacagtttttttttgttgttgttgttgttgttgttttgggttttgttttttttttttcttttttctttttgacagagtctcactctgtcaccaagctggagtgcagtggcatgatctcggctcactgcaagctctgcctcccgggttcaagggattcccctgcctcagcctccagagtagctgggactacaggcgcccgccattacacccggctaattttttgtattttagtagagacggggtttcaccatgttggccaggttggtcttgatctcctgacctcatgattcgcccacctctgcctcccaaagtgctgggactacaggcrtgagccaccatgcgcctggccgattggacagttttaacactgaaattcctgaatctggaaaagcccttagtcctgggcaaaccaggagagttgtcaccttacttctggtcctcaaactgcaaaccaatgtgccatgcattactttgacctaatgacttacaagcagaaaaggttatttaggacacgtaagcttccccagcatattctatctgtgacccctataaataaatatttctaaacacaattctctgctaattacagttcaaggttttatcaactcaaacttttaagttacaagaaaccgatttcaaaaacagccagtaggaaaaggttgcagagtctaggtcaatgaaagagttccagcaagcctatgagccactgggaattcagtcattatttatctaaatttctgatttggaatgaggttggtaaattagtcaccagccagtttcatcttctataaactttccattcacattattgatccatatttctattgggctgtttgttttttctattggtttataagagtttgttgtatattctacaccaccatacctggctaatgtttatatatttttgtagagacaaggtctcacaatgttacccaggctggtctcaaactgctgggctcaagcaatgctcccgcctcagcctcccaaattgccaggattacaggcataagccatcgtgcccagcaagaatcctgtatttttgatggtcttgtcaaatctgtgagggtgttgggaggacaatgatgtgatatatatata

SEQ ID NO: 713368 - DNA, 1025 bp, Homo sapiens
ggaagatagtctccgtagcgttttttttttattactgcgtttaaaacgggaaagaactgtaaaggttrgtggaatgatttcagcccgtctaagcgtgtgtctacctgcctggctgtggccgggaggtttgtttggctgcctatcagctcttatttccttagaaggttggagaattagcttcctcattcccatcaaatgtgtgaaaaccattccttgatgtaggtgaagctttctgtggtttactgcgaaggaaaaagcgacaaagagtgagaaagttctactttagcaatttataatttcaccaccacccccccgcccccactgacttctgttttatttcagacgttattttctctcttccttttgagtttctgttaaacacactagatatctttggtgtgttgttgttattgttttcaagatcccctctccccgaaaagctacctttggagtgaaaggatcatggactcctagaaattcacaactggcttggtttaatccaaggcacttttttacttggtttttttttttttttttttttttcccggagggagtctcttgagacacatcactagtaccagtttgttttggaatcacatttaggagaattttttttaaaaccatgaataagtctgtgttttttgtggaaacaaagagcagattttgcaagcgaaggaggtcatttacccccacaatgaaagtattttgcatgtaaacaatatgactgctttacctgagaaaattagtgatggattattgatagagtggattctgtctatatccatgctcactctttacttgtggttaaaaaaaattgcccttgaaataaagtgtagtgctttctcctcacagactcacagagatatcagtcattttgtgaaataaaagttgatagtttgataagcaattaacttgtgcttctttcagatagagccaaatgtttcgttagatttttagataacgacatttcaatgctttcattcaaatgcacgtgtagtgtatttgaaatggtcccatttgaggct

SEQ ID NO: 713369 - DNA, 1025 bp, Homo sapiens
ggaagatagtctccgtagcgttttttttttattactgcgtttaaaacgggaaagaactgtaaaggttggtggaatgatttcagcccgtctaagcgtgtgtctacctgcctggctgtggccgggaggtttgtttggctgcctatcagctcttatttccttagaaggttggagaattagcttcctcattcccatcaaatgtgtgaaaaccattccttgatgtaggtgaagctttctgtggtttactgcgaaggaaaaagcgacaaagagtgagaaagttctactttagcaatttataatttcaccaccacccccccgcccccactgacttctgttttatttcagacgttattttctctcttccttttgagtttctgttaaacacactagatatctttggtgtgttgttgttattgttttcaagatcccctctccccgaaaagctacctttggagtgaaaggatcatggactcctagaaattcacaactggcttggtttaatccaaggcacttttttacttggtttttttttttttttttttttttyccggagggagtctcttgagacacatcactagtaccagtttgttttggaatcacatttaggagaattttttttaaaaccatgaataagtctgtgttttttgtggaaacaaagagcagattttgcaagcgaaggaggtcatttacccccacaatgaaagtattttgcatgtaaacaatatgactgctttacctgagaaaattagtgatggattattgatagagtggattctgtctatatccatgctcactctttacttgtggttaaaaaaaattgcccttgaaataaagtgtagtgctttctcctcacagactcacagagatatcagtcattttgtgaaataaaagttgatagtttgataagcaattaacttgtgcttctttcagatagagccaaatgtttcgttagatttttagataacgacatttcaatgctttcattcaaatgcacgtgtagtgtatttgaaatggtcccatttgaggct

SEQ ID NO: 713370 - DNA, 950 bp, Homo sapiens
gttgtattttcggcagtaagcacatttcctgacatacagtaagtgcttaatacatccactattgattaaatttaatgttactattttttaaccgatttttttatatgaccaggtaatcagaatataatgcttttatgatttaaataacaaatttccattttgcaaatgcctacttatgagttaaggtccagatcaaacaaatgccatctctcccatgaggcctttccctacttcccgagggctcgtcacccttgcctttgtgttctctggcccatcactttgctttcgaagcattaagtagtaataaaatgtatttctgaccagctgggcaatatagcgagacccccatatctacaaaaaattttaaacattaggccaggtgtggtggctcacgcctgtaatcacagcattttgggaggccgaggtgggcggatcacttgaggccaggagttcgagaccagcctggcaaacatggtggaaccctgtctctactaaaaatacaaaattagccgggcgtggtggcacgtgcctgtaatcccagttgctcaggaggctgaggcaggagaatcacttgaacttgggaggcagaggttgcagtgagctgagatcacaccgctgcactccagcctgggtaacagaatgagactctgtctcaaaaaaaaaaaatttttttttttaaacattagccaggtgtggtggcttgcrcctgttgtcctacctgcctgggaggctgaggcagaaggattgcttgagcccaggagtttgaggctgcagagagctatgatcttgccactgcactccagcctggattatagagcgagatgctatctctaaaataaatgaataaatgaatgaatgaataaaaataaaacatctgcttttgtgaaggatatctatgttagataaactctgagtccctactactgggcatggggcttgtacagaaaagg

SEQ ID NO: 713371 - DNA, 2739 bp, Homo sapiens
  misc_feature 2614: n = A,T,C or G
accagatcttaaaataatgttggtgttttacccccctataagttgaagcacaaatggtggttctaccattgaaagttctctgtattgcattcacagttaggactttgcagcatttgagtttgactcctacttaatactttactttcccagtcttatttggcaaatatggttaattaatagccttactttaatggggaagcaaagtttctcctccttaggctttattaagagaccaattgagaaaagaccaaaggaaaagtctgcctcaggcacagagaaatataaaggataatgacattcctttgaacatgttaggtggacatttttccagctcctattttttcccaaatagtacatcagcttttagtgtataagaaaacattaagtagtattggagacacttctatttgggccagatttctttctataataatagttgtagggctttcaaataattcaaattgcatatgtttcactttataatattttcccctttccaagtcatctgcccaatataagagaaatatttggataaaatcgtcctcttcctcttcttcttccccctcctttttctcttcctcttctatggcaaatttctatgcaggcataatatgtctgatatttctatgaggaagtataaaaagaatattcatgtcaactgtaaactttccaacctaaaattccataggatattaaatagaataaacataaaaagatatagagaaaatagtactgtgttgggcaaagataggattattcttattcttggcttagcccatgatttcacgtgtgaaaaggttgtttatggattatctgtttaacaaatttctaagaattttcctagactaatctattatttcaaaaaatagccatatagtttcacttagtgatccctgagattatgtcttatatcagtttccgaaaaaagatagattgcattaattcttgaaaaattatctttttgttagcatgaactttgtatttctggtttctctctagtccctcacttttcctgaaaaaactctggctaagccattcccatttactacacaactaccttaattacaatttagagaaccgactgtggctgggttgaatgcatcaaaaaatacgtcttctggtgatgaatcctatcatttactctgaaccaacacagctataagctttgcttttcaccttcctaattaacaaggaaaaacaaggttgaattgttaagatacttccttgtgttaaagctgcatctcaagtctscataaacataaaatgcttttctaccagtcagggtagttttgtagattacaatgcttcctcatctcaaggaatcaatctaagagtactgatgcatttcatcactgactgagtaaagtcaaatttattatcatattcataagtggtatcaaccctgtctttatccttagcataataatatcagttgcaacttattatacattagtgaatcattctcttttttcttttagctcattatatggggagaatcctattagaagaggcccacattttaaaatattaaatataccattgttccttctctctgaattgctttcttatttcaggcctgagggcaaagataggagttttagctcataccattctttcacaaactttgactttcactaacatgtgttaagaaacattgcctacttggaaagaaggcaaaaagagggtgacatgttctttcaatatcatatcagacctttaacaggcctgtccaagtattatttaattattcaggacaatatacctctgtttgattatatctaactattgattaaaaatccattttctgtgaagttgcatgttttctggtaaatttttatctggtagagattcaaatgatttctgcccagtagaaaagataaccccaaaggttatggttttattgctctataggatatattaaccagttttgtacgtgataccatcttattcaaatgtttttgctcccatgcctatataattcccctgctctactcctttgaatcagcgttactgtctagctggttctcttattaataagttaaataaatatttaactcatgctcattgtgtatttgtatacattatgttacataacttcttgaaaattatactttgacaagtgcctctcaaatgcatatatatatatatatatatatatatatatttatgttggtgtgagagtttttttctaaaaagtaatcagccagagaagcaatcactaattagtttagacaaatgaaaattcatttaaatctattttagtatccaacactacctcaaggacatataaatctcattatttaaaatattgactttctaacaatatgttaaggaattgtcttgggttcaatgcaacagatggaagatccttaaggcatgctacccttagtagtgcaattaacagaaacatagtcaagcagtcacctttatccagtgagcgtttcaaaagaattttgattaccatggcttgcatgagaaaatataaattcccttcaatttcttcaacaacaattttatccatactggaattgaattcattttttaaaacaaacaaatggcagtacctttctgcttaaactgattattcacgtaagcctatgcagccctttgtcgntactggtgctgttgtttaaatccccatgtgactggtttgtaaaaaaaaaaaaattaaatgtttgagcagtgatcctaatgaacaatatttcaaggcaaaaatataaccatgataccgaaaaaatt

SEQ ID NO: 713372 - DNA, 651 bp, Homo sapiens
ttaatttatctcaatgacctgtgttctgtctctgaagtcagtgagttctaaacctgttggcacatgagaaaacataggaggacagctattaaaatgcttattcctgatactcaaacctgaaaatttagtggggattggctctatattttgtttaaagctccccaaataattctgatggatagtcagttttcataaacattgcctttaaatatttatctaatttctcttattctctccatctgtgttggaattacatgaaattcctatctcctacctaaagtattccaatagtttcctaattttttttctctcttactccattaatctcctttggatttcagttgattctctacagtgattatgtcattctctttttaaaacttttaatagaattgtggttcattttgtaggatggtagtatctggaggatcagaggaggacttgtgggatgttggtaatgttctstttcttattctgtctgttggctacatgggcctgctctctttttgaatattcaccaggggctacctttagatgtattcctttttctatttttatattatgtttcattttttaaaaagtgaaaacaaaactgatagctcctcttcaggtacttctctgctctcctcccctgtactgcatttctggcta

SEQ ID NO: 713373 - DNA, 1966 bp, Homo sapiens
ctgttcccaaaatgcaacttcaaaaggagaagtgggctacgacacagaatcctagcagctttcagagtagcatttgttcacttgtcaaacctttacttggtgcctgctaaggacaggcaccgttggggtgaagatcatcagaataaagatcaccatgcccctcaaagagtttagctagttcatctctaaatgaggcatcaggaccatgaacttcagccacggaaggttatgaaccagtcagggtcaaatactcaagaggagaagggcaggagaagaaaccttcacagagcactcccataggtcagacaaagggggatgctttgcttatgatatctcatttagtcctcccaacaacccagtaaagcagttattattattctcattttacaggtgagaaaactgaggttcagaggagctaagacatggctgaaagttgcaaagtccattagcagaggtgggactggctacctaatttgtggggcccagtgaaaatgaaaatgtgggcctcgttgttaaaatttaagaatttcacagcagtgacagtagtgcattaaattggggcactgttggaactgcacagattggatgtccatgaagccagccttgagtggagatgctacaaacaattatggaagcagagagaaggaaagacagaggttggctggaaagataaaattaaaaactttattggtagaggtggcaggggcctggaagggaaatgttgctttggtatcatgtagtctgaacacaaggctaccctggtgactgcttttactgaatcaatcagagcctgatgtagccaggaattgaatgaagtatctcctgaagcctatgggactcattagtctgtcctgggagcaaaccacctatactgagggaggaaaggaatccagctctagggttcctttgctgctgtttggaactttcccaacccctctgagaactctgtgacctcctggactggctccaggcctggattggacatgtctgtagagttccatattagttagaaataaaatcagttataaatagcagaatggtcaaataacagtggtttgaataagtagaggtttgtttttcttacaaatcacagcctgggggtagatggtttctagcatagttcaggtgctcagaatgtcaggattggcctgtctcctcttctcttgccctttcctttgcatttgctgcctcgtgtttgcaagacactggctgcagctccagcatcttgactgtattcaagacaaatggaaggggaaaagggtgacactgtttcattttattaggaaagcaaaagctttgtcaggatcctctcctccaaaagacagctcttaagtttcacggaccagagctgggtcagtcacacaggcatcagaactgtcaagaagggccagggaaacaaagaatagtgattggctcagagctaagagtggccacttagctgacatgaatgaaactaaagagctgttagccatgaagaaaaaaggaattggtggtgggcaggccgttaaaactgtggtttactcgagagactaatctagcccgctgagttcatcacagttaatgtgtacatcgcccagagacagtcctaggggatcaccaggtcagggttggtctgggtgtcaatctggaaatgtttgtcaccccagaatgttggaggggtgccagcctctgcaacccacagccctcagccctcacattatctttttattttagggaacccacaactcacacgtagagtttaggtctttctgaacctgctctaccttccctcctggactgtaaactcctagagagcagattttcatgtttaacttgaagaaatatgtttaacatgtccactatgctaggattgagctattaacatgtgatgaaggctgcaacatgaacaggaggcamgtgataaggtaaagcatagagtgtaataaataataaagcccggagagtcaaggagcacttgcagagaacg

SEQ ID NO: 713374 - DNA, 1636 bp, Homo sapiens
gagacaggcctctgctgcccaggttggaacgcagtggtataataatggttcatggctcactataggctccacctcccamgctcaaaagatcccccatcctcagcctcctgagtagctgcaattacaggtgcacaggtgcacaccaccacatctggctaattaacaaaattttttttgtagagatgcggtctggttatgttgcccaggctggtctcaaactcctggcctcaagtgatgctctcgtctcccaaagtgctgggattacaggcatgagccactgtgcctggctggttcctgctttttaaaacatggtggatggccagcacttagcccctggatggagggaatcagccctgaacacatggctgaagggttttaaatgctaatcaaaaggatctataatatccagagttgatattttatttactttctctcctctaattccaaaagcaaacactcagacaaaccctaggtacgcaagaaataaatgtgaaacagatgcgtaagggagccgtgagctcccaggtgaagccaaggaagcaaacttctaagaggcagcagctgttctcatataagatcatctcccctctcctgcccagccccttaccacacacacagaatgggattagcaaaggcaccgtaggcacgactgtcatttcctcacactgtctaggaccagatatgcttctcatgggctgcttaggtgtccattcatgtttataatacagacacatggaggcttttgcttctcataagaactctggccaggtgtggtggcccacacctgtaatcccaacacttcgggaggccaagacaagaggatggcttgagcccaggagttcaaaaccaaccagggcaacatagtgagaccccagctctacaaaaaaataagaaaattagccaggcatggtggtgcatgcctgtggtcccagacactttggaggctgaggtgggaggatcgcttgaacacaggaggttgagggtagagtgagccataaccatgccactgcactccaggctctaaataaataaatacatacataaatggaactcgtcatttactaacaatatttagtagcagccagacatcacctcctggtggctttatctgggacagtctcacttttcctacttgccctggggagtttagaatggtgaagagccagagagcccacaggagactttgctctatcttggaaatccagagcctgtggagccctgagcaggcaagttcaacattgtatagactgagaggcccctggggacagggggtgaggcaggggccgggtagccctcagtcctgaggcaagaatttgaagcaggagaggcttggaagagaaaaagaaggcaaggcttagatgagaaggtgaggccaacaaggaaggcagaagactgacagtgaaagtcagctgtcagggtggtgagaggcagcagcactagcagcagagccgcagcatcacacaactccaggggccaggtgcatagttgcatctgtaaatggctcctcctagttgtgcagtgcacagcctgtgcatccatacatgacagctctgagaaacaccaatgctcaaaaacttttagaaatggattttgtaaacataaggttgaatcaagggtaataagtgtatgtgtgtgt

SEQ ID NO: 713375 - DNA, 1636 bp, Homo sapiens
gagacaggcctctgctgcccaggttggaacgcagtggtataataatggttcatggctcactataggctccacctcccacgctcaaaagatcccccatcctcagcctcctgagtagctgcaattacaggtgcacaggtgcacaccaccacatctggctaattaacaaaattttttttgtagagatgmggtctggttatgttgcccaggctggtctcaaactcctggcctcaagtgatgctctcgtctcccaaagtgctgggattacaggcatgagccactgtgcctggctggttcctgctttttaaaacatggtggatggccagcacttagcccctggatggagggaatcagccctgaacacatggctgaagggttttaaatgctaatcaaaaggatctataatatccagagttgatattttatttactttctctcctctaattccaaaagcaaacactcagacaaaccctaggtacgcaagaaataaatgtgaaacagatgcgtaagggagccgtgagctcccaggtgaagccaaggaagcaaacttctaagaggcagcagctgttctcatataagatcatctcccctctcctgcccagccccttaccacacacacagaatgggattagcaaaggcaccgtaggcacgactgtcatttcctcacactgtctaggaccagatatgcttctcatgggctgcttaggtgtccattcatgtttataatacagacacatggaggcttttgcttctcataagaactctggccaggtgtggtggcccacacctgtaatcccaacacttcgggaggccaagacaagaggatggcttgagcccaggagttcaaaaccaaccagggcaacatagtgagaccccagctctacaaaaaaataagaaaattagccaggcatggtggtgcatgcctgtggtcccagacactttggaggctgaggtgggaggatcgcttgaacacaggaggttgagggtagagtgagccataaccatgccactgcactccaggctctaaataaataaatacatacataaatggaactcgtcatttactaacaatatttagtagcagccagacatcacctcctggtggctttatctgggacagtctcacttttcctacttgccctggggagtttagaatggtgaagagccagagagcccacaggagactttgctctatcttggaaatccagagcctgtggagccctgagcaggcaagttcaacattgtatagactgagaggcccctggggacagggggtgaggcaggggccgggtagccctcagtcctgaggcaagaatttgaagcaggagaggcttggaagagaaaaagaaggcaaggcttagatgagaaggtgaggccaacaaggaaggcagaagactgacagtgaaagtcagctgtcagggtggtgagaggcagcagcactagcagcagagccgcagcatcacacaactccaggggccaggtgcatagttgcatctgtaaatggctcctcctagttgtgcagtgcacagcctgtgcatccatacatgacagctctgagaaacaccaatgctcaaaaacttttagaaatggattttgtaaacataaggttgaatcaagggtaataagtgtatgtgtgtgt

SEQ ID NO: 713376 - DNA, 1636 bp, Homo sapiens
gagacaggcctctgctgcccaggttggaacgcagtggtataataatggttcatggctcactataggctccacctcccacgctcaaaagatcccccatcctcagcctcctgagtagctgcaattacaggtgcacaggtgcacaccaccacatctggctaattaacaaaattttttttgtagagatgcggtctggttatgttgcccaggctggtctcaaactcctggcctcaagtgatgctctcgtctcccaaagtgctgggattacaggcatgagccactgtgcctggctggttcctgctttttaaaacatggtggatggccagcacttagcccctggatggagggaatcagccctgaacacatggctgaagggttttaaatgctaatcaaaaggatctataatatccagagttgatattttatttactttctctcctctaattccaaaagcaaacactcagacaamccctaggtacgcaagaaataaatgtgaaacagatgcgtaagggagccgtgagctcccaggtgaagccaaggaagcaaacttctaagaggcagcagctgttctcatataagatcatctcccctctcctgcccagccccttaccacacacacagaatgggattagcaaaggcaccgtaggcacgactgtcatttcctcacactgtctaggaccagatatgcttctcatgggctgcttaggtgtccattcatgtttataatacagacacatggaggcttttgcttctcataagaactctggccaggtgtggtggcccacacctgtaatcccaacacttcgggaggccaagacaagaggatggcttgagcccaggagttcaaaaccaaccagggcaacatagtgagaccccagctctacaaaaaaataagaaaattagccaggcatggtggtgcatgcctgtggtcccagacactttggaggctgaggtgggaggatcgcttgaacacaggaggttgagggtagagtgagccataaccatgccactgcactccaggctctaaataaataaatacatacataaatggaactcgtcatttactaacaatatttagtagcagccagacatcacctcctggtggctttatctgggacagtctcacttttcctacttgccctggggagtttagaatggtgaagagccagagagcccacaggagactttgctctatcttggaaatccagagcctgtggagccctgagcaggcaagttcaacattgtatagactgagaggcccctggggacagggggtgaggcaggggccgggtagccctcagtcctgaggcaagaatttgaagcaggagaggcttggaagagaaaaagaaggcaaggcttagatgagaaggtgaggccaacaaggaaggcagaagactgacagtgaaagtcagctgtcagggtggtgagaggcagcagcactagcagcagagccgcagcatcacacaactccaggggccaggtgcatagttgcatctgtaaatggctcctcctagttgtgcagtgcacagcctgtgcatccatacatgacagctctgagaaacaccaatgctcaaaaacttttagaaatggattttgtaaacataaggttgaatcaagggtaataagtgtatgtgtgtgt

SEQ ID NO: 713377 - DNA, 1457 bp, Homo sapiens
  misc_feature 1318, 1378: n = A,T,C or G
gtttggctacgacagaatttgtgtgtactttctgcctactgggactctgagttgtctatgatggaaaagtagatgttggaaataaaagactgtacacccagtgttgtataggctgtacacatttctttattaacaccttactctctttctcctttatggaattcaaaccccagccctcttaccttctcccaacagctctatgacttctagacagcattgcacatatgttgagaagtattttcgatctccttagcagcttcaactgaactgctaagaaacagctggtttgggcatacatgcttttttacacctgaatttctagtcacgtgttagcccagggccaagacttgcagcagcaaacttagctcccaggcatgatcgttagcaggagtgagctgttgccttctatgagcccaacagtgagttgcttgccaaagtcatcactccaccttgatctcctggttagtcaagttcagtcaagatttccctcagaagctggagctcgttactgtttctccagtctcttccaaggttacctaccttctctggcagaggataaggaattcatcatctttcagactgcagtctgttgcttggaggcttggaggaaactggctgagaaaatcatagttagtagttgataacaggccartgaaaattagcgagactaaggggactacgaaaagtagttgctaatgggacaaagttttactatgtcttccatgatgaaattcaacctcttcatggcctctttaggaaggggtcagtaaaaacttctactatttttaaaagttgccacaaacaaagtttgatttgctttgaatgtgacaccataacagaagtaggctttcaggaaagaggaaaatggccagttttgtatttttggtttggttctgtttctttgtatttttttcccactttagaacatacaggaatgttgtagaacattctctctttctttgagaaacatttagcacggtttctaaatataccctgcagagttaaattcctgtgtttggtttagactgagatctgttgacctaaggcaagacttcgacagattcagttttttcacctgtaaaatgggatggtacctacctcttagggctgagctagagattaattgagttaatctatataaacacttagaacattgcctggcacaaagcaagagctagatgctgtgtaactattagttactcttaacatctccctctcatttgagttcatttcctccaactgatatttcactgggcatccatttggtatggtcctgataagatgtctcgtctaattccttgtctcttctcccttaatngagttgattctcaagggtaatgcatttttattgatttattcttgggacacagaagacagntcagagaatatcaaactaagagaaacaattttgccccaatgtaacctgctgggtgacctaaccctttgctgggctttaa

SEQ ID NO: 713378 - DNA, 597 bp, Homo sapiens
gttgctaccttaatagaggcaaggacactgtgtagcaagaaataagagaaagacaggccaccttttctacaacaagtttctgcaagcctccaatagctcaaccaagcagcgtcttttcacagaaattaggagagtactaactgatctaggtgcgaggccaaacacatattatttatgtcaataatactattgataacartaacaaaaattgatccatcatttactatgtgctatgcactgggctaagtaattttttaaaatgtattatcctattcaattcctacagcaacccccataagcaagtactattttatatatgccaaagctcgagttgagaaaagtttagaaacttgctcagatttgtctggcaccagcctgcagccctaaccaccaggcacagacacacagcctgtctccaaagagttgttatgattaactggctttttaaaggagggatgagactatgggggaccatttgttcaagattacattcctacctgagaccactgtggttccttcaaattctgtaatactcacttcaataaacctgttaatttgctgtttctcagccttttaaaatgagcaagtctttctaca

SEQ ID NO: 713379 - DNA, 1414 bp, Homo sapiens
aaaaccatggaagtaaaaagaggtgcaaagtagtgtgaggcaagacaaggaagagttcagagtgtcaccaaaaccaaatgagaaaaacacrtatatcagacataccccattttatcctttgggaatccaagactcaataaattatcaatgtttcccaagattatacaagtagaaagtaatatagcactgggactctaatttaaatttgcctgattcataaattgagtttcttttcactgctttatcttgtctgtctaattaataaaatctagccaattaacccgcactggacatatgtaggtatatatgtatctgtaagtgcactgtatctccaagtattttggaatagaattctctctcagtgcaaaaaaaatgattgcagactaaaaatcaaatcttaacttaaaagtctcaatgtagatgacctagaaaataatgccatggaacagagaactttcctcccccagccccctaaccttttgcatttaggacccatgaccagcaccttgtggccatgaaggagaaacccaccatggtggggcgtgtacatttgatgtgtatctcggtggacacaactgatcctactggaccattcatattcaggtttccctggagatcaaccatagctaccttccagtaagatgaccaggggcatctgtgcccctaagacacagttgtatccccattgcaaagctaattggaatccagcttgcaaccttggccctgtcacaccatattccaacccaattctgtttagtgcttgtgcatcaagagctagacatcctagcagacagaaatagtctgtttccagcttggcctgcatcaggaagagtcagtggaggatcacagcttacaaaaatacacacaaacacacagatacttctgatgtttatgtgaacctgtgaaatgacccaattttttttacattaaatcaacgtatacatacataaatacttcttgggaagattattatttcttatacatcttgagctatgtggctggagaatcaagccagtcttaacatgtagggaaaaaatgttgaaaattaaattaaaatttccccaaattaaaacccaccagtttataaatcttcataccacataagcacctgatattttcccggaaacggtagcaacaccaccatcaccactaatcacaggaaaattgttgtgaggcttaattaatactcactgattagctttatatagcctaaagcttgggaaagaccctactgcacaataaaatgtcttgcttttaaactttactagtaatttttgtgaaatatctcaactttggttttgctttcgtttttgttttaaacatcaaatattctcacagagctcctgtttctatgctatattggtttttaacttttttttacctttcagcatttggtaagtcccaataaaatgaa

SEQ ID NO: 713380 - DNA, 1075 bp, Homo sapiens
cttttttcctttattccctcttcctgattcacttgttaaatacctactgtatgctgagcatttttattgttcctagggtttcaaagatttggcacgttccttcgtacacaagttgctggaagataccaatattcaaatacaaaccataagctagaatgtagtatgataacacagattcatgcacagaatcctctgcaaagaggagtaaataagtagcattttgagggttgtggtggaagaattggggaaaactgcgtataggagactttgccgtataagtaaaataataacagattttcaagacaggaaaaaaagacaaggcgagaagggatattcatgacaaagagaattcagaagcaaattcacagaggcataaattaggttatatatttagaatagcacaattgccccctatacattatggtcggagcacagaaaagaatggaaaaaaaaatagtctaggcagagtgcacagagctaagtcacgaagatcatgacgattgtgtataacaaacaaatgagtgattggataactctatacaacatcttcacaaatggagtcacggggaggaactaagctcagattcagcacatgcaaacacgtacatgcacagggataggtgagtgcttttctactttaatatgaatttgaatattaattggagcattctttcttgatattggacagttcttcctattatatctgttccaaaataatccatttatattacaagttttccccttgtatgcatttaagtttaaaaattctctatagacaaagggagacaatttaagatttcaaacgaatatggctagaactatgtcttagaattgcctaccattataggatactgttttatagacaataaagtactcctagacaagagcaatgggtgggggaagaagtagcatattccaagctcagttggtcamatacatggctaagtgtttttagataagtaaagtttcacagctcttggaaaggactgtgcacaattaacagttaataacaatgtacagttgacgctcaaacaatgtaagcgttggaggtgctagccatccacacagctgaaaa

SEQ ID NO: 713381 - DNA, 1094 bp, Homo sapiens
tcagctgtgagccaggtacccatccactatgctgcctaaacatctgggtacgtgtatggtatgaagtcccttttgaggtctccatgtagcccctcttcttttctaggcccaagatgggtgggaggtaccatctcctcattggcagggctggaacgaggcacaccagtggctatctccaaagaaatattttaatcaccaaagcccagcttttttacatcmatacccatgggtaaggggttttggtttgatggtttggggtcaggtattgtcttgggcacatggtatctctgcatattgatgtcagtccaaacttccattttcacattgtttagtaaccagttggtgagaagctaggcccgtgtcttgaatccaggtctctctgactaggatttgtagtctttccaaaactatattgccctgactctctgaaatacaacgatttcagactgtaaactcacgagggcagggctgtgtctgtcatgtctaccactgtatctcttgacttctaacgtgtttaacacagagcccatgctattatggatgtggaagttgccacgtgcatggtggccagtgcagtgcctggcacgtatgagaactcactcaatatttgttaaaactgtggaatggagcggagaggccagctttctggtgccggaatgagaattgggaatcatataagcatgctggagccttctggaggtcaaggaggtctgctgggtgaggaagctttctggttacttcccaaggggctaggccaggctcttccatttgggtccagtttctacctccttcctgctttctttcaggcatacatgagtcatctccttctcccctcaggggcttgaatcttgcctggcccccagaggtgacaatcactgcaggacagagccacaccgtagtaagcaagttacactccgctgtggggagccggcatcccagcctggaggaggagaccctgtcctgggcctaacccgcagataggagctgagtcatgatttggtaggtcagccttggcccctggctgaagcaagggggaaaagcatcagagaagaacatggttaggacaaggggctgagggtcattgctgctttcag

SEQ ID NO: 713382 - DNA, 648 bp, Homo sapiens
tttactagcccaaaagttatgaatacatggtttgatgccatctttttcttaataaagcttacttgaatttatttaattaaatgaaagtttaaaataaaacattttattaaaagatgacattatataaaaataaaagaaaaatacatctgatatatatcagccataatatgtgactcatttaggtgctgttgaaattgatggcctattgtgctgtttttcattatttggaggactcggcagctcagtgaarctccattcttttcagtgatttcaaatatttcttggcatgtctctgcaaaactcatttttacggttctatcaggccctggtgactttttgacccttctcactacctctgattgtaaaattaatgagcaattacttttgatcattggattcttaacaggcactgaaagggaaaggtgtctattttttcatgtttgggatcttgattttctctcaatgaaaattgttgattatcttcaaccataccaaccatagatgcttatactttgtttcattcagaaaacaatttttcatgatgtcatgatttggaggagtagcatttcttaaaaagggtattgtatggctaaggtttccaaagtttctattccttctcttaattactccattcaaggctgttttttt

SEQ ID NO: 713383 - DNA, 759 bp, Homo sapiens
tagttgatggaggtaattaacagcctaaactgtcagaaggtgacagcaggcaaaaagttcttgccctggggtcacagctggactccaacaacttactcctgatttaccagtaaaactaataatgtaagtaatattggtattaaattataaaatcaagggtcaaactgaaattctggtttgtaccacacatttactggcagcaaattagtgataacgtcttgcagggacttccctcctaaaaagacccctggaaaaatgagcacgtgtctattttggcaacaacatgtggattttgataatacgaagaagtgaaatggtgtctttgatttatctcagcaattgtagctatgamtaggataatctttttttttaacgtttaagaaaaccaaactcccatgaagtaacggatcatgcttagatgataagcatcagcgtatacttttactaaattttgctttgcagttcaaaagtgagcaacactttttattcataatgttatattttcctatagtgagccttagagagtgagagagagagaaagagaggttagatggatggatggacagataaattcagatatacgcttgaattattagcatcctaaacgtacttttttcataatcttgatttttaaggaataatcatcattattagaaacttttcaaagttttaagaaaaaattgcttggggcttgccaatttgaagcgaatcctggcttcccaaattttattataccttcctagaaaaggtctcatctga

SEQ ID NO: 713384 - DNA, 759 bp, Homo sapiens
tagttgatggaggtaattaacagcctaaactgtcagaaggtgacagcaggcaaaaagttcttgccctggggtcacagctggactccaacaacttactcctgatttaccagtaaaactaataatgtaagtaatattggtattaaattataaaatcaagggtcaaactgaaattctggtttgtaccacacatttactggcagcaaattagtgataacgtcttgcagggacttccctcctaaaaagacccctggaaaaatgagcacgtgtctattttggcaacaacatgtggattttgataatacgaagaagtgaaatggtgtctttgatttatctcagcaattgtagctatgactaggataatctttttttttaacgtttaagaaaaccaaactcccatgaagtaacggatcatgcttagatgataagcatcagcgtatacttttactaaattttgctttgcagttcaaaagtgagcaacactttttattcataatgttatattttcctatagtgagccttagagagtgagagagagagaaagagaggttagatggatggatggacagataaattcagatatacgcttgaattattagcatcctaaacgtacttttttcataatcttgatttttaaggaataatcatcattattagaaacttttcaaagttttaagaaaaaattgcttggggcttgccaatttgaagygaatcctggcttcccaaattttattataccttcctagaaaaggtctcatctga

SEQ ID NO: 713385 - DNA, 591 bp, Homo sapiens
ataatttgcaatgtttagcatgtgatctaatattactaaacatcaaaaatcatgacaagcctgtaatcaagagaaaaatcaatcaatagaaatatttaggactgacaaagatgaagaaataatcaataaaaatttttaaaatgtcaattatagataacttttaggtcattaaatagatattatcaacagaatgaatagagaaatggaagccatataaaaactaaaatgtaacttccagagggaaaatgcctattgagcttaagagaatattagacacttggtagaatttgagaacggtgaatttgaaaacattgcaatacaaactgtccaaacatttgaagaatggagagaaaaatatgagtcggaaaaattaagagatatgtgagaatagaakatatcaatctttccaatatatgaataattcaagtttaagtatttcaaaagaattagagagaaaaaatatttaaagaaatgatacacaagatttttctaaattgcatggcaactgcataaacaacattataactaaatccccaaaaaacaataatgaaagcagtcatacaagtagtatggggaaagtgaggaattata

SEQ ID NO: 713386 - DNA, 622 bp, Homo sapiens
aaaactacaggcctatatccttgagaaacatagaagcaaaaatcttcagcaaagtactagcaaactgaattcaatagcacctcaaaagacattacagtaagattaagtgacaattttagtagggatacaaggatgatttaacatatgcaaaactaaatgtgataaaccaaataaagataattaaagacaaaaactatataatcatttcaatcgaggcaggaaaagtatttgataagcaccccttcataataaaaactcaacaaactaggcatataaagaacatataccataaaggcyatatatgagaaaccaacagctagcatcatattgaatgagaaaaagttgaaagttcttcctcaaagtaacttggttagttctatgcttcctcacattcttcaatatggttacattattcatatgtagcccaggtgctttcatatgtgacattttagcttcctctcatacactgcttgagttttcatcctgagatagtgcagttcatacaaatgccaatttacgtttgtagagcaaatggatggatggaaagatggatggctggatggatgggcagatggatgtaaaagtattttcaagaaagcttctctatcatgtctctcagatc

SEQ ID NO: 713387 - DNA, 528 bp, Homo sapiens
tgagcccctggctggagttgctggagttcctgtagggaggcccttcccagtgaggagggatgggtcaaggtcaggcctgaagaggcactctgactgtartctgccacagccggtgtgttgggctgtggggaatacctcttgggactgagatgtccagcctgtctggttccagcaggggaaaagtacagcatggagctatagagatgcgtgggacatttttaagtgcctggggtcagttgctttctcccctcttgtcaccaaaatgagtcccaggaagctcctgagcatctctgaccctcacgcccaccctgccctattctgtggtggggcagatggcagaggacacagctcctgtccctcctaagtgcctggaagaggcagaaaacaaagcaaaagccatgctagacaccagagaggggcatttgacacccaataaaaggtgtttcattcctccagggggaatatactttaagacaaaacattttcatagacaggcaggtggaggggatgaagaaatttgactcaggg

SEQ ID NO: 713388 - DNA, 528 bp, Homo sapiens
tgagcccctggctggagttgctggagttcctgtagggaggcccttcccagtgaggagggatgggtcaaggtcaggcctgaagaggcactctgactgtaatctgccacagccggtgtgttgggctgtggggaatacctcttgggactgagatgtccagcctgtctggttccagcaggggaaaagtacagcatggagctatagagatgcgtgggacatttttaagtgcctgkggtcagttgctttctcccctcttgtcaccaaaatgagtcccaggaagctcctgagcatctctgaccctcacgcccaccctgccctattctgtggtggggcagatggcagaggacacagctcctgtccctcctaagtgcctggaagaggcagaaaacaaagcaaaagccatgctagacaccagagaggggcatttgacacccaataaaaggtgtttcattcctccagggggaatatactttaagacaaaacattttcatagacaggcaggtggaggggatgaagaaatttgactcaggg

SEQ ID NO: 713389 - DNA, 3041 bp, Homo sapiens
  misc_feature 581, 582, 583, 584, 585, 586, 587, 588, 589, 590, 591, 592,593, 594, 595, 596, 597, 598, 599, 600, 601, 602, 603, 604,605, 606, 607, 608, 609, 610, 611, 612, 613, 614, 615, 616,617, 618, 619, 620, 621, 622, 623, 624, 625, 626, 627: n = A,T,C or G
  misc_feature 628, 629, 630, 631, 632, 633, 634, 635, 636, 637, 638, 639,640, 641, 642, 643, 644, 645, 646, 647, 648, 649, 650, 651,652, 653, 654, 655, 656, 657, 658, 659, 660, 661, 662, 663,664, 665, 666, 667, 668, 669, 670, 671, 672, 673, 674: n = A,T,C or G
  misc_feature 675, 676, 677, 678, 679, 680, 928: n = A,T,C or G
tttggctcaaaacctaagtcaaagttctggaaaacaaaatcaaataatgaattttttaaaaacgtgaataggtatatttatcaggaatgcctgttttgtttaacttttgattaaaaataagttttcatgatttcaaaagctgtattatgcctatgtaaagttagaaaacaaagattaacaagattgagagagtggtgtattctaccacccagatgatggcatggcccacccccagcagatgtgcctccagaccctcttttttgcatatatacacacaacattatggctttaccaaaatgaattcacactgtaaatgatattttaaagctaacaatgtgtatcattttatgtcaaaaatttatcttatgcaacaaatttccttcattgtctgaagagttttctccactcccttttgtccaaatcaggatccaaatccatgacaaatcaatggatttggtggtggtggcctttatgtttctcttcacttggcacaatccacctcctgcccctatttcttttattcatatcacaaaattatttaaaaaacgaattcacaaaccgattgtcctgggggaaaacannnnnnnnnnnnnnnnnnnnnnnnnnnnnnnnnnnnnnnnnnnnnnnnnnnnnnnnnnnnnnnnnnnnnnnnnnnnnnnnnnnnnnnnnnnnnnnnnnnnttcctctcactccctgagctccgggtgtgttcttccatgtaaggatgcaggttcttcagccctgctcactggccctgatttctgtgccacttgtggtcctgagaaacccggacccatagagtagcgctttgccccaccaccatgtgtgacagctgtaaaatgtgggtagagaaatgcatctcagccctaaaaaagtatcaaggcattaaaaacgctcaaagttagaaagggtattaaaggtccttcanatagggttatatttacctaagtagtttacatttcttaacacatttaactcatacaagtttataaactcttattatttccatcttacaaatgaacaaactgaggctattgggttgagtctggttccacaaacccaccactctatttccctcaacacacacacatgcacacaatatgcgcgcgcgcgcgcgcrcacacacacacacacacacacacacacacacacacacatcactgctgacatttcctttgttaagggacaatgtaagatttcatggtagtccgacaccattaagacaaagggagcaggcaatacctcaaacctgcttcaaacatcccactccctcaaagttccctcagggagagatgcgggcaaaggccaaggcagatagaaaatcaaacctctactacattttaattgagtttatcctcaaaattccagtgcttaatactggcaaactggattgaagcacaagagagaggcactaggtccagctagaaccctttcagtacaaagcccaaactcaaaattctgctggcagctgctgccctagtttgagaagatgagatgctcacatatgcttgtgagaaacattaaagaaaaagaaagctaaatggctgtgcttcctcccaccttattgtaatcctaatttaggcacaaaaagaaaacgtcaggaagcaccggagagcaagacaggcagatggctggacaagtgctcgggtgggtgaaaagcccgaggccagtttgctgatcagctacctggataaaagaagaggaaaagaatagtaagctcagtgtgaactttctaacaatcagacgtgtcactgatgacccaatcggattaaagaccccttttttctggcagtggagaggtggatgctatagaaaagaaggtggagaggagctgccaagaggaaaaataacattttccccccaggaaaggcccaaaagtcccaatatgcacatttgtggctcagaccactcttctgaattccgtatccatatatccacagtaggaggcatcaggaatactccccctaccccggcccccaccaaccttcaaccaaagaggaaaatttgaaccacaaaattatttaattggatctgaatgtatttctcttctgcatggcaaagggaaacccactgacatccagtgcctcttgcaactcaggaggcagcaaaacgtgaattgccacaaaaggttggggtatacactttcattacagaggaaagtcaaggttgccctcacagaagcaatagtctctcttatgagaatattctttgtttctgtgataaagcacatcttggtgatatgtgctggcttttcagtttatgcttagttttcaacagctgcagttcccacgccgggagatctacaggcagtcaaggcaccacgtggtggcacagggaaatcatttgtggccctacagctacagcccaaggggttcaaattttcaagaacaagactattaagttgggggaaaaatctcttccttctagaaatcttctgaaggtgaaagtaggggacaagcttcggaatcttcctgatccttcagtaacaaactcttcatttattaaaaaaattttaactgacaaacaataattgtaaatattcatgggatacatagtgatgttttgatacatataatgtatagtgatcagatcagggtaattagcagtgtaattgttcccggaccaaactgaggattgggctgctatttctcatggcccaataatgagatgcagatgaactggggaggaagaagagtttttatttctgtaactggctacagggagaaggcctggaaattatcaccagaccaactcaaaattacagtgttttccagagcttatataccttctaagctatatgtctatgtgttaagtgtgcattcatctaaagacaagtgattaacttattttaatctataactaagatctgagtcctgaagatcttcctctggatcctcagtaaatttacttaatgtaagtgggtccaggtgctggggtgattacccttatcttgtctcctgccaaatcatggaggtttggggagctccttcagacccccaacaaacttgtttgtagaggccttggggagtttcttcagatcc

SEQ ID NO: 713390 - DNA, 2337 bp, Homo sapiens
tcccttttcctttcacagccattatctccagcaaaccaatctctcctaactcaatttcagcatttcacatgcccagatccccattcacagagctcccatgcatccatccaccagtccctgaggggctgcatcttggccctgctggagctactatgtaaaaaacagagatccacttggggtgggggctggatcttggagggcagtttaaggaatggcaagaatgatgcagagtgctgggagaagaagaatcttcctggaatcggtccctaccaagatgtcccttccactatatcaattcctagagaccgttagccaaggaatagggtcactattttatggaacagaatgccgtcccagggacactcccttaagggaggctgcatctgaaaatgtcttgtcagtttcagagtgtacggtgtctatgacaagccacgctgagcatgcttctcaggacggagacatatccagaactttcacagcccagaaatcccagactaagccaaagattccacactggatcttcatcagacaaagccttgaagaacaaggaagatgcttctcatcacccagttttgtctgcttcagctccagacataaccaggatgcacttccccaaggctcaggaatgggacagtatccagctacccccagccctgcatgtgcagggtcagcagtccctctgtctagaggagccaggagtcacgttagtcctggctaacggcaaactcaacagtatttccatcttttgtctttgtgtaagagctagagatacctgcttgctcctgtagcttatcctatgaaaattctaagcctgtcattttctctaaaaagtatcctagtagcttctttatctgttaatgcaaaacataagacacctctaaatgatgttttgaggacttagtaatgtaaaacatttgttacagggattttatttaatttttttggtagcttagttcatttattttccatttgttagtaatttctaatacatgaatttaaggccatgtttttctctgaatctccatctaacggacttggatgtatacgtctctcatcatccttcatttctaaggcatttgtaatgtcaatttaacttcatctttaattcaagttatttaaaagtgtgtttgtggttttgttttcaagagagttttaaaaytgacatgcaatacaagaatactttgaaaccaggtttttctaggcttaaccctacctctgaatctaaccctaacacaaagcttgaccctaactcacatttcttgagcttgattccagagaaaagaagacctaactgctcttctatccactgacatttttgcaaagcgttatggattgtttgtaatctggcatgtcaccctacgaaaatatgcttcaaaaccaaaaacataatggttttgttttatttttatagtgggtgggttgcaaaaggccagaaggaaattctgttttctagactgcttattttacttggaaagggaaaatgcctctctaatggctgtccttgaaggcagtcaaagccaagaaaaagcattgccaagtttaagagtaaatattccaaaaagtaatattagcaaattattttcaggaacaaagcccactaccaccataattatttattaaggtttgggggccttggtcattgtaacattgtaactatagaggaaaccaaataaaatgaatgcatacggtaaaaggagaaaaatactcttcacagataacaataattgaaaatatacaattatttcaaagcagcttaagtgactttaaaagacaaatatggaaaaaccaatagcacctgagtattgatcttattcacaatagtatcaaaaatattataaacatagaagtgattttgagaaaatgtgcagaatgtaaataaaacctccaaggtctataggaagtcataaaagacatccatttgagaaaggaaaactatttctagatgtacagatgaatagtccaaatagactttttatgaatttggcaaaaataattttgaaattcacctgaaagaacaattgacatagacttccaaaaagattgcttgaaaagtaagagttaagagggaagaagtttgcagtcccagcaaatattaaaatatattttaagaagaacattcattaaaaccttagaatattggcttaaaatatgacagagagagactaaaggaatgcaatgaagaaaccttgagctaaagacaatcatatacagaaatacagacagtcacatgtggaacttgacattttctagtagctgcatttaacaacagtaaaaataaataattttaataatatatttgatttaacctaatatatcaaaatgacatcattttaacat

SEQ ID NO: 713391 - DNA, 1325 bp, Homo sapiens
tggagatatctcttttagatagttacgtaccattattaaagattcaaaatatcattaatttccgtcaagctctattatgtttatcatctatcactgtgtcagcacactaatcacctcctcagctgcctcaggactgcagcttaactatttacttttaatagaaatcggaccactgcagcctttctctgcaccaacaaagacatgccatttcatgagctgttgatcccttgaagcaagtgaagtcctttaatggtctcctacatggtcgagattttttttagatgatgaaaatgaaaggtcacagaagtctgtggaaacaaagagattcatccctattctcctgtagtccctggatgatgagcaattgtggacagcagccagcctttacacagtagtgtggagaattctgcaggagggatgcttcctccaaccctgtgtccccaggcttggctgacagctgcccaggcagctgagatgagggaattggctcaggttaccctgaaggtgcaagcttggaccctggctctttctacatgcacggtcctatccctgtaagaaagcatgagaataggggctttggaatcagatactctgggttcaagttcagactttcacatttacttaatatgtgatatcaggtaagttatgtgaccttcctcattcttgtttcttcatatttgaaatagaaattatattgctcattcattcaatagatattgattgggcacagttctagatactgggaatataacggagtttacagatgaggaatggggagggggtacagatgctgatctaattgtcatcctgtgaactgcaagtgcattcattaaggaacagaataccatgctatgagagcccattaagagggaacttgaacttgttaggcaygtcagagaatgagttcaccagctggggactggagggaacagcattcccattacagggaacagaaagtagatagtctctatactaagaggaagcattgtcaccaaaggttccacagaagtaggggggccaagaagcacaggggccaacggagatgtggcgaaggggtaggagccgtggtccctgttaagaattccctccctgtgatggtgaattttaggtgtcgactgcattaagggttgcccagctagctggttaagtgtcatctctggatatgcctgtgaaggtgtttgcagaagaggttggtgtttgaatcagtaactgagtaaggaaggtccaccttcacccaatgtaggtggtcaccatccaatgggttgagggttcagatagagcaaaacacacacacacacacacacacacacacacacacacacaca

SEQ ID NO: 713392 - DNA, 613 bp, Homo sapiens
ctgaatcgtgtttcctctggaagcattttattctctgtcattgtctacaagagctgctgcctaatacacacaatggaagattcatgaatcactgaggcatgaaaaaatgtttttgtagcagcagaaatgtaattaactgcarctttggtaatattctagagtgaaaaaagaaaaacttagagacatttctcaggcaatgctaaatatgtatgaaattcccaacctttttatctcacacttaaatgatttcataggctctttaagagtcttgctcttgatgccctttaacattggaatgtctattctgcttgcttttccaggtagcattttgacgcttagctgatttactattaacagcaacattttactaatacttattaatatttggagttttttaacaatagcatacaagttatttaggagcttgttagagattcataagcgcattaaatttttaaaagattttgaagctcatgaagcatgaagaaatgtccaacgatgtctggggcatttctaagatgtgatcttctggtggaacgggatcaatggctctgggaggggcatggagagtgttgagcagagagtaggtggcactgggggatggtgagaagtg

SEQ ID NO: 713393 - DNA, 1450 bp, Homo sapiens
cttctctcagtctctagccatgctggcttttgtcattaagtggccattgtgatctttgatgtataatgatggggagtgctgtcaagaagcaaaatcatggttgttacatggtttgggtcagccacagcagtcagttttttttgtgtgtgtacagcaatattggctattgttgccataagaatggtggaaatgattggggtaggagagtgaattgcagcccaactgaagaataataagccacctcttcaattttaacctgaaaatgacawttttttttaaaaaaaagtaggttcatgcactaagattagaaaaaactgaataccaaattcatacaatttgacttttgctttaactatcaaatatcaaaattcaagttaatacagattcaatttgtgctaaatatttcactttaaaccctctttttcaagaacacttggcatcaacaaagagtgaatttggtcttagtttccctttctttttccttccccccaccaagtctaagaactagtaaaattcttaatctcatgtcaatggaacacttttaaaattcctatttaatgtgtctttctttgccttgtaaaccagagactcttcattttgtgttcaaaaatttaaaaagaccaaacacagtaagctgctttataattctttttttattcattgatgtttgtgaaatacacactatccgtaactattgggaaatgtgacgtttacatagcagaaaacccatctacactgacggacatagaatttagaggaatccaaatttttgtttgccaaaataacagattaactgtttatcattccaattcatcagagtctaaagggaagcatttaatgggaacgatctaatttctctccagagcttttaagtccctgcactcccagaaatacaatcttttctctccctaccacggaggcattgcatggacagtgcatatttcacatgagaacattaatatcaaacacttcatatcaagtatagcacatagtaggcaatggataaacatcagctataattatttagtgaaagttgaaatcatgcctttccttcaaagagactgtgttccataaatattttaggtgaagatgatatacacagatccttctctgttttttgaattgctgaaaattcatgcaaagtcataaagcaaaccaacgcaagcctcacgctgcctctaaaatatcttatttaataaaaatcatcaggctgggagcggtcgcacgcctgtaatcccagcactttgggaggccgaggtgggtggatcacgaggtcaggagattgagaccacggtgaaaccccatctctaccaaaaatacaaaaaattagccgggcgcggtgcggacgcctgtagtcccagctactcgggaagctgaggcaggagaatggcatgaacccgggaggtggagcttgcagtgagccgagatcgtgccactgcactccagcctg

SEQ ID NO: 713394 - DNA, 542 bp, Homo sapiens
caggcaaatcacttgaggcctgaagtttgagaccagtctggccaacataggaaagccctktctctaaaagaaaaaagagaaaaagaaaaaaaaaaagcaatgcaggacaaggaagggcaataaatagaaaatagtaacaaataagatagatactaatctaactatataaacaatcactttgaatataagtgctttatatgcaccaatgaaaacacagagattgtcagagtggataacagaacagtagccaactatatatcatctacagaggtgaagaaaacagggtcccttcccttggaaacctgacatcagaaaatgtttccaagggttcccctttttccaatagtgtgtgctatagagtgacggtggttctctctctgcctctgtcctttaggcacccacaccctgaggaactgcaggcatcacactttagcagtgatctagtgtccagagtcagagacccagagaaattaaaaatctcattaaaaacaagcaaacaaacaagtattctccccttgtaaatgttctcgttattattgtgt

SEQ ID NO: 713395 - DNA, 1678 bp, Homo sapiens
aaaagagaatcttaaatgagaaaacatggaataggtacatgttacatggaggactctatcaggtaatagtcaaaatcatctcttttctaaataagtgcctttgattatgggaccacgtattagtcacatggtttttctaggtcctgacaccatgcttgtttcatcattttagttcagttgtaatctggttgattggctgattccctgaatacatgtctgaatagcctatgaaaacaaccttgaaaagagtgaacttattttcaaaagtcaatttactacattttcttcaggactatattcattaggccatttgtactttacacttatgaagaattatttcactatattcrtaggtctcctaaacatcaggttgtactaaccttttaacacgtttttattcaattgaaaacattgtacagagtgaagagatgcacaattagcttttaaagaagaaaggcaaaatactgaattcttaaaaagtaggaatctagggaataaattacacttctaagacagaaggaacaatgtgaaaccagagtggtgagagaacctattattgccatctactctcaaagctcttaaaaaaatacaggacccagtcttataagatcagataatgttgtcttgataataaacacattcagaaagtgagaaaatggctctgtagtttagagtgattacaaaatcataaacatcatgaaataacgttgcatgagtttcccataagggacatcactagcaggaacatgaaaagtttttattaatacctgcgtattagcactctctcttattttaaatttagatgctctccatcatatctttagcctagacactgacgttacagtatttagaaactttactgaaatagataagcctcaagagacgattctataaaagtacagatgtgccaacagaagtgttcgagataagattctgcaaattgatttccatcaattacatcctattttaaatatcctaggggaaaatacctgcggagaatcctgtcatgacttgcagaatggtttcctatatcctgcactttgtcaacacatttgaatacggtgagcttatttagctagaggttttctatgctgaagctccagtccttgctccataagggtactgtagtagaagtttgccatctcaattcttaaaaattttaagactgtataatattagtttgaagcattcttgtaatcagtgagaaagccctaaggtgacatttaataaatccttctcaaaaatgtattccagcagaaatatcttcaataagtaatttatgatagattatctaaatttctcttgtagttctaattatcaaagggattatgaaaattacctaaggacacacaacttgcatgtggggcagctgtatgagatttcagacccttattcttccacatcaggtttttcctagtacacaataaagattttttttctactttcttagaaagctaactgggcaaaaaatacaggcaactcacctcctggattgcatctctagcctaagagtcctctaatatttagttctaaataaatattctaatataaacaagaggggcctaatgcataccagtttgtgccattacaataacagcagggtcttttataaaacaattattctagtattacactaggtagaaatgattttacacacactaaattatcattctttctg

SEQ ID NO: 713396 - DNA, 1335 bp, Homo sapiens
aagaaaattagcggttgggtgcattggctcatgactgtaatcccagtactttgggttaccaaggcaggaagattacttcagcccaggaatccgagaccagcctgggcaacatagtgggactctgtctctaccaaaaaaatgcaaaaattagccaggcatggtgatgtgcacttgtggtcccagctactcagaaggtgggaagattgcttgagcccaggaggtcaaggctgcagtgagccatgactgcaccactgcactccagcctgggtgaccctgtctcaaaaaaaaaaaattagcttttaatataaatattatggcatgagaaagctacaaccacattatagttgtaggaattattcatgaatgaactatttacagaagtaaaactgatgcaagcacwatttttagataaaaatataaaatggcccttttgtagggatttttactgtccaaaaaagataaataaattgtgtgtagtgcctaccagatgccagacactctttcatgagcattaatcatttaatccttatagtaagtcaatgatgaagaaattatttccagcttataggtgggaatactgaagccaaaagatttgtcaaaattgcaccatcaagtaagtgccagagaatgaaaatcagatttttgactaaaaatttgatatgcttttcactataccgtggtatctcttaggtatgaatattaagcattctagtgagaattaatttaaatttgtgctttcctatatcccactccagatatgttcctcagctttgaggactatattgcaatatagagaaggcatgttctaataaaagaggctgccttaaatcctttttaaaaacaaagtggcatatgtataagtaaggaaagaaaaattgagaaaaaattttaaagtctattaattgtctcaaaatgaaatggtattacatataatttgtgaatcattagaatgctagagaaagttcccaaaatgataccctgaatgaaatattttaaagtatcattaagactcttaatccaaagaactttggagagactctgtccctttagttttctttaatatatgcccttgaaaaaaaaaatgcccatgcaataaatgttgaccaaaacacgttggctttgcagttgtgctttgctataaaattaaagataaattctaatgaactatgcagaagtatgacctcataactaggtaggtaatgatacggtcaatgccaaaacacagtcctcatcagtaagagctgaagcttaaggtttgacattttatttctttgttccacatgtttattttttgaatttcttaaagactattagaggaagtaaattaatatcctt

SEQ ID NO: 713397 - DNA, 642 bp, Homo sapiens
gtaaatttctcttctttgagccacctaacctatagtagtttgttatggcagcctttgtaaccctgggtatttaacttctctgaattttcattgtctcatctgtgaagtgtgttgatattttatgatataaaatggatgatattttaaaataagtaaattcacctattttaaactgggggaaaagatgacaaaaaaaggaatagtattgaataatggtakctttctaatttcatttatttttctaaaagtctgagagtaaaatatagatacatcctgatttgaaaggaccaaaaactctacataaaactaactaaataaataagtaattatttacaggaaaattccccaaatcataataccattacttagagaatactccaagggaattttaaataaaatttgattctctctctccaaaaatgtcaatttacattaactttccagaggtatacctattgcataaattaggacacaccgtacttgttaaatacttaagctttgatttcataagagatttcaggatgctgaaagcaacctaaccctgctgttgttattgtaatgcatgcatagactgcagttgataatcagagctgtgttgggcattccactttgcacctcctatggcaccaattttcagaaact

SEQ ID NO: 713398 - DNA, 537 bp, Homo sapiens
atttattagaaagaagtatctatgcagaaagtatgattagcagttctagaaattgctccttatctttctctttcttctgctgcctacatgaatttcctttagaaggagaattaacctttttaggtgaccaatctcatttctttaacagagatctttctaaaatgctttaaacacttatctgcattttaaacagaaaaacaaataaattgctttgctataaccgaattattcttataaattaattattagtgctctccccaggtctgtaaggaaatactstctataaaatattgctagattgatatgatttttgcgtgtgtgtgtgtgtgtgtgtgtgtgtgtgtgtgtgtgtttgatacagggtttcactctgtcacccaggctggagtgcagtggcgtgatcatggctcactgcatccttgacctcccagactcaggcgatcctcccacttcagcctcccaggtagctgagactaaaggtttgtataaccaccctggctagttttttctgtattatttgttggagatggggtctca

SEQ ID NO: 713399 - DNA, 537 bp, Homo sapiens
atttattagaaagaagtatctatgcagaaagtatgattagcagttctagaaattgctccttatctttctctttcttctgctgcctacatgaatttcctttagaaggagaattaacctttttaggtgaccaatctcatttctttaacagagatctttctaaaatgctttaaacacttatctgcattttaaacagaaaaacaaataaattgctttgctataaccgaattattcttataaattaattattagtgctctccccaggtctgtaaggaaatactctctataaaatattgctagattgatatgatttttgcrtgtgtgtgtgtgtgtgtgtgtgtgtgtgtgtgtgtgtttgatacagggtttcactctgtcacccaggctggagtgcagtggcgtgatcatggctcactgcatccttgacctcccagactcaggcgatcctcccacttcagcctcccaggtagctgagactaaaggtttgtataaccaccctggctagttttttctgtattatttgttggagatggggtctca

SEQ ID NO: 713400 - DNA, 2774 bp, Homo sapiens
cgagaccaggggtgctgctcaacttcctgcagtgcaaaacacagtgctcacaataaggaattacccagcccagaatgtcaatagtgctaagactgagaaacctgggcctacaactgttttcaatacaaatacaaatgaaaatgagggaggcagtctgaactttacacactggatcaagatccttttcaaaggtggaaataaagcaaccctaaaggaggaactccacctagggtacaagaagagaggaaacgttttgttcctttgtgttccgcatgtcattaggaagtacacatgggtggactattacattacagtgaatcatgaccatgtgttcattctaaacattgttgtatttgttattcctaactttaataaactgtaaaatctgaatgtggcatcaccaaacaccatgaaatgtgttctccccttttccaatagtgcatcaactaatggttaaatgtgatctttaacttgacagagtctatgcaatccttccacattttattcggcttagagatcacagcctctagaacagaatgataatttaaagcagatgttcttctaaactatgtttcactcaaatccagcaatatgataaagggaaaaaatggggaaacattgatggggcttcaggataaagggttttatatttttcacaatgatttgaatgttagttctcttctttttcaggccacattctggtgtattctctcatgatttaattacatgttacctgttgctttagtctatcctttctgatttactcccagtttctatttcatttatataagtgtgtgtatgtgtgtgtgtttgtgtgtgtatttatatatgtgtgtatgtataatgtatatgtatacacatgtgtatatatacacattatatataatgtatatgtatacaygtgtgtatatatacacattatatataatgtatatgtatacacgtgtgtatatatacacattatatataatgtatatgtatacatgtgtgtatatatacacattatatataatgtataatcatatattaatcattaatatatatcacatatatggacaatatataaatgatatattgttaatatatataccaaatatataataatatattctattcataccttgactcctaactgaaatgttactttctcagagaggccttccatgactatttcatgtaaattaaataccttcatacattaccttatctatcacattcttttttcctccatttatatatatatatatatatatatatatatatatatatattatatatgtacatatgtatctttatatgtctcttgatatacttttttttttagacagagtctcactctgtcgcccaggctgtcttgatatacatttagttgtatttctatctcatttgactcaaaggcccacaaaggaagagataattttgctttctttaccatgacattttcagaccctggcatctgacactttgccctcaataaacgttgtgtgggtgagataaaagctacccgctcaaggtgtattgactgtcaactgtactgagattatcaaaacatgtgtcctttccttttctgtgataaggtgactacaccctgcacaattgttctatgcacatatgcactgtataatttggccgcagtctatttttccctatgtttgtgacatcaaatgaaggtaagccccaatctgtcagtatgtgacatcatttttccaagaccacttcacaactccacatacacagaggcctttgctcttagctttttgtaccaatctctgaagcactatggctaatcttgagacagaaaaattcctggtatagtgatgaatcccttaagctgagcaaagaaccagcgacagtcgagaacccccttgaagatgttactcaattccaagagaggaataaaaggggcctatggttgctctcatttaaacttctcaagccagatgtttggcttctgcctctaaacatatcctagcaacatgacgttgcagatctttccctgaagaggtggagcctatctttccttctcttgaagctggacattctacatgtggcttgcttcagccaatagaactttagtaaatgtgacataagcagagacttgaatagtacattttctttagagctcactctcttgctgatatttgggccctgaggccactgtgtgaagaatccctgactactctgctggaagataaaagacaatgaggaaaaaagctgatctattccagctgagggcccccaaggctgaccggtctgccaactaccagacatgtaagtgagatgaccatagattttccaatctcaaattaatgaactgtctagctcacttacagattcatgaaaaacaagtgatttccattttaagctactaatttttggagtggttttgttatgcagcaaaagctaactggtaacagtcacagatagcatattactgcctgttttctcaaggaggcaagtcaaatgtctataaattgtgtgagttcagcagtgtctgtggaactcactagtttcctaaggatgtttaaggtataaaaagggactttctgatccaaagcttgggaatcactgcattctaaagcattttcaacttagagatttgcaaaacaaattagcaaattaaagataataagaatccacaaagtaaataaacacacacacacacacacacacacacacacacacatacaaaactgctgaaaatatgttaaagccccatctttcccaaactaccaactcaaggtgtattgactctcaactgtactgagattatc

SEQ ID NO: 713401 - DNA, 2774 bp, Homo sapiens
cgagaccaggggtgctgctcaacttcctgcagtgcaaaacacagtgctcacaataaggaattacccagcccagaatgtcaatagtgctaagactgagaaacctgggcctacaactgttttcaatacaaatacaaatgaaaatgagggaggcagtctgaactttacacactggatcaagatccttttcaaaggtggaaataaagcaaccctaaaggaggaactccacctagggtacaagaagagaggaaacgttttgttcctttgtgttccgcatgtcattaggaagtacacatgggtggactattacattacagtgaatcatgaccatgtgttcattctaaacattgttgtatttgttattcctaactttaataaactgtaaaatctgaatgtggcatcaccaaacaccatgaaatgtgttctccccttttccaatagtgcatcaactaatggttaaatgtgatctttaacttgacagagtctatgcaatccttccacattttattcggcttagagatcacagcctctagaacagaatgataatttaaagcagatgttcttctaaactatgtttcactcaaatccagcaatatgataaagggaaaaaatggggaaacattgatggggcttcaggataaagggttttatatttttcacaatgatttgaatgttagttctcttctttttcaggccacattctggtgtattctctcatgatttaattacatgttacctgttgctttagtctatcctttctgatttactcccagtttctatttcatttatataagtgtgtgtatgtgtgtgtgtttgtgtgtgtatttatatatgtgtgtatgtataatgtatatgtatacacatgtgtatatatacacattatatataatgtatatgtatacatgtgtgtatatatacacattatatataatgtatatgtatacacgtgtgtatatatacacattatatataatgtatatgtatacatgtgtgtatatatacacattatatataatgtataatcatatattaatcattaatatatatcacatatatggacaatatataaatgatatattgttaatatatataccaaatatataataatatattctattcataccttgactcctaactgaaatgttactttctcagagaggccttccatgactatttcatgtaaattaaataccttcatacattaccttatctatcacwttcttttttcctccatttatatatatatatatatatatatatatatatatatatattatatatgtacatatgtatctttatatgtctcttgatatacttttttttttagacagagtctcactctgtcgcccaggctgtcttgatatacatttagttgtatttctatctcatttgactcaaaggcccacaaaggaagagataattttgctttctttaccatgacattttcagaccctggcatctgacactttgccctcaataaacgttgtgtgggtgagataaaagctacccgctcaaggtgtattgactgtcaactgtactgagattatcaaaacatgtgtcctttccttttctgtgataaggtgactacaccctgcacaattgttctatgcacatatgcactgtataatttggccgcagtctatttttccctatgtttgtgacatcaaatgaaggtaagccccaatctgtcagtatgtgacatcatttttccaagaccacttcacaactccacatacacagaggcctttgctcttagctttttgtaccaatctctgaagcactatggctaatcttgagacagaaaaattcctggtatagtgatgaatcccttaagctgagcaaagaaccagcgacagtcgagaacccccttgaagatgttactcaattccaagagaggaataaaaggggcctatggttgctctcatttaaacttctcaagccagatgtttggcttctgcctctaaacatatcctagcaacatgacgttgcagatctttccctgaagaggtggagcctatctttccttctcttgaagctggacattctacatgtggcttgcttcagccaatagaactttagtaaatgtgacataagcagagacttgaatagtacattttctttagagctcactctcttgctgatatttgggccctgaggccactgtgtgaagaatccctgactactctgctggaagataaaagacaatgaggaaaaaagctgatctattccagctgagggcccccaaggctgaccggtctgccaactaccagacatgtaagtgagatgaccatagattttccaatctcaaattaatgaactgtctagctcacttacagattcatgaaaaacaagtgatttccattttaagctactaatttttggagtggttttgttatgcagcaaaagctaactggtaacagtcacagatagcatattactgcctgttttctcaaggaggcaagtcaaatgtctataaattgtgtgagttcagcagtgtctgtggaactcactagtttcctaaggatgtttaaggtataaaaagggactttctgatccaaagcttgggaatcactgcattctaaagcattttcaacttagagatttgcaaaacaaattagcaaattaaagataataagaatccacaaagtaaataaacacacacacacacacacacacacacacacacacatacaaaactgctgaaaatatgttaaagccccatctttcccaaactaccaactcaaggtgtattgactctcaactgtactgagattatc

SEQ ID NO: 713402 - DNA, 2774 bp, Homo sapiens
cgagaccaggggtgctgctcaacttcctgcagtgcaaaacacagtgctcacaataaggaattacccagcccagaatgtcaatagtgctaagactgagaaacctgggcctacaactgttttcaatacaaatacaaatgaaaatgagggaggcagtctgaactttacacactggatcaagatccttttcaaaggtggaaataaagcaaccctaaaggaggaactccacctagggtacaagaagagaggaaacgttttgttcctttgtgttccgcatgtcattaggaagtacacatgggtggactattacattacagtgaatcatgaccatgtgttcattctaaacattgttgtatttgttattcctaactttaataaactgtaaaatctgaatgtggcatcaccaaacaccatgaaatgtgttctccccttttccaatagtgcatcaactaatggttaaatgtgatctttaacttgacagagtctatgcaatccttccacattttattcggcttagagatcacagcctctagaacagaatgataatttaaagcagatgttcttctaaactatgtttcactcaaatccagcaatatgataaagggaaaaaatggggaaacattgatggggcttcaggataaagggttttatatttttcacaatgatttgaatgttagttctcttctttttcaggccacattctggtgtattctctcatgatttaattacatgttacctgttgctttagtctatcctttctgatttactcccagtttctatttcatttatataagtgtgtgtatgtgtgtgtgtttgtgtgtgtatttatatatgtgtgtatgtataatgtatatgtatacacatgtgtatatatacacattatatataatgtatatgtatacatgtgtgtatatatacacattatatataatgtatatgtatacacgtgtgtatatatacacattatatataatgtatatgtatacatgtgtgtatatatacacattatatataatgtataatcatatattaatcattaatatatatcacatatatggacaatatataaatgatatattgttaatatatataccaaatatataataatatattctattcataccttgactcctaactgaaatgttactttctcagagaggccttccatgactatttcatgtaaattaaataccttcatacattaccttatctatcacattcttttttcctccatttatatatatatatatatatatatatatatatatatatattatatatgtacatatgtatctttatatgtctcttgatatacttttttttttagacagagtctcactctgtcgcccaggctgtcttgatatacatttagttgtatttctatctcatttgactcaaaggcccacaaaggaagagataattttgctttctttaccatgacattttcagaccctggcatctgacactttgccctcaataaacgttgtgtgggtgagataaaagctacccgctcaaggtgtattgactgtcaactgtactgagattatcaaaacatgtgtccttyccttttctgtgataaggtgactacaccctgcacaattgttctatgcacatatgcactgtataatttggccgcagtctatttttccctatgtttgtgacatcaaatgaaggtaagccccaatctgtcagtatgtgacatcatttttccaagaccacttcacaactccacatacacagaggcctttgctcttagctttttgtaccaatctctgaagcactatggctaatcttgagacagaaaaattcctggtatagtgatgaatcccttaagctgagcaaagaaccagcgacagtcgagaacccccttgaagatgttactcaattccaagagaggaataaaaggggcctatggttgctctcatttaaacttctcaagccagatgtttggcttctgcctctaaacatatcctagcaacatgacgttgcagatctttccctgaagaggtggagcctatctttccttctcttgaagctggacattctacatgtggcttgcttcagccaatagaactttagtaaatgtgacataagcagagacttgaatagtacattttctttagagctcactctcttgctgatatttgggccctgaggccactgtgtgaagaatccctgactactctgctggaagataaaagacaatgaggaaaaaagctgatctattccagctgagggcccccaaggctgaccggtctgccaactaccagacatgtaagtgagatgaccatagattttccaatctcaaattaatgaactgtctagctcacttacagattcatgaaaaacaagtgatttccattttaagctactaatttttggagtggttttgttatgcagcaaaagctaactggtaacagtcacagatagcatattactgcctgttttctcaaggaggcaagtcaaatgtctataaattgtgtgagttcagcagtgtctgtggaactcactagtttcctaaggatgtttaaggtataaaaagggactttctgatccaaagcttgggaatcactgcattctaaagcattttcaacttagagatttgcaaaacaaattagcaaattaaagataataagaatccacaaagtaaataaacacacacacacacacacacacacacacacacacatacaaaactgctgaaaatatgttaaagccccatctttcccaaactaccaactcaaggtgtattgactctcaactgtactgagattatc

SEQ ID NO: 713403 - DNA, 666 bp, Homo sapiens
aaagtggatttaattctgtgttgaaatcctatatttcagttgagtgaagctgtcatatgcattatcatagcttgcagcttttctgcctaaacaagtttcaattgtttaaaagtctaatactgcagttcagagatgagcartgtttacagagctgtgttcaaataatcaagaatatttaactgtgctctatctcctaatccatatgaccagcaacttctgagaaagcaatattcttatgtgtctgctgatgatttactgggcatgcaaaatacatagagatacacaaaagctatatctaaaggatgaggtctttccctacataataatgcactggaaataattttatatcaaaccataaataccaatagaaaaaaaaaagattttccttcatatgccagtggaatctactttaaactcaaaatttaagtgtctataaaatataatcttccctgccttacacttgctttgcatgagtgtaggtatgcatcagttattttcttgggagactgaaagagttaatgggcctgacattttaaacatgtgtgcctttaactttgagcagaatggagctctttggctcatattaaaaaattaagatgtcttgaaatttcacacaattttagaaaattggaatccggaggatctttcctcttggctctttttaat

SEQ ID NO: 713404 - DNA, 666 bp, Homo sapiens
aaagtggatttaattctgtgttgaaatcctatatttcagttgagtgaagctgtcatatgcattatcatagcttgcagcttttctgcctaaacaagtttcaattgtttaaaagtctaatactgcagttcagagatgagcaatgtttacagagctgtgttcaaataatcaagaatatttaactgtgctctatctcctaatccatatgaccagcaacttctgagaaarcaatattcttatgtgtctgctgatgatttactgggcatgcaaaatacatagagatacacaaaagctatatctaaaggatgaggtctttccctacataataatgcactggaaataattttatatcaaaccataaataccaatagaaaaaaaaaagattttccttcatatgccagtggaatctactttaaactcaaaatttaagtgtctataaaatataatcttccctgccttacacttgctttgcatgagtgtaggtatgcatcagttattttcttgggagactgaaagagttaatgggcctgacattttaaacatgtgtgcctttaactttgagcagaatggagctctttggctcatattaaaaaattaagatgtcttgaaatttcacacaattttagaaaattggaatccggaggatctttcctcttggctctttttaat

SEQ ID NO: 713405 - DNA, 666 bp, Homo sapiens
aaagtggatttaattctgtgttgaaatcctatatttcagttgagtgaagctgtcatatgcattatcatagcttgcagcttttctgcctaaacaagtttcaattgtttaaaagtctaatactgcagttcagagatgagcaatgtttacagagctgtgttcaaataatcaagaatatttaactgtgctctatctcctaatccatatgaccagcaacttctgagaaagcaatattcttatgtgtctgctgatgatttactgggcatgcaaaatacatagagatacacaaaagctatatctaaaggatgaggtctttccctacataataatgcactggaaataattttayatcaaaccataaataccaatagaaaaaaaaaagattttccttcatatgccagtggaatctactttaaactcaaaatttaagtgtctataaaatataatcttccctgccttacacttgctttgcatgagtgtaggtatgcatcagttattttcttgggagactgaaagagttaatgggcctgacattttaaacatgtgtgcctttaactttgagcagaatggagctctttggctcatattaaaaaattaagatgtcttgaaatttcacacaattttagaaaattggaatccggaggatctttcctcttggctctttttaat

SEQ ID NO: 713406 - DNA, 654 bp, Homo sapiens
gatcacaccactgcactccagcctagacaacaagagtgaaacttcatttcaaaaacaacaacaacaacaacaaaaaaaaacactttattgtaaagctatatgtgaagcagatcattagaacagaataaagtgtaaagtaatagacccaagttttgaaaaacaatagatttttgacaaaatatgtccttaaagtggtgtagttatacaaccattaattgttgtaaaaatacataaatcaatatagcataaagttcattatattttaaatgaaactgcaaagtctaaagcacttgataactagttctatttcctaataggrtatacatatgtgtatactttttctagaggattcatacagacacacaaatgtacatacacaatagactggattgttcattttaggaacttcaaattgctattacctgcaatttgttttgcttttagtggactgcttctgtttattttattgaataaatacgtactctaatataagtaaaaacaaaacatttaattattatattaccaatattgatagtataatagtattttaaaaatatatatgtgggttgcatagagactggaagataaaatccaaatattagcaatgaaaggtgaagctacagataattattttgtcttacagatttttgtcat

SEQ ID NO: 713407 - DNA, 654 bp, Homo sapiens
gatcacaccactgcactccagcctagacaacaagagtgaaacttcatttcaaaaacaacaacaacaacaacaaaaaaaaacactttattgtaaagctatatgtgaagcagatcattagaacagaataaagtgtaaagtaatagacccaagttttgaaaaacaatagatttttgacaaaatatgtccttaaagtggtgtagttatacaaccattaattgttgtaaaaatacataaatcaatatagcataaagttcattatattttaaatgaaactgcaaagtctaaagcacttgataactagttctatttcctaataggatatacatatgtgtatactttttctagaggattcatacagacacacaaatgtacatacacaatagactggattgttcattttaggaacttcaaattgctattacctgcaatttgttttgcttttagtggactgcttctgtttattttattgaataaatacgtactctaatataagtaaaaacaaaacatttaattattatattaccawtattgatagtataatagtattttaaaaatatatatgtgggttgcatagagactggaagataaaatccaaatattagcaatgaaaggtgaagctacagataattattttgtcttacagatttttgtcat

SEQ ID NO: 713408 - DNA, 435 bp, Homo sapiens
taactttgcaaatgactaagcaacagaatatatattttgtagataaaactaaatttcatcaaatatttagagtgaaacataaatgtatttagacacttgcaaagatgttgatattttgttaaaattttcagtttttatccagatgtctggcagcacataatgaaaacaaaacactgtgtgaataaacataatctcaattacaccaaaatgctgtttttccactgatttccaattttctttctgagagaggacataatcatgggttgggtgattgtagggattaacaatcctggcttctaagaacagaatatgatcaggcattcattagtcacttcaatccctctgccatttgacaatgactaaattaggtgaatggttttaacagtttagtgcytattgctagagtcatgttgatacaactcaaaataaagataa

SEQ ID NO: 713409 - DNA, 1942 bp, Homo sapiens
ttagattaaatacccttggcttatattctaatctgttttattttggcacaatcatttagattcaagtttaatatgaaatattgattggtaataagatcatcataatgatggtaataatagctagcacttcatagcacacaccatacaccagacattattttccatgctttgactcatttaatcctcataaacctgaagaggtgaatattattattatacccattttacagatgaggacactgaagtactcacagtttacatgacctgctcaaggttacggggctagtaaatggtcagtgtttttcaacctggacttgtgatgtagtaattgtgctctgcaatcagtgaaaacaggctgccaatgttaaattatcctcgaatgtgctgtgttcctggctgaaacagtaacgaccgagtggaaggcacacaccccagtgacataacccctggggatgcagacatgctcagagcagagggcaagctggcaagtggccacatttacctgtgactagctaagtggacttacagatggtgtggcttagttttaccctcacagaatgagcaggcggcttacgaaaagatttgtacaaagagtctgggacttgaagatggtactaataatgcccagactagcaacaagaaaagcagccatggtccccctctgttcggccaaatcaataaacaaaaacaaagsaaatctaacccatcctccattgttaatgagagaccccaccttgagctcatcttacacatgaagatattagttaatgatagtaggaagtcattagaactaacaagacattttgcaactaagcatccagaacatgaatgcaaacctctatgaactgaaagcaaaaatatttttgtacaattagtaaataaaataatagcttaaaatattttatcactcacatatgatcatttaatttctctgtcatgtatgtctcacaacgcatttaaattattagcatgtatacctactttagcaaagagtaaacatgcatagagagaagtgctcagaaatctttcactgataggattatgcaatcaaaaaagtttggaatcaagcacagtgctagagtttagtctaccccgtggggctactctcaggtaaccatggtaacgctaatccgtggccaactgtctggcaaaagcttagcaactcaacagggagacagggaggagaaggtggacagagcccggcagacccgtgtccaccccgagtgcaccctggctcttcacatcatcgcagggctggccttgagcatctggaggcatcaggtcctcaggtggggtggctgtcactccacatcggtggaatgctttgtagctaaagaaatacgcataattatcaccatgagttgatcctattaacgtatcgaaagctaaatgagggactaataaattgtctgaggtcacagaattttcaacatgtaatcttcaaaaccaaatttacaaagcaagttctcatactttcaaaactaccaagaaaaaaaaaatgggttcttttatgagcaaatgaaatcccagaaatgtaacagaatttcatgtcagaacataatgatgttcagaaactgagaagcatatatttggataatattctatgtagagaaaatatgaaaagagaattcaagaagaaacttgaaatggccacacacatacaatatacgatattcgcccacatgtattttcctttctaaaatgcgtgattttgcaaggttgatacttttctttcgctttattcataatgagatgtgtaaaatagcagaatttccaagttatcactgcaaagaccttgaatcatactttatgtctctcaaaaattcggtcaggtggatgtttcctactaaggatttaaagctatttcactagctatgcattttgtattttataaatcattaacatgaacaaagtaagaaccaaaacagaaatacccatttca

SEQ ID NO: 713410 - DNA, 623 bp, Homo sapiens
cagcagacatgccttggaattattgatcatctgtcgtgggggtctctgagcagaagtatgtagttgagggttggctaactccttgtcttcctttcttcctgatacctcacctcctaatttgggagccatgttagtctgtttttgcattgctataaagaaatacttaagactgagtaatttataaagaaaagaggtttaatcggctcatggttctgcaggctgtacaggaagcatgatgccggcctctgtttggcttctgaggaggtctcaggtaagttacaatcatggcagaaggcaaagtgggagcaggcacatcacatggccagagcaggagcaagagagagagagagaggggaggtgccatgcactttaaaatgactggatcttatgagaacttacacactatcacgatgacagcaccaagaagatagtgytaatgattcgtgagaaatctcccccatgatccaattccctcccacctggccccacctccaacactggggattacatttcagcatgagatttgggcaaggacacagatccaaactatgtcaggagcgcagggtaccacacaaaatgccagaactgaatggaggccacagattctctggtttaccctgcac

SEQ ID NO: 713411 - DNA, 663 bp, Homo sapiens
ttgccttatgcagaagtctgaaatccaagtagtagtcaagacaggaccaccactggcaaagctggaactcacaagcaagtgccaaagctattatccacaggcaaccagggaaagatcataagaaagtagaacctccacagatgctctactaaagttgctgttcacaggcatatttcttctttcttctggggaagcctcagccctgctattaaagcctttcagtttcttgaatcagatctacccagattacccaggaaaatcatccccaaattaagtcactgactacatctttaggtaattataygtaggcttttattacacctgcaaaatattttcacagcaatacctagatttctgttttaataaatgtagaaagaatgagagaaatagaaaatcaccatcaaaacagcagcattataactgctggaggcaaaatccactatgaatggtaaaattaaagggtgaaagagtaagcacaaacaagatatttgcatagttccaaatgttcccccaatgtgtgtaataattacaaatggaaaaaataataagtttacagtggagaattctgacagacatcacctcagccaggtgatcaaggttaaaatcaccagcaatatgtatcaagagcatgtgtccggacatgatgcactaagcagggcacat

SEQ ID NO: 713412 - DNA, 659 bp, Homo sapiens
tgacgtacatacaggctagagtccaacaaaaatatgagacttcaggaaggagccagatgattgagacttacatattatcctgagctacagaaaggaatatgggtttggggcttgtttggggggatgggtgtagagacaaagtatgggaaggagagggagagagccttgtccttttatgccaggagtctcccaggtaatgaaagttgtcttggaatagctctcttcctggtacaatatctttactctgaaaatttctttataaatgtaaatttcctttmaaaaggggaaatttatattaaatactttaggcagttgacagggggtgatatggtttggctgtgtccccatccatatctcatcttgaattgtagttcccataatccccatgtgtcatgggagggacctggtgggaggtaattgaatcataaaggcagttaccaacatgctggtctcatgatagtgagtgagttttcatgagatctgatggtttttaaacgggcttttcccccttgggttggcacttctccttcctgccatcatgtgaggaaagtcatgtttacttccccttctggcacgattgtaagttttctgagtcctccacagccatgcagaaactgtgagtcatttaaacctctttttttacaagttacccagtctca

SEQ ID NO: 713413 - DNA, 1160 bp, Homo sapiens
gaaaatagattagtgttgcttagggctggggtggaagtgagaaaaatggaaaagggagattgactgttaaaagatccaaaattactttaagtgattttgaaatatcctaaaattttattgtgaacaatctgttatttaaaattttctaaaattttattgtgaataatcctgtgaatatacaaaaatatcttattgtgtagttgaaattgtgaattatacgataatttatatcatttatttccttctttactaaggtataactcctacatttttaattttcttgccatataatcttcatactaccaaaataattgtagctttttacacaattcatttctgttctgataccaacagttttctatttgatattctataatatatttccaaggaattaacccctaactaaaaattgattcaaaagcctacagaagaggcagcaaaaattttattttgctataaaatttgagaagttctggcctaggacaaaagcaatcctactatttcaattatctgtgagtaatgggagtacatgtgagctaggttcacaattctttgggataaggagaaagctttgaaacagtttaagtaactggaaaagtaccaggactcaaagcacttttacttgcattgcccatagaaaaatacaagaatagatcccataatcattttgttactgttgttcttctgttgctagtacaaccacacactgagtacaccaatgaattgagttataatataaaaatatttaatatggttcattttaacataagaaaacatctcatctacataatgttttgtttttgttaattggtgttaagctacttttctatcacagtactgaaacaactatttcagttgctcgtatgaccacttctgaagcaaaattctaycatcagcaaaaatgacataattttaaattatatgatatagcaaatattaataccaatctaactaatctgagacctgaaataaatagcagagggcaggggttaggagttaccagatactctcatagcactgattgtttcatagtattttaacagcattggtctataaaacattactaaactggtttctaggtcagcttcttacttttcgtgtaattaaaatataacgaataataaaagtattatgagaaatttcatacattgctcttggta

SEQ ID NO: 713414 - DNA, 851 bp, Homo sapiens
tttttatagagacagggttttgccatgttggcaagacaggtttsctcctgacctcgggtgactttgtctctgtgatccaatatattcaataatgtctataaaataataaacataagaaatatgtgttgaatgcacatgggtaaatttaaaggccatttcattttcaccaaacactctgattttcatataggaagagaatactattaacaatattaaacatttaacagattgttctgaatattacatgagataacatataaaattaacaacaaaatgttgttggttaaaattctgttttgtaaagctaggattcttactgtgaaactagtagccaagttgttaaaagataagttgggatgttagtcccagtgatagatttccactacatggttcatacactgaaggataaacaacacaattgctgggacaactctttaaagatacacatattcagttcccatcacagaactactgagttaaaatctcagaggtaagccttcatcatagtatttagtggaagtgggaaaaagaatctaatgtgcattttaggttgagagcaatgattatcaaaatttaatacacatcagacacaggatattgctaaaatcgatacccctgggccctcgacacagagattttgattctgtagacaggaggtgggcttcagtgatctacatttttaagaagtactatgagaaagtttcctaatagagctagtccaaagactgtgtttatgatattctgttgaacacaggtataaaggtcaagtaaaagtaataaagaggaatgaaattaaagcataattccaggaacaaactaatatgcagacaagttaatggcagcatggaaaa

SEQ ID NO: 713415 - DNA, 851 bp, Homo sapiens
tttttatagagacagggttttgccatgttggcaagacaggtttcctcctgacctcgggtgactttgtctctgtgatccaatatattcaataatgtctataaaataataaacataagaaatatgtgttgaatgcacatgggtaaatttaaaggccatttcattttcaccaaacactctgattttcatataggaagagaatactattaacaatattaaacatttaacagattgttctgaatattacatgagataacatataaaattaacaacaaaatgttgttggttaaaattctgttttgtaaagctaggattcttactgtgaaactagtagccaagttgttaaaagataagttgggatgttagtcccagtgatagatttccactacatggttcatacrctgaaggataaacaacacaattgctgggacaactctttaaagatacacatattcagttcccatcacagaactactgagttaaaatctcagaggtaagccttcatcatagtatttagtggaagtgggaaaaagaatctaatgtgcattttaggttgagagcaatgattatcaaaatttaatacacatcagacacaggatattgctaaaatcgatacccctgggccctcgacacagagattttgattctgtagacaggaggtgggcttcagtgatctacatttttaagaagtactatgagaaagtttcctaatagagctagtccaaagactgtgtttatgatattctgttgaacacaggtataaaggtcaagtaaaagtaataaagaggaatgaaattaaagcataattccaggaacaaactaatatgcagacaagttaatggcagcatggaaaa

SEQ ID NO: 713416 - DNA, 851 bp, Homo sapiens
tttttatagagacagggttttgccatgttggcaagacaggtttcctcctgacctcgggtgactttgtctctgtgatccaatatattcaataatgtctataaaataataaacataagaaatatgtgttgaatgcacatgggtaaatttaaaggccatttcattttcaccaaacactctgattttcatataggaagagaatactattaacaatattaaacatttaacagattgttctgaatattacatgagataacatataaaattaacaacaaaatgttgttggttaaaattctgttttgtaaagctaggattcttactgtgaaactagtagccaagttgttaaaagataagttgggatgttagtcccagtgatagatttccactacatggttcatacactgaaggataaacaacacaattgctrggacaactctttaaagatacacatattcagttcccatcacagaactactgagttaaaatctcagaggtaagccttcatcatagtatttagtggaagtgggaaaaagaatctaatgtgcattttaggttgagagcaatgattatcaaaatttaatacacatcagacacaggatattgctaaaatcgatacccctgggccctcgacacagagattttgattctgtagacaggaggtgggcttcagtgatctacatttttaagaagtactatgagaaagtttcctaatagagctagtccaaagactgtgtttatgatattctgttgaacacaggtataaaggtcaagtaaaagtaataaagaggaatgaaattaaagcataattccaggaacaaactaatatgcagacaagttaatggcagcatggaaaa

SEQ ID NO: 713417 - DNA, 1421 bp, Homo sapiens
tagaaggtgggattataggcacatgccaccacgcccagctcatttttgtacttttattagagatgaggatttcaccatgttggccaggctggtcttgaactcctgacctcagatgatccacctgcctcggcctcccaaagtgctgggattatasgcgtgagccactgcacccagccctctgtacagtattttagaccgaatgtctgaaaaggacgagagacttacctaaataccccaagtaaatatgaggttttagaggaagatcttttcagcaaaatggggtaactggactttgttctttcaaggaatcctttggtcctgggctttgagcagccagaagggagagggtgggggcacctagtaagctcaatacgcgggttctaatcagcagtggagaacaaaagcgggaagggcagagagcaagacaggaggaatactcaccagcttcacacctcaccaccaagagcaggtccagctctgggccagctggcaatcacggaaaaaagaaggccacgcccagctccacgcccacgtggcgatagttcctggggagcgctgagccagtgatgttgctgctgctcattggctgcaaccggctctgaaccaccagccccagggaacaggcacttttctgcacctgtgtgcaccacttacaggtgctgctgctggcaagaggctgcctttaccaccacacacctgtgctgagggcgcccggatgctcacagccttcagctggctgtcctgaagcaattagtgtgtgtgtgtgtgtgtgtgtgtgtatgtgtgtgtgtgtgtgtgtatgtgagagagtgtgtgtgtgagagagagagtgcatgtgtgtgtgagagagagaatgtgtgagacagagacagtgtgtatgtgtgtgagagaatgtgtgtgagactgtgtgagtgggtgtgagacaatgtgtgtgagacagagagtgtgtgtgtgtgagagactgtgtatgatagagtgtgtgtgtgagtgtgtgtgtgtgttgggtgcccttattttacataatctggaagttgcacttggcattttttaattttttgtgtattgacaaattataattgtatattttcctggggtccggtgtgatcttctatgtatacaatgtcaaatgattaaatcaagctaacaaacacatccattgccttgaatacttatttttttgtggtgagaacacttgaaatgtactctcttagtaatcttgaaacagaagtttatacttttgataaagtcccatgtatttatttttagttttttttgatgtggagtcttgctctgtgacccaggctggagtactcagtgcaaactccacctcctgggttcaaagaattctcctgcctcagcctcctgagaagctgggactacaggtgtgtaccaccatgcccggctaattttcaaatttttaa

SEQ ID NO: 713418 - DNA, 1421 bp, Homo sapiens
tagaaggtgggattataggcacatgccaccacgcccagctcatttttgtacttttattagagatgaggatttcaccatgttggccaggctggtcttgaactcctgacctcagatgatccacctgcctcggcctcccaaagtgctgggattatacgcgtgagccactgcacccagccctctgtacagtattttagaccgaatgtctgaaaaggacgagakacttacctaaataccccaagtaaatatgaggttttagaggaagatcttttcagcaaaatggggtaactggactttgttctttcaaggaatcctttggtcctgggctttgagcagccagaagggagagggtgggggcacctagtaagctcaatacgcgggttctaatcagcagtggagaacaaaagcgggaagggcagagagcaagacaggaggaatactcaccagcttcacacctcaccaccaagagcaggtccagctctgggccagctggcaatcacggaaaaaagaaggccacgcccagctccacgcccacgtggcgatagttcctggggagcgctgagccagtgatgttgctgctgctcattggctgcaaccggctctgaaccaccagccccagggaacaggcacttttctgcacctgtgtgcaccacttacaggtgctgctgctggcaagaggctgcctttaccaccacacacctgtgctgagggcgcccggatgctcacagccttcagctggctgtcctgaagcaattagtgtgtgtgtgtgtgtgtgtgtgtgtatgtgtgtgtgtgtgtgtgtatgtgagagagtgtgtgtgtgagagagagagtgcatgtgtgtgtgagagagagaatgtgtgagacagagacagtgtgtatgtgtgtgagagaatgtgtgtgagactgtgtgagtgggtgtgagacaatgtgtgtgagacagagagtgtgtgtgtgtgagagactgtgtatgatagagtgtgtgtgtgagtgtgtgtgtgtgttgggtgcccttattttacataatctggaagttgcacttggcattttttaattttttgtgtattgacaaattataattgtatattttcctggggtccggtgtgatcttctatgtatacaatgtcaaatgattaaatcaagctaacaaacacatccattgccttgaatacttatttttttgtggtgagaacacttgaaatgtactctcttagtaatcttgaaacagaagtttatacttttgataaagtcccatgtatttatttttagttttttttgatgtggagtcttgctctgtgacccaggctggagtactcagtgcaaactccacctcctgggttcaaagaattctcctgcctcagcctcctgagaagctgggactacaggtgtgtaccaccatgcccggctaattttcaaatttttaa

SEQ ID NO: 713419 - DNA, 1421 bp, Homo sapiens
tagaaggtgggattataggcacatgccaccacgcccagctcatttttgtacttttattagagatgaggatttcaccatgttggccaggctggtcttgaactcctgacctcagatgatccacctgcctcggcctcccaaagtgctgggattatacgcgtgagccactgcacccagccctctgtacagtattttagaccgaatgtctgaaaaggacgagagacttacctaaataccccaagtaaatatgaggttttagaggaagatcttttcagcaaaatggggtaactggactttgttctttcaaggaatcctttggtcctgggctttgagcagccagaagggagagggtgggggcacctagtaagctcaatacgcgggttctaatcagcagtggagaacaaaagcgggaagggcagagagcaagacaggaggaatactcaccagcttcacacctcaccwccaagagcaggtccagctctgggccagctggcaatcacggaaaaaagaaggccacgcccagctccacgcccacgtggcgatagttcctggggagcgctgagccagtgatgttgctgctgctcattggctgcaaccggctctgaaccaccagccccagggaacaggcacttttctgcacctgtgtgcaccacttacaggtgctgctgctggcaagaggctgcctttaccaccacacacctgtgctgagggcgcccggatgctcacagccttcagctggctgtcctgaagcaattagtgtgtgtgtgtgtgtgtgtgtgtgtatgtgtgtgtgtgtgtgtgtatgtgagagagtgtgtgtgtgagagagagagtgcatgtgtgtgtgagagagagaatgtgtgagacagagacagtgtgtatgtgtgtgagagaatgtgtgtgagactgtgtgagtgggtgtgagacaatgtgtgtgagacagagagtgtgtgtgtgtgagagactgtgtatgatagagtgtgtgtgtgagtgtgtgtgtgtgttgggtgcccttattttacataatctggaagttgcacttggcattttttaattttttgtgtattgacaaattataattgtatattttcctggggtccggtgtgatcttctatgtatacaatgtcaaatgattaaatcaagctaacaaacacatccattgccttgaatacttatttttttgtggtgagaacacttgaaatgtactctcttagtaatcttgaaacagaagtttatacttttgataaagtcccatgtatttatttttagttttttttgatgtggagtcttgctctgtgacccaggctggagtactcagtgcaaactccacctcctgggttcaaagaattctcctgcctcagcctcctgagaagctgggactacaggtgtgtaccaccatgcccggctaattttcaaatttttaa

SEQ ID NO: 713420 - DNA, 239 bp, Homo sapiens
catgcgtgtttcttctgagactggtggctgcagctggacttcttcctcatgaccacattgccgttaagatcaaactttgtctgtgattagttatcaagaaaaatatacggttttgacaatatgacttagcaacttgaaaatcttggctgggtgcagtgtctcatgccygtaatcccagcactttgggaggccgaggcgggtggatcacaaggtcaagagctcgagaccatcctggtcaa

SEQ ID NO: 713421 - DNA, 239 bp, Homo sapiens
catgcgtgtttcttctgagactggtggctgcagctggacttcttcctcatgaccacattgccgttaagatcaaactttgtctgtgattagttatcaagaaaaatatacggttttgacaatatgacttagcaacttgaaaatcttggctgggtgcagtgtctcatgcctgtaatcccagcactttgggaggccgagrcgggtggatcacaaggtcaagagctcgagaccatcctggtcaa

SEQ ID NO: 713422 - DNA, 595 bp, Homo sapiens
ttttgaacaagttgatgtttcttcattttccctattaaatattccccaatttaacatacagttcaatgtgaaactctgcaatatcatcattcaaccaatttatataacatttcatgtgttacagagcattttcacaaatattccttaatttgacccttgccacaaacctctcaggcaaatatctccttgtgttttgtttgcttatttcaaaaaaactggggaaacaaatgacttgcctaaagttactcsgtgaataaaggtgagattgcaattctgctggctcctggcacattgatgcttcaaaactctcactaagctctataatatcacatggctcagagatgctacatccagtattgctcttccaaacttatgcatgagcatgtagtaataagaatggcctatatggataataacaggaatcaaacgtactggctcatgcttagaaaagaggccattagaaatttgtgatgagtataaattagaaaggcaaagcaacataactcattgtagaggtccttgactcatatataaggagcaaagctattcattggtttaaacatttgtacttgaaaattactgtggtggacaggtt

SEQ ID NO: 713423 - DNA, 970 bp, Homo sapiens
tttaaaaatttctatcctctcaccactacttaaccatcaccaattttgctaaaagcaatgggggtttaaaaatactatccctaaaagatagttcctgccttaaaaggtgttgcatttatacttccattataatcttcattcctttctttttacaggagcaattagaccagtaatagtacgatgcaagctttattttaaatggcttccggaagaaaagagacaaaagcactggtaactcctgaaacagttttctgtacacagtcttctagctccctatggcaggcaggagtggacacggaggttttgcagagctctgataagctcttgtttattttaaattccatttattattctacggcagtgtctgtccaaaagaattacctggagagcttttgtaaaaatgctttctaaaccccactcctggagattctggggtagagccctggaatgtgtatttaacaagctcccaaatgagtctgttacaggatcaagcttgggaatcacaattctaatacataagaggtagtagaacagggacaatgtgttgttcagacaatcagcaaacatcactatcttctctgagttccatgttggaatataggctgccactgtggtaggcaggaaagaggcacagaaaacaaacaggagggaggatttatcctctagagaaagtttaaacctggacatgtcccttgcaccaaggtctgtctggstggtctgaaattgcacactgttaggaggtgtggtggatatcctgggataaatgggcactatggcagttctacctaagtctggcctgtaaagtggatgagtttttctgctgtgaatttgcttattctctgtctgtgttgtgggcaaatttgcattgtgtttgcagtgggcgttggggacttgagtggattcctattgaaaagtaacaatgtttctttttatgagaaccgttcatgtaaaagaatttcaaaactaagta

SEQ ID NO: 713424 - DNA, 652 bp, Homo sapiens
aatggtcagactagtttacactcccaccaacagtgtaaaagtgttcctatttcttcacatcctctccagcacctgttgtttcctgactttttaatgatcgccattctaactggtgtgagatggtatctcattgtggttttgatttgcatttctctgatggccagtgatgawgagcattttttcatgtgtctgttggctgcataaatgtcttcttttgagaagtgtctgttcatatccttccaggcatgagattttaaaaacatgttttcaggtgattctaacgagtggccagggttgagactattgcattaagaggataaaaaagtatttttggaaagaggtttctgaccttttcaagcaggtggaggaatttagaatccttttcccagggagaatgtttcaaatgtagaagagtacaaaaaagacaatggtcattcttacatcctctgttcaaagttaacctttgttagcatctttattctttcttagctgtcagaattgcaaacaacaaaatcatacaaaacccacatcttatagttcctaaagttaaccttaaaaaacatttcctaggagagcaaaagacatcatttttttcatctccaaaaatgcattataactcaccctagttaacaaatagtctggcatattccaa

SEQ ID NO: 713425 - DNA, 652 bp, Homo sapiens
aatggtcagactagtttacactcccaccaacagtgtaaaagtgttcctatttcttcacatcctctccagcacctgttgtttcctgactttttaatgatcgccattctaactggtgtgagatggtatctcattgtggttttgatttgcatttctctgatggccagtgatgaagagcattttttcatgtgtctgttggctgcataaatgtcttcttttgagaagtgtctgttcatatccttccaggcatgagattttaaaaacatgttttcaggtgattctaacgagtggccagggttgaractattgcattaagaggataaaaaagtatttttggaaagaggtttctgaccttttcaagcaggtggaggaatttagaatccttttcccagggagaatgtttcaaatgtagaagagtacaaaaaagacaatggtcattcttacatcctctgttcaaagttaacctttgttagcatctttattctttcttagctgtcagaattgcaaacaacaaaatcatacaaaacccacatcttatagttcctaaagttaaccttaaaaaacatttcctaggagagcaaaagacatcatttttttcatctccaaaaatgcattataactcaccctagttaacaaatagtctggcatattccaa

SEQ ID NO: 713426 - DNA, 617 bp, Homo sapiens
cccagttttaatttatctttcaatttgtttatggcgtcttttgatgaacaaagtctttaatcttaatatagctgaatttatcaatattttcttgtatagttactactttttgtgtttttaagaaatctttccctagcaaaggcctaaawgataaaacctatatgttctactgtttgttttaaaggtttttgggggacaattttatccttatttcatctgtagttaatttttgtatggagtgtgaggtaaagatccaatttccttttattccatgagaataaccattttctccgactcattttttgaacagtctctcctttccccatgtatggatatgttcctgagatttccattctagtccattagtgaatttgtctttccctttactgtagctccataatgatacacagcagagcaatctccccatcctgttcctcttgggaagggttctcactattcttgtctcttggttttccttactaattttagaatttacttatcaagtttatttagagaaactcgtatgggactatgtacttatattactgtgaatccattgatcattcgtggagaattggcatttttatgaaatcatgtctctctatccacaaacatga

SEQ ID NO: 713427 - DNA, 617 bp, Homo sapiens
cccagttttaatttatctttcaatttgtttatggcgtcttttgatgaacaaagtctttaatcttaatatagctgaatttatcaatattttcttgtatagttactactttttgtgtttttaagaaatctttccctagcaaaggcctaaaagataaaacctatatgttctactgtttgttttaaaggtttttgggggacaattttatccttatttcatctgtagttaatktttgtatggagtgtgaggtaaagatccaatttccttttattccatgagaataaccattttctccgactcattttttgaacagtctctcctttccccatgtatggatatgttcctgagatttccattctagtccattagtgaatttgtctttccctttactgtagctccataatgatacacagcagagcaatctccccatcctgttcctcttgggaagggttctcactattcttgtctcttggttttccttactaattttagaatttacttatcaagtttatttagagaaactcgtatgggactatgtacttatattactgtgaatccattgatcattcgtggagaattggcatttttatgaaatcatgtctctctatccacaaacatga

SEQ ID NO: 713428 - DNA, 645 bp, Homo sapiens
cagtgaaatacaaagaaaggtttacgtgaaactcctgggaaataatttttctcacycttaattaaaaacaaccagaaaaaagttttcacttcctctgaaaatcatgaaatgaaactgtgaggcttaaagtaactagtccttttgcttccaaaagaagccagcctgaagatgaagccaatacacagaggaggctacagctgagcaaactgaagagaaccagccaaagccactggattaaatcagactgaagcctgtcccctctgaatgttcgagcatgggagttaataatatttatttgtttatttaagctagtttaattttgttttctgttacttacagacctaactcacatatacctaaaatcagactgcctctagtgattttataccactctatccttccaacaaacatccatacaaaacactcactctcttggtaccaatgtaacattccatattcatgttgagaggaaacgtcaataacttttctctgggatttgtgcccgtcggtctgtattttcatttgtagaagtgttcttaacagccttccttccctatttgtcttcatgattaatcccaggctttctcaaagtttgttcctgagtgccatgttgtaacagattgggggaaggaagctcatcacaag

SEQ ID NO: 713429 - DNA, 645 bp, Homo sapiens
cagtgaaatacaaagaaaggtttacgtgaaactcctgggaaataatttttctcacccttaattaaaaacaaccagaaaaaagttttcacttcctctgaaaatcatgaaatgaaactgtgaggcttaaagtaactagtccttttgcttccaaaagaagccagcctgaagatgaagccaatacacagaggaggctacagctgagcaaactgaaragaaccagccaaagccactggattaaatcagactgaagcctgtcccctctgaatgttcgagcatgggagttaataatatttatttgtttatttaagctagtttaattttgttttctgttacttacagacctaactcacatatacctaaaatcagactgcctctagtgattttataccactctatccttccaacaaacatccatacaaaacactcactctcttggtaccaatgtaacattccatattcatgttgagaggaaacgtcaataacttttctctgggatttgtgcccgtcggtctgtattttcatttgtagaagtgttcttaacagccttccttccctatttgtcttcatgattaatcccaggctttctcaaagtttgttcctgagtgccatgttgtaacagattgggggaaggaagctcatcacaag

SEQ ID NO: 713430 - DNA, 710 bp, Homo sapiens
cgcaggcacacaccgccacgccaggataattttttgtatttttggtagacatgaggtttcaccatgttgcccaggctggtctcaaactcctgagctcaagggatccrcctgcctcagcctcccaaagtgctgggattacaaacatgagccactgcaccgagcccagcccaaatacatctttcttatatcacaatgtcacccctttgtgatccctttaatagttaactacctcttacagttaagaacactttatattacaagttgctattcaaattgccggtgtggtttttgtttcctgactgggccctgactaatgcgctgaagcaagtacaaggaaggaagtaatgaagataacagagaaactcaaggaaatggacaccagaaaaggggagtccaatgctggttctttaaaaagatctagattgataacctcctagccaggctgctgatgagagggagatggcgaacataaagtcacaataaaaggaatgaagtgttttccttacggatcctaccgacattacagtgacaaggaacacaggcacacctcatttcattgtgcttcacagatactgcactttttacaaattgaaggttcgtggcagccctgcatcaagtaagtctgctggcaccatttttccaacaacatgttaacactgtgtctctgtgtaggagtttgatgattcttgaaatagttcaaactttttcat

SEQ ID NO: 713431 - DNA, 710 bp, Homo sapiens
cgcaggcacacaccgccacgccaggataattttttgtatttttggtagacatgaggtttcaccatgttgcccaggctggtctcaaactcctgagctcaagggatccgcctgcctcagcctcccaaagtgctgggattacaaacatgagccactgcaccgagcccagcccaaatacatctttcttatatcacaatgtcacccctttgtgatccctttaatagttaactacctcttacagttaagaacactttatattacaagttgctattcaaattgccggtgtggtttttgtttcctgactgggccctgactaatgcgctgaagcaagtacaaggaaggaagtaatgaagataacagagaaactcaaggaaatggacaccagaaaaggggagtccaatgctggttctttaaaaagatctagattgataacctcctagccaggctgckgatgagagggagatggcgaacataaagtcacaataaaaggaatgaagtgttttccttacggatcctaccgacattacagtgacaaggaacacaggcacacctcatttcattgtgcttcacagatactgcactttttacaaattgaaggttcgtggcagccctgcatcaagtaagtctgctggcaccatttttccaacaacatgttaacactgtgtctctgtgtaggagtttgatgattcttgaaatagttcaaactttttcat

SEQ ID NO: 713432 - DNA, 710 bp, Homo sapiens
cgcaggcacacaccgccacgccaggataattttttgtatttttggtagacatgaggtttcaccatgttgcccaggctggtctcaaactcctgagctcaagggatccgcctgcctcagcctcccaaagtgctgggattacaaacatgagccactgcaccgagcccagcccaaatacatctttcttatatcacaatgtcacccctttgtgatccctttaatagttaactacctcttacagttaagaacactttatattacaagttgctattcaaattgccggtgtggtttttgtttcctgactgggccctgactaatgcgctgaagcaagtacaaggaaggaagtaatgaagataacagagaaactcaaggaaatggacaccagaaaaggggagtccaatgctggttctttaaaaagatctagattgataacctcctagccaggctgctgatgagagggagatggcgaacataaagtcacaataaaaggaatgaagtgttttccttacggatcctaccgacattacartgacaaggaacacaggcacacctcatttcattgtgcttcacagatactgcactttttacaaattgaaggttcgtggcagccctgcatcaagtaagtctgctggcaccatttttccaacaacatgttaacactgtgtctctgtgtaggagtttgatgattcttgaaatagttcaaactttttcat

SEQ ID NO: 713433 - DNA, 1291 bp, Homo sapiens
tgggaatgtgcagacaggaggagctagatgattgcggaggcttacattttgagtgtgagtttggatgaccagaatataaggcatgaagggattagcaggcttcaaggtttccagataattagtcctagcagcctcccaatgcatacaagatggggaggaaaggaacttaggctagtgtggccggagagagctatggacagragtgattgagtttccaagaaatcccaggacaagtgagtgggctgtcattggaattggttccaggactgtgaccacatgttggagacagctagtctcttgcgggacatatactgtgtctggttttcctatagcagaggacacctgcagtgtgacttaattgtgctggagttaagaacaacattctgtcctcaagtggaagccacagatcccttagtcctgagggggagcagagatgtatttaattggcagataaggattggaatcagtgagttctcagcttagtatgctgtgggtcatacaggcatagtgttgagaagcatactggtacttagttgacacttatttaataatcaggctttaattagttatttataaatggagcgatgtgcattgctctttagattttacagtagggtggtaggataggcttaagcagtgtctcacctaggttctcaagttcttctttgaggtaaaaaaaatcaaatcaaagggtcatgaggattgcagtttgtggtagagcttgagcatagggaagaagaattagtgagcagaggggtattagaagaatgactatgtgacaaaatagctaaggatacaggaaatatgatggagcttgacttgcaggtggatatagtctctctgtgttctagctctctaacacaatgctttgcataggtcaggctaatatctaaccatgtttgttggtgagtcttttgttgctcagattagcagttttctctactaaaactacaaaaattagctgggcatagtggtgggcacctgtaattccagctactccagaggtgaggcaggagaatcgcttgaacccgggaggcggaggttgcagtgagtagatctcaccctgcactctagctgggtgcagagtgagctctgtctcaaacaaacaaacaaaaaaacagatttataaaatcttaattaaataataatgtttggtgacctacaaaagaaaaaagtcagaaaaacattcttcatccaaaatggtacctcaatactcacagtgagggtgagagtagaatctaagtgatgggaataactttaatgtaaatggtgagagttacatgtattgagg

SEQ ID NO: 713434 - DNA, 1291 bp, Homo sapiens
tgggaatgtgcagacaggaggagctagatgattgcggaggcttacattttgagtgtgagtttggatgaccagaatataaggcatgaagggattagcaggcttcaaggtttccagataattagtcctagcagcctcccaatgcatacaagatggggaggaaaggaacttaggctagtgtggccggagagagctatggacagaagtgattgagtttccaagaaatcccaggacaagtgagtgggctgtcattggaattggttccaggactgtgaccacatgttggagacagctagtctcttgcgggacatatactgtgtctggttttcctatagcagaggacacctgcagtgtgacttaattgtgctrgagttaagaacaacattctgtcctcaagtggaagccacagatcccttagtcctgagggggagcagagatgtatttaattggcagataaggattggaatcagtgagttctcagcttagtatgctgtgggtcatacaggcatagtgttgagaagcatactggtacttagttgacacttatttaataatcaggctttaattagttatttataaatggagcgatgtgcattgctctttagattttacagtagggtggtaggataggcttaagcagtgtctcacctaggttctcaagttcttctttgaggtaaaaaaaatcaaatcaaagggtcatgaggattgcagtttgtggtagagcttgagcatagggaagaagaattagtgagcagaggggtattagaagaatgactatgtgacaaaatagctaaggatacaggaaatatgatggagcttgacttgcaggtggatatagtctctctgtgttctagctctctaacacaatgctttgcataggtcaggctaatatctaaccatgtttgttggtgagtcttttgttgctcagattagcagttttctctactaaaactacaaaaattagctgggcatagtggtgggcacctgtaattccagctactccagaggtgaggcaggagaatcgcttgaacccgggaggcggaggttgcagtgagtagatctcaccctgcactctagctgggtgcagagtgagctctgtctcaaacaaacaaacaaaaaaacagatttataaaatcttaattaaataataatgtttggtgacctacaaaagaaaaaagtcagaaaaacattcttcatccaaaatggtacctcaatactcacagtgagggtgagagtagaatctaagtgatgggaataactttaatgtaaatggtgagagttacatgtattgagg

SEQ ID NO: 713435 - DNA, 2323 bp, Homo sapiens
gttcacacatttagaatgaccttttatgcctttccaactatggcatcttctattattatatgatttgggttgaaatgttcaccaatacatagtgcttgaaatgcatattaaaaaagtatgaacaagggagaatagaagttgatacagaagcagtaatacacagtgttctcaaacaatccacctaagttgccatttctagtttcatgtctcataatccaaaatcctggggagctgccactgaatcatttcttctcctaatcataaatacctagacccaatacaccagggaataccaggatcttgaaaaaaatgaaagaatggaataaaaaatcagcctcaggaaagcagcctaaatatatttgaagatgacagattggtaggtaggtaggtaggtagataggtagatagatacctagatagatagatagatagatagatagatagatagatagatagatagatagwtgatagatattccaagactataaaactatgaaccaatttttaaaatcatataatcttctagtattatgctgagctgagatcacctgcttatacaaaattcaagacacattcaaagagatctttcagtgataattttttaatcagaaggaaaaagttttagatgctacttgagaaaaggacaaagtataggtggagtttctcttttttgccagttgttattacttaattacactatctttctggccataaaatgaacaaaaggattcattcacttgtctcgttaggtattaagcatcagttgtcgattcattcatttcacacatttcactagtgacactgaatactgcagagcctaagatgaaaggggaagcaattcacaggccgatgagaagatgcacgattgccattcaggtactgagggctgcaacagaggaagggtggtgagagcactaatgaattcttgctattttctgatcattgtctcatcctaataacagctccctggaaaaggtactattaatccctaaagaaactaaaattcagaaagattaaatgactttcccaaaatcacaaaaccaatatgcaatagagccataaatccaattcaggcctgtctcatatcacaattattttctatctgctacaccaagtggcatccttgagttttgcaagatgccctcagtgccaaggcatgagtccttaccagggaaactttctttctttctttcttttttttttttttgatggagtctcactctatagcccaaggtggagtgctgtggtgcaatcttggctcactgcaacctctgcctaccaggctcaagtaattctcctgcctcagcctctggagcagctggaattacaggcatgtgccaccatacctggtgagttttttgtattttagtaaagacggggtttcaccatggtgcccagggcagtcttgaactcctgagctcaggcaatccacccgcctcagtctcccaaagtgctgagattcagagaaattttcatggagaggggacagatggagtcatttcttgtggggtgaacatgagtaccatgggtagactgaggttgggaaagattttccagacaattggaagagcatgtgaaagacacagattttgagaaatgtcaagtctagggaactgcaagccttttggcacaagaaagccactgtggactgtagaggcaggatgcctagactcaaatcccaatggctacacttctaagctttgcaattttggcaagtttttaccctctttttttatctataaaatatagattttatatatatagatatagatatatagatagataataatagtacctgcctaataaagttgtcaaagattaaatgttatatgtgaagtattttgtacagtgataggaacccaggaagggctctatgaatattatatattattattattctaaagtagccagaatacaattgtcaaaggagatagtggccggagataagtttgaattgaaagactgaggccagaacataaagtgcctcctatattatattttatataattggaacatcattgaaagatttaagtattatttatgtgtgtatgtgtgttttatataattaattctagttcatcattttaaaatatctttctggtgtcactgtgaacaacagatgagaagaagtgaatcctgagttaaggagaccagctctctgattactgcaataatccagggagggtaccataaggatttcaactggaaatgagtccatcatgatggagaggaaggacagggctgaaaaatacttaggaagtagtatcagtaggacttggttaagagagagcagaggcaggctacaggggttggaggtgtcaat

SEQ ID NO: 713436 - DNA, 2323 bp, Homo sapiens
gttcacacatttagaatgaccttttatgcctttccaactatggcatcttctattattatatgatttgggttgaaatgttcaccaatacatagtgcttgaaatgcatattaaaaaagtatgaacaagggagaatagaagttgatacagaagcagtaatacacagtgttctcaaacaatccacctaagttgccatttctagtttcatgtctcataatccaaaatcctggggagctgccactgaatcatttcttctcctaatcataaatacctagacccaatacaccagggaataccaggatcttgaaaaaaatgaaagaatggaataaaaaatcagcctcaggaaagcagcctaaatatatttgaagatgacagattggtaggtaggtaggtaggtagataggtagatagatacctagatagatagatagatagatagatagatagatagatagatagatagatagawgatagatattccaagactataaaactatgaaccaatttttaaaatcatataatcttctagtattatgctgagctgagatcacctgcttatacaaaattcaagacacattcaaagagatctttcagtgataattttttaatcagaaggaaaaagttttagatgctacttgagaaaaggacaaagtataggtggagtttctcttttttgccagttgttattacttaattacactatctttctggccataaaatgaacaaaaggattcattcacttgtctcgttaggtattaagcatcagttgtcgattcattcatttcacacatttcactagtgacactgaatactgcagagcctaagatgaaaggggaagcaattcacaggccgatgagaagatgcacgattgccattcaggtactgagggctgcaacagaggaagggtggtgagagcactaatgaattcttgctattttctgatcattgtctcatcctaataacagctccctggaaaaggtactattaatccctaaagaaactaaaattcagaaagattaaatgactttcccaaaatcacaaaaccaatatgcaatagagccataaatccaattcaggcctgtctcatatcacaattattttctatctgctacaccaagtggcatccttgagttttgcaagatgccctcagtgccaaggcatgagtccttaccagggaaactttctttctttctttcttttttttttttttgatggagtctcactctatagcccaaggtggagtgctgtggtgcaatcttggctcactgcaacctctgcctaccaggctcaagtaattctcctgcctcagcctctggagcagctggaattacaggcatgtgccaccatacctggtgagttttttgtattttagtaaagacggggtttcaccatggtgcccagggcagtcttgaactcctgagctcaggcaatccacccgcctcagtctcccaaagtgctgagattcagagaaattttcatggagaggggacagatggagtcatttcttgtggggtgaacatgagtaccatgggtagactgaggttgggaaagattttccagacaattggaagagcatgtgaaagacacagattttgagaaatgtcaagtctagggaactgcaagccttttggcacaagaaagccactgtggactgtagaggcaggatgcctagactcaaatcccaatggctacacttctaagctttgcaattttggcaagtttttaccctctttttttatctataaaatatagattttatatatatagatatagatatatagatagataataatagtacctgcctaataaagttgtcaaagattaaatgttatatgtgaagtattttgtacagtgataggaacccaggaagggctctatgaatattatatattattattattctaaagtagccagaatacaattgtcaaaggagatagtggccggagataagtttgaattgaaagactgaggccagaacataaagtgcctcctatattatattttatataattggaacatcattgaaagatttaagtattatttatgtgtgtatgtgtgttttatataattaattctagttcatcattttaaaatatctttctggtgtcactgtgaacaacagatgagaagaagtgaatcctgagttaaggagaccagctctctgattactgcaataatccagggagggtaccataaggatttcaactggaaatgagtccatcatgatggagaggaaggacagggctgaaaaatacttaggaagtagtatcagtaggacttggttaagagagagcagaggcaggctacaggggttggaggtgtcaat

SEQ ID NO: 713437 - DNA, 1471 bp, Homo sapiens
gagcaaaggagccatcattccagaggtggtgacccttggtgggtgaagcaggtaccaccagcccctgtgaatctcaacyacctggcaggagggggcacgccatgtccctattgtatctccttataggacctcagagctgtgataaccaatcctatctacccccagccaaggcatcaccctaccccctcccattcaaagagaaagcccactttctcagagctgggtgcgccagccccgggaggcagtggctgtgagttctgctatgcacatctctacattttctaatcatcagtttcagccacttaagctgaggcaattaacatgtttagagacagccaccgtgggcctgaatcatccattatttctccatctccatctccaattccaatgacaaatctctgactgattacagtttggatttcaggtcccactcttaatcaccactgcttcttctctctttggggcttgatttattgtggaggctgcaaccttccaagcagggaggattcatcactgtctccacgtagaggaaaactgcttaatgcaggccagctagtcacggaggtctccagccttttggaggttgggaaaaaagctgaagaatttattctgccatttcaggtggcttctctagatgacctcttatgcctagaacactgaacaggatccttacaagtagaagaggctcctccaattaatccagagacttttaggagtgacagtgaccttttgatacacacactgatccttgcctacttcaccagctgcttcttgtcacaatgatgtggaagaggtaaggaacctcttccttctagaccaaatggaaatcagccaggccatttgcatgaggcctgcaccatagccattatggctgcctccactcacacccagcactcagccttctggaaggtggtaaggtctcattttccagctctcaggggttggggctgctgatgggctgtgggcagaagtgatgtggagagaaggccagaccacttaacggctgatacaaaattctccagagtctcttttccttttcctctgacaaagcaaaaagcatttaggatggtgggtactccatcatcctgaagccacaagtaaggaaagaggcccccaggcaactcatgatggactagagtgtgagcagtaaagaaacttgtgttgttttaagctgccaagagttgagtgttgttgttgttgttgttgttttgccatagcatgatttaacctatctcatatgataccatcagcaagccccagactgagtaatcaatgggaaaagcaaagttgtgctcttcactgtttatcctcccccaaccatccactcagcccttccttaacaagccatcgaggccggcaggacacagctccctgtcaccggacatgctcgggcaggggctgaataaccaccaggcaggcataatgctcattcatttgtgtgggcagtcagaccaggcgttccctcccaact

SEQ ID NO: 713438 - DNA, 606 bp, Homo sapiens
ttactcagcacggggcagatgataatgagcctcgacatcagccccacctgcctagagctcgatgggaatttagcacagctgagagctccgccctcctctccaacctgtcccacccacggtgcccacccagcccagagcaaagggaaggaagcccaactctgcttaacaaagagggttctaagtccccagggccacacctccccacttccactgcctgctacagccacgtttcccaggtgaggctctgctgccaggtctcttatgtaacaagaacctgatgtttccagaggagggagctgacctcatgcaccrctatgctccttaacagagtgaacctggtgtaagcctgagtcttcagcagcaccattaacttccaaagaaccttttccaagaaaaaaaaaaaaaaaagatgactatcctacttaacacttattaagtggtgttaattacctgttacactcagcagcttggaaaaattttgccctaacaaacaaaagagggtgaattgaatgagaatgggaagttctggcattcgcaaaagaaacacgagctgtcatcatcatcatcatcaattaatatttactgagtgcacatacaggggaatgg

SEQ ID NO: 713439 - DNA, 1421 bp, Homo sapiens
  misc_feature 286: n = A,T,C or G
catctgaggaggtgaccttgagtaggttcttgagtgatgaaggcactgccatgcaaatatctgaggaggagctccccagtcaggggctacagcatgcgctaagcctttgaggtgggaacagacatgctgggtttgaggaacaacgaaggatcaagtgtggctggagtggagtgagcaggggagtgagtggcgggttgtagggcccaggggcacagaggccagatcatgtggggccttagagaccatcgtaaggagtttggatttcattctaggaggagtgggaagncattggagggttaagccaaaaagagacatgatctaatttatgtttcaaaaagatcactttgcctactggtgaaaaatagcttagggtggagtgaaagtgaggggaccagttaggaggagacgggtggctctggtgggaggaggcagggacgggggatgagaggaggaggaagaggtgacacttcaggagaaaggggcagttccttcctcctgtgtgaagcctgttctttgatgtgggagcagagggttttcctgggactcgtggcagtttgtcatagtgattctcaagactcagagatggccccaggtgtttccaccattctgcagcgggatccctctccatgtgtgcctgccaggtcgcgtgtctgctctggtttccccactacctgtagctcacaggctgtggcttttgacccctttgcctactcaccagtgtgtgagtgctggctgcggcatggtccagtgttcagctgtcggtctctcccatcagcctgggggtgcctggaacattgtcaccaggctcattgaactcatcctggcacctccagtgcctgccacagtgtttgacacctcatagtaggctcttgatgcgtatctgttaagtgaataaatggagagtttgctgagcacctactatgtgccggcccctgtgctgatggaacaattttatggagagagacccacaaagacacacacagacaaaccaatggcacagacacctacacctgcacagcactgacttgagaggtgagaaaaatccttcttcaggagcatggggagcttttattrcttaggagtggtaattgctgacacacaaaatggtcagactccccagaacacatggtgtttctggggataaaaattattggaggaagaggatttttaaaatttgcaagtactagagagtgaaaaggaagatctattggtttaattttcaaaggagtttaattgctgctttttaaaactatatggagtatttgaactgagaaggactgtagagattgtaaggtcaaatgtctcctcttacaggtaatagttattatttataaagtgttactctgtgccagaaactattttaagagcttcacagatattaactcatttaatactcataacagtcctatgaattagatact

SEQ ID NO: 713440 - DNA, 634 bp, Homo sapiens
ttcacttagtgaaatactattcatgaattttttaaaaaagaataaactatcsatccatacaagcaagaacacaaattaaccacaaaactataatattgagagaaataattcagacataagtgagtatatactatatgattttatatttatgaagttcaagagtagaaaaactaatctatgatctagttattatagcctttctcacctatggtttaggaattgcctggaagattaacacaagagaactttctgggaaaatggaaatgttcaatatcttcatgtgatattcataacttaataattggttaaaactcctcagatggtacactttcgatcagtttatctcaatgtatgtatattttaccttaatttttaaaagggtaatatagaaggactatagagaaaattttcattagtcaaaatgccctaaaagagcctagtagtaaaaatatgcttttgtcttgttactaaaacaaaattagtaagaaataaaagaaaaaaatgggatataagataacagagatggagaaagagagaattccttaggagaaatgttgagatctcagaagacaggctttatatatatatgaaaggaaaaatgagaccttggaggccagaagaaaaagagaaaaga

SEQ ID NO: 713441 - DNA, 648 bp, Homo sapiens
cctggggtaaagagagctgatgcctttgtcgagcaaagcactgacctgacctccttactggcttaaccctacccagaggttgtctctgttcctccctacatttccaatgctgggttctaggagcagaaaacagtaactctgatgagtagaaaaaaagtctgggggcagcagcaccaacttcctcctgaaggcaagatgtgctcctgcctcaagactcccccggctgcctgggaccttctcaagcccaggggcagggtttatacagcggtggctatacaaacttgggtagaagaggtgttagctttggggacgwgtgcttttatcttctggtaccacttcctcctccacctctacccttctaggggacaggcgtggcaggaagttcagagagtccaggggcagaggtggctccacctaccaaagccagaaatctggcagggtgaatggataaactggaacaggatgaaggagcagcgagaggacagggcacaccaagtcccccagaacattctgcgcagagaatgatcagagtggattgttggcttgcacaggcaccagccttcctcatctggagactccggctccaggtgtagtgtatggtccaagtgtccaaccagcttcctagggttttgtgtaatccaggtcttt

SEQ ID NO: 713442 - DNA, 1048 bp, Homo sapiens
gtggggggctaggggagggataacattaggagaaatatctaatgtaggtgatgggttgatgggtgcagcaaaccaccatgacatgtgtatacatacctatgtaacaaaactgcacgttctgcacatgtaacccagatcttgaagtataatttttaaaaaagtgggcaaaggatatgaacagacacttctcaaaagaagatatctatgcagccaataaacatatgaaaaaaagctcaacatcactgatcattggagaaatgcaaaccaaaaccataatgagataccatctcatgccagtcagaatgaagttaagttttgcagtccactgaggattataaattctcattagctgggtaaccaatggttttccatttcactgagaaaaagtctaccaaagtatgcttataaaaataaattggagtgactgaggtaaaaagcctaatttaaggaacacaaccctagggactaacatcaagtttcaaaattagcaacaactcacaggcccagataggagaaatcaagttcaagtctacctcccaaaataaatttctaatacttatttagatagctacaaaagatcaaactattttcagactagagaacatgcaaagggataaattctaaatcatggcgtttaaatgtaatcctttgagcattcctcgccatgacagcaccacttgcgtgcccaccatgttctttgctcccatatatggttctccctgtctccttctgctggtctcctggaggtaaaaaaagaatcaaaagattttaagaaaagcacatgtagatctctacctagatctccacaccagtccctacccttaatgcattaaggttttcttttcctgacagcaattacgttaattctttgaaaacaaatatccatcaatcaattcattacatcctttccactcacygctgactgtgacttcttgcttctaactaagatgtgctaatttcccaaacttccaggtcccactttcactgagcttctctattaactaactgctggttaaaagcaccaaagtttggctccctagaggataat

SEQ ID NO: 713443 - DNA, 1194 bp, Homo sapiens
ttttcttgctgtaagatgaattcccttaatatttacccacatggtggatcatgaaacacactccactggagagaaactcagctctttaacaaaccaatttccaaccctcattcatggaaaccataaggcgttcctttaactaaggagaaaatcaaacatcagtgaagggacaatgtaggcaaccccagtaaacagccagtctgagggggtccatgttgagtttagagcttcagatatgaaagccaccttggatacacctggaactaagtgggagttgcctacttaaaactctgagaaatttgaatgcaacagtcacatattggttttaagtagtagtagtagaaagtgggaaatccattcaggtccatccacttcccacctacccaaaggcataccctttggtattgttttcccaacaacccaagccactctggaacaggtgttctgaattctgtgtgaaacatctttaaatacatattgctaaggctctagatgtctgactctgtgtgggaaaagctatgcagccaatttatagtgcttaggccaactgtcgatttatttaatgggttagtaacaccaaccaagactaggtggttgatctgttgttcaatagcctgtactgtctgaagatgtctgagagttttctttcttattaagtgaaaacagagcatcatctctaaccatcttattcatcatcctgtatgaatcttgcataaaacaggcaacaaacaacattttcttttaaagcttccagacagtaagttagtccaacagggtatgtgtttwaaaaagaaaaaaaaatagtatgttttgatcccaacaagttgataaatttcatttataaataataagtagatgtttggagtgcaaatcccataatcattgaatcttagagcttttacttgacttacttgtattttaagagcagccactgaattaaccagagtcctacaaggatcatgccattaatttcacaaatagaaaaggcccactgcacccggttaaaatggtcaaaaaatgtgtccggtagtggaggctgcacctccttaggaggtactcgttcgtggacgaccgagatcatcactgtggtgagaacgaaacaggaaagtgcataaagaaaggccagaaaagtcttgccccactccatggggtactgagagcgctccagttctggcatggggatctttatcatct

SEQ ID NO: 713444 - DNA, 627 bp, Homo sapiens
tggagagcatgtgatgaatctggtatgcaatccagatcctcaaactcaggatctgatgctctttcgaccaaattctaggtggagttagaatccatgtcttctcattcccaagccragattttcttgaagacatcaaatattgcaaggagtggagcaggcaccttcgctattgcttcactgctaccagcataggaatgtcatgccaactaaagccaaacctaacacatagccaaggttaagttatttacaatctcagggtctccgtttccccaagcgtaaaatgaaactaatgtaaacagtaggactagcatccacccttataggattattgtgagaattagatgagaaaatattctacaatcctcactatagtgctcaacatagaaaccatttaataaacagtaactactgccataagaatagttgctgtaattaataataacctccctgagtctcagcctcctgatttcctaattttaagagctaaaactgaataattatttttcttttttttttttaaatggagtctcactctgtcacccagactggagtgcagtggcgtgatctcagctcactgcaacctctgacccctgggttcaagcgattctcctgccttgcctcagcctc

SEQ ID NO: 713445 - DNA, 585 bp, Homo sapiens
tgttttttataaatgcataggtaaatacataggaggaggtatgagaatagtaacttctgggaagagcaaagtatagaggaaagggaggcgaagagggactttcactttttactattctctgtacttccacattatttgaatttttacagcaatttttttgcttgtaatttttaagaaaggagaagcaatttaggtcttatattaaaaaccctataaactttataatccatgagaaatgtctcaggcaggcaatttttactacaaacttgtgactttcgaaatgccaaagcaaaatgtttcagattgaacaagtttggggaagggtagagttaatctctgacagttactgaattgtctcaccattcaaaaamcttaacagtcactcaaatggaaaaatataacttcactcagttaaaatttactgggtttggacaggtgcttttgagaagagcagatgctagggagaactaggccagtgtatactagaagacaaggtatttgtaaattaatgataaatattcaaacataaaatgtatttgagatgcaaaaacaaagatttcatgtgccataattacctaccccacc

SEQ ID NO: 713446 - DNA, 585 bp, Homo sapiens
tgttttttataaatgcataggtaaatacataggaggaggtatgagaatagtaacttctgggaagagcaaagtatagaggaaagggaggcgaagagggactttcactttttactattctctgtacttccacattatttgaatttttacagcaatttttttgcttgtaatttttaagaaaggagaagcaatttaggtcttatattaaaaaccctataaactttataatccatgagaaatgtctcaggcaggcaatttttactacaaacttgtgactttcgaaatgccaaagcaaaatgtttcagattgaacaagtttggggaagggtagagttaatctctgacagttactgaattgtctcaccattcaaaaaacttaacagtcactcaaatggaaaaatataacttcactcagttaaaatttactgggtttggacaggtgcttttgagaagagcagatgctagggagaactaggccagtgtatactagaagacaaggtatttgtaaattaatgataaatattcaaacataaaatgtatttgagatgcaaaaacaaagatttcatgtgycataattacctaccccacc

SEQ ID NO: 713447 - DNA, 636 bp, Homo sapiens
gatacacttttgagaaacacatttggtgtgtgaggcaaagctcccttttctctaaataaatcctccatctccatatatccttgtccccgtcctgatacttcagaattctccgtctagctgctgtggtaaagggcctaagggtcatggaacttgttctcaacatattattttctgctgttggtgatctgccttacatttagattggtattcattatctagcatrtgagtgtcttagtcaaaaccaaaggagaaatagtcccatcttgtccacatatcacagcaataaaagtgggccactgacatatcgaatcttaggcctgggagaattttcatttaatacttaaaagaacacagccctacatattaggcaaataaaataaaagtgtcatgaggctgggactctttttaatcccatcatacaaacaagagaccagagaggttaatgtcttagtttgtccaggttgctataacaaaataccttagactgggtaatacataaacaatggaaaattattgctcacagtcgtggagcctgggaagtccaagatcaaggtaccagcagatttgatgtctggtaaagttctgttcttcatagatggtatcttctcactgcatcctcacatagtggaaggacaa

SEQ ID NO: 713448 - DNA, 1799 bp, Homo sapiens
ttttttttttttttttaaactgcttatactgataataggcaaaaaaaaaaaaaaaaaaaatcaatgtgtcgagaaaatcccgacattaggttggtggaaaattgtctgagcaggcactgggtctatgttcacatatgtgactgattaaggctattcctggaagcagagaatttcctttgtttcaggcttttaaaaaaaaaaattagccagtgctcttttttctttaagtctgatttgagtttgtgctcatctggggttctttccttcaccacctcaggcaaggcaaacaggagctgagtggaagacaggaaggaagtagggactgggttagaaggtcttggatctaccagccaagagattctctgggtatcagtttcagaatctgtaaaaggggtcaagtgaagagaagtaggctttatgtcaagtttctcaaactgcattttccagaaaataagtgttttacaagaacatactaaatgaaaaaaaaaaagattaaaataataattgtcggtatagttgatattgttatgcaataatctgcctttgataaacaaaacgccagacaggaggtagcatgattggtcaaccacttgaatcacacatgcacatttagtggtagggtcttggtaatctttacaaatcttaatatttatgcctgtatctacgatatcttattaacaaaataatttatttttctatttttctccacacatatgtatataatttttctctgtatgtatataattgtggaaatcaattccacaattatttttgttctatgaaaacatttttaaaataacatttgaatgattttctgttgcatttcattcaccagaggtcatttttgtattaagtttagctcaaatttgcatgtaagcttccaaccttatacttctcgacaattcaaatttattttataaacataatacttacaacacgatttttaaaagtcaaatagtttctttagatcagtgattctcaaagtgggtccctcagctggcaacatcagcatcaccagcaaactggttaaaaatgcaaattctccaggccccaccggagagacctactgaatcagaaactctggaaagagcctcccctcacatgcattctaacaagccctccagaggactccgatgcagctaacatttgagagccacagctctagacgtgaggttggcaaatttcttctgtaaagagccagaaagtgaatatttgagactgtggttcatacagtctctgtcactactgctaaactctcttgttgtagcaactaatttggcacaaaagcagccacagagaatccataaatgatttggtgtggctgtaktccaataaagcactatttgtaaagacagacagcctgatgaatttgacccatgggccgtggtttgctgacccctgcttgagactgataaagaataacagctctctatccttctcattcttgagttcccctcagaagcaagtacttcaatttctttttttttttctttcttttttttttttttttaagaaataaggtgtcgctctgtcacccaggctggcgtgcagcagcacaatcacagttccctgcagcctcaaacacctgagcacaagcaatctttccacctcagtctccagagtagctggaactataggtgtgtgtcaccaggcccagctaatttttgtattttttgtagagacgtggttttgttatgttgcctgggctggtctcgaactcctggactcaagtgatccttctgcctcggcatcccaaagtgctgggattacaggcatgagtcactgtgcccagccaaaat

SEQ ID NO: 713449 - DNA, 1799 bp, Homo sapiens
ttttttttttttttttaaactgcttatactgataataggcaaaaaaaaaaaaaaaaaaaatcaatgtgtcgagaaaatcccgacattaggttggtggaaaattgtctgagcaggcactgggtctatgttcacatatgtgactgattaaggctattcctggaagcagagaatttcctttgtttcaggcttttaaaaaaaaaaattagccagtgctcttttttctttaagtctgatttgagtttgtgctcatctggggttctttccttcaccacctcaggcaaggcaaacaggagctgagtggaagacaggaaggaagtagggactgggttagaaggtcttggatctaccagccaagagattctctgggtatcagtttcagaatctgtaaaaggggtcaagtgaagagaagtaggctttatgtcaagtttctcaaactgcattttccagaaaataagtgttttacaagaacatactaaatgaaaaaaaaaaagattaaaataataattgtcggtatagttgatattgttatgcaataatctgcctttgataaacaaaacgccagacaggaggtagcatgattggtcaaccacttgaatcacacatgcacatttagtggtagggtcttggtaatctttacaaatcttaatatttatgcctgtatctacgatatcttattaacaaaataatttatttttctatttttctccacacatatgtatataatttttctctgtatgtatataattgtggaaatcaattccacaattatttttgttctatgaaaacatttttaaaataacatttgaatgattttctgttgcatttcattcaccagaggtcatttttgtattaagtttagctcaaatttgcatgtaagcttccaaccttatacttctcgacaattcaaatttattttataaacataatacttacaacacgatttttaaaagtcaaatagtttctttagatcagtgattctcaaagtgggtccctcagctggcaacatcagcatcaccagcaaactggttaaaaatgcaaattctccaggccccaccggagagacctactgaatcagaaactctggaaagagcctcccctcacatgcattctaacaagccctccagaggactccgatgcagctaacatttgagagccacagctctagacgtgaggttggcaaatttcttctgtaaagagccagaaagtgaatatttgagactgtggttcatacagtctctgtcactactgctaaactctcttgttgtagcaactaatttggcacaaaagcagccacagagaatccataaatgatttggtgtggctgtattccaataaagcactatttgtaaagacagacagcctgatgaatttgacccatgggccrtggtttgctgacccctgcttgagactgataaagaataacagctctctatccttctcattcttgagttcccctcagaagcaagtacttcaatttctttttttttttctttcttttttttttttttttaagaaataaggtgtcgctctgtcacccaggctggcgtgcagcagcacaatcacagttccctgcagcctcaaacacctgagcacaagcaatctttccacctcagtctccagagtagctggaactataggtgtgtgtcaccaggcccagctaatttttgtattttttgtagagacgtggttttgttatgttgcctgggctggtctcgaactcctggactcaagtgatccttctgcctcggcatcccaaagtgctgggattacaggcatgagtcactgtgcccagccaaaat

SEQ ID NO: 713450 - DNA, 3599 bp, Homo sapiens
gaatctcaaacaatacctcatagatctaaatattaagcataaaactttatcacttttaaatgaaatataaactttgtgacctttgttgggcaatgagatcttagacacgataccgaaagaaaaaaaaatatattgagtttcatcaaaattaggagcttttgctctgtaaaaaacactaagagaatgaaaagatctgctatgaagtgaaaagaaatagttgcaagttttatctctgaaaaacccatataagcagattatattaaaaactcttaaaattcaacaagaaaggaggcaacccaatttaaaaatgcacaaaatatttgaatggattgttcaaagaaggcaagtaaacacatgaaaccatgctcaattttatcggtaactcaggaaatgcaaatttaaaccaaaatgagataccattacacactagaatggctaatttaaaaaataaaagtcattaccaaatgttggtaagatatagatcaactggaactctcacaagttgatagtcattgatgtagcttaacttcttagaggagtaacctaaaagatctctgggagctgattgcttcttaacaaagagtattgcttggctgtgagaacataaagctaaaggtctataaggatttcttggtttgactttggacagctagaagacacccagtaatcacaggtaccttgtcttggtgcttctaaacaggaaaggtcagtgtgatacaagctaacttcaaagaagctaactttaaagaaggtgtaaacgcttctatttcctgagaaaagcaagcattgctttgctggaccctgtcttgatgaacaatccctttaattaaactttccagaagtgttgagtttttaccttcaaacatcattgttttgcataacacttaaaatgttaatagcaatgtgtaaatttgctcttggcttcttggtatagaagtatttgcttgtttaaggagggattatcctcaggagctccaagccaataaaacaaacttacaaagcacattctgtattttgttaagattttcttattttcctaatattttagagatatcatagtttttgttcagtgtattagttatctggtgctgcataacaaaaaacaaaaaatgaatcttatagaagaccaactagatttgtgttgtctaatatggtagtcctgtgtggctaagtttaaaatggaacaaaatagtttctcaatcatattagctacattttattattgagcacgtgctcaatagctacaagtggctagtggctaccctattgaacagcactataacagtgaagtctaaagacaaaacctgtgggccctggagtttggaagcatgtagtttccattctggatgtaagaccttaggtaaaccccagctttctataaatcaaagaatatttcctatctgggaagattaaaccaggtgatgtgtatataatgcctataagaatgcctgacacatcgtgaatactagataaatattaattataatgataattattgttagaaactgatcagtgggaaaatataacctacctggggtaatttaacttttctttgaaatactctattccaaggttgagtaacaatttatgttggtgaataggacattatgcttgtttcttcatgtcattctagctccctgagatttggggatgagtgggagaaaagggaagtgtcccatttttatttataatttcatgaaatgggggaaagaacagcttgaccactaagttcacttcatttcttaggaatccataggttcccagtgtgtaaaaaggcgtgtgacatgttcagagaataagtatgttcggttttagggggaagatgcaataatcttgctgttcttaatcattataaaatcattcctctccaaatagttatttttagaatgtgtttctatataaaatagaatggtggaagaaacagagaagacagaagagggaatctcattaataccagaacttcctaggctaaaacttcagtataagcatacttcattcattatttatttttatttctttgctgtcactaggcatcatcattcataatatatttactcaagatccttccccactctagaaatatgttttatcatacaagtctttgataatctcaaaagctagagtgcacttcattacagcgtgtacctaaagagaggatgagcttcagttgggtgacctgtcacacccagctcatccattacctctcttgtcacaactgtttactttttcacactgtgctgaagccattaagaaggaacacgaaggtaggattggctacacrctgttctcctcttgacctgccaaggaattaatcttgaatgctcaatttaatgctttctaacaatgactgctgggggtgggggtggggagatgtctgttgcattaaagaaaaaaaaaagggtgcccattcaaagcatagaacttaatttcactgatgtacactccatcattttatctttgatagagaaatagcaaaaggtccacacattttttaactagtatacaatatacccagttggggtagaatgcttacttatgtattaaagtagataaatatcagtaatagatagcaattagtaaacaataattgcaaatggtggtagtttacagagagctgtactgcctaccgtcaatttgagaaagaattttaaaacttttttgtacttatcaaattcaatttagaaatatttgtttttttgaataccttcagaaagaaattcatatggtaaaagataataaagttatgtatattatctttcttaaaatgcgtagaagtgaataaaaggaataaaaaatagaatagaaaatataacctataatcaaactaagaaacaatgacaactacaaataatggactaaaaagatggtttgcctgaaacagcaacatttgctccaagttggggtgtaaaaacaactggcaataaatcatcgcagatttatctggcaggatatagatctttctgaaggtaagttagcaggtcttgaaagactcagacaatagtcgatcccttagaagagtgaagactgagttagtggataggacagcagagacaaaaacatccttgtagagttctggctcctgcaacaaggagagcatattgtagaggaggcgaaacaaagaaacaaggaaaaaagagaaacaaattgcaacttggtgaagaatcttcactaggagtcactccaaggactacttcaaagatttgctcttctaggagagaaacattcatctagagcagaaggtacactggtgagagactatccatgctactctcaacttacttcctgcatgtgtgcttttattaatgcttaaactagggttagcacacaaaaagtcacacatagagaacttagcaaggatcaaatatgccacctgcacatggttaccatggcatttcctggtctcccaccaaaaaaagttaaggcaatcagtaaatttcagggaatgggaaataaaaaggactacagacaaatactcctctctgattaaaaaaatggaagaaaatatggaatctttagtaggtgtgaagaatatcaaagaatcaatacaggagataatagaagagaagagataattaaagagataaaaggcactctgatca

SEQ ID NO: 713451 - DNA, 604 bp, Homo sapiens
gtctcgaaacaaacaaacaacaacaacaaaaacacaatgttgcttgtggtcaatgttgagaagcagattatgataactgtcttctactttcagtgttctctctccctcactattgctcattcaaccccgttaaacaaacgtttcttcgtaaatctgcctagaggttctcatttaagatgcaacaygcctacaaaacatgccatacctcaaataatatgtcagatcattctaatgacaccctaaaaaaaaaagtgaatctagtgatacaaaggaatgctatccttccccagtgctatttttggttttgttttgttttttaagatggagtcttgctgtgtcactcaggctggaatgcagtgttgcgatctcagctcactgcaacctccacctcccaggttcaagtgattctcttgcctcagtctcctgagtagctgggattacaggcgcccaccatcacgccaggctaatttttgtatttttagtagagatggggtttcaccatattggccaggttggtttcatcaaaatcctgacctcgtgatctgcctaccttggcctcccaaagtgctgggattagaggtgtgagccaccacacctggccccc

SEQ ID NO: 713452 - DNA, 593 bp, Homo sapiens
tattttaaaattttttatcaaatatgtcagaaaataccttctttcatctcattgacctctactgagtgaatgygatcatctctaagccaatcaccttgtccaggattatgggcctcactaattggcttaagcctacccatggacttgagacaaccctatgactgcagtcagggaggctaagaaatgttacaaaggaagtgtcatgagaacagccagaaaaatggggggattggaataaaatagacaatgaaatctataatctcttctttctgccccatgctacaaacacactaaatatctggacaagtattaacacaactctaagaaaaaaatgtgacatcccagggtgtcagaacttaggagaagctcaaggcacaggaataatcagaagctgagagcacagcagtgtaaaagagaacaagtcccaaacacaaaatatagggcagaagatacagtctttactccgtgaaagaaggaatgctgaaattaagctcctgtataaatctggatttaattatgaaaaaaggtctagaaaaactccacctacaggccagacaatagaaaacaacaataaaaatgcttgtcattcacct

SEQ ID NO: 713453 - DNA, 593 bp, Homo sapiens
tattttaaaattttttatcaaatatgtcagaaaataccttctttcatctcattgacctctactgagtgaatgcgatcatctctaagccaatcaccttgtccaggattatgggcctcactaattggcttaagcctacccatggacttgagacaaccctatgactgcagtcagggaggctaagaaatgttayaaaggaagtgtcatgagaacagccagaaaaatggggggattggaataaaatagacaatgaaatctataatctcttctttctgccccatgctacaaacacactaaatatctggacaagtattaacacaactctaagaaaaaaatgtgacatcccagggtgtcagaacttaggagaagctcaaggcacaggaataatcagaagctgagagcacagcagtgtaaaagagaacaagtcccaaacacaaaatatagggcagaagatacagtctttactccgtgaaagaaggaatgctgaaattaagctcctgtataaatctggatttaattatgaaaaaaggtctagaaaaactccacctacaggccagacaatagaaaacaacaataaaaatgcttgtcattcacct

SEQ ID NO: 713454 - DNA, 981 bp, Homo sapiens
atccccaagagttccatcagtgccggttgaaccctctaccagaagctctgagagtccttgttgttcttggtgtctttagtatcacatgagttcttaaagggattcagagttttctgtgactccaaaatcaaagtgtgtctgtgcctgattggacaggatatatactgatgttcgattttatctatttttcaccaattatgggctagttaactctggcctttcaatataactcagagaaatgacccatggacttggtcagttcagagaagaaaagttattttaatatttttcccctttgaaattgacttgtcaattcggtctaaatggctaaattaatacaatgctatgaatttaggtatgataattattagattaaaaatctattgtggggccaggtgaggtggctcatgcctgtaatcccagtactttgggaggccgaggcaggcrgatcacgaggtcaagagattgagatcatcctggccaacatggtgaaacaccgtctctcctaaaaatacaaaagttagctgggcgtggtggtgtgtgcctgtaatcccagctacttgggtgactgaggcaggagaattgcttgaacctgggaggcggaggttgcagtgagctgagattgctccactgcactccagcctgggcgacagagcaagactctgtctcaaaaaaaaaaaaaaaaaaaagcaacagtgaaaaactattgtggtatcagaaacaaagaaaaatttctctgatgtgtaacccaagctttttatgaatggtttgaaatgtggaaggatattatttaggagagactatatcaaaaatggcacattctccttggttttaaaaattaagaaaagaataggtttcaatgggtgatttttagaaacattaaatgagttaataataaaagccaaaacatagacagtacctaccaagtgcctgagatgcatgggggtcagataatttgcctaaggaaacacagctagtaag

SEQ ID NO: 713455 - DNA, 1435 bp, Homo sapiens
tttcttgtgatggatccatctgagccactgtgcagttttctgattaaatttttgttttaaaaagatgcttgaaatcttaaatattacagttttactaattgatataatttaaagactatctccctccgatggggctgggaagatttagtaatgtaattgttttctttttatgtgaactaagctttatcttcaccctggaatcaaattaccatctgattgttcataaattttgtttccttttgcaaaacagtgaatagatagtatgtaaagatggaaattgacaaaacaaatctttaaggaattaaacacattacaaatacattattggtcattcttgttctaaaaactgaaagcaggagcttcagattaaagcagttttctaaaacatgttttcttggtgtttcagggagactctggtgggccactagtatgtagacatgaaaatggtccctttgtcctctatggcattgtcagctggggagctggctgtgtccagccatggaagccgggtgtatttgccagagtgatgatcttcttggactggatccaatcaaaaatcaatggtaaattgttttcaaatgttattaaaacaataacctctttctttagagtgggtttgggaacagtgagtgtggtataaattagcatgaaagagaaaaccatagagtagaatttcatttagttactaaacacactaaaatgcaagattctgcaaaataagttctcccatgtgtagagttaaactgacttttccttaggctgctttaatcctggatttgtttcttttttgtttcttttgatagtggctgctttrgtgcccactatattttgttctcaggctttcatctttatttttaacatgttctccccaaatacaggtcctgcttcactcagacaaataataaatgcaaaaccttaaaacaacaattgccaccacccacaccttcaccagacagtgcatcttggccaggtaataaatgtttacattatcccattaatactttcagccagaatttggcaagaagcattgtctgtctagctttgctaaattttctatggaacactataacctctgtgttttccttctggttggtagttttagctgaaagtggggagagttgttattaagattgttggagatcattcctaccccaaagctagacctgttgcagatttttaaaaaaatcttgtggttgtgaaccagtgcttgaatattggagaattacatagaattattttaagctctgaatctgaataaaagtccttctatatgcaagtatcttgcctaggtaaagaccctgggtatgagatgaccaagactagcgccagcattagtatttctcttcattcttccacagttgccactctctgtttgataaaagaggattttgatttttagtcaaaactaacagcaatggaggatttgaaatctcta

SEQ ID NO: 713456 - DNA, 1255 bp, Homo sapiens
accaaggttgaaatttaattcccactttagtcagtttgttgttttctgaagccatggattgcaaccccaatcataaacagcaatttaaaaaatgaggatacatgaaaaactatgcacacatgagaacaaattcatcataattaatgagaaagacccttggggctcagtttccatattgataggtcaataagacattcttacgttccaactatggcatcatgatcattttgtaaaaaccttgttcttggccaggtgcggtggctcatgcctgtaatcccagcactttgggaggccaagatggtcgaatcacctgaggtcagatgttcaagaccaacttggccaacatggtgaaacctcgtctctactaaaagtacaaaaattagccgggcatgatggcgggcacctgtaatccctgctactcmggaggctgaggcaggagaatcacttgaacctgggaggtggaggttgcatgagccaagattgtgccactgcactccagcctgggtgacagagtgagactctgtctcaaaaaaaaagaaaaagccaaaaaccttgttattgatataaaaacaaagaccgtattggagcagaggttcaaaccatggaccgtcttccctaaatctaagcctagacatttggaaatgtacctattagaagagaaatgtcatttagattttctccaaactcagcgccctgcaggtggcacacaaagctgagatattgtcacctttgggagcactgtattacaacactggccgatacgaagaggctttgcagatttaccaggaagctgcagcacttcagccttctcagagggagctccgcttggcactggtgagtaggatgaaagaaaatgaagctggcaacctaagcacaggcagccatagagagagctgtagtcctcacgcctcaaaactggagctggaatgccgtaatatatccactgtatgaatattcatacagctaatgttagagccattctctaaagacatggacaccaaaaatactgcatttttgttttgaaataacttcaaacttatgaaagtgttgcaagaatagtaaaaaatttacatataccctttcatccagctccaatgatttgtaacattttgattcatttatcactccattgtgtatgcatatgtagatgtatatgtacctacatgtatatgtgtgcatatttagatatgtatgtttgtatatacctattattagtgtgtgttatttttttcctgaaccatgtgggaattagttg

SEQ ID NO: 713457 - DNA, 586 bp, Homo sapiens
catatgaatttccaagggacacatttggttgactgcacacctctaccactaagtcccatccttagaatgcactgcagggagagaagagagacaacatacagtctccattcagctgcaaggagatttctaagaagcttcaagccctgccttgaacctcagtatagagacactgggacatgtttgggagactcagtcctgtcatgggctctatgtcaagtattcttatcatcttgactcaagaatgagagcagaaggtgctcaatttgtgggcaatcatctctgaaagaactcaaaatagtttaggtcacatatacttaattaaccaattctaaatttcacaatgagaagtcatccctttgtggtgggaagtgaggagtggttaggaagtkggggggaagcttttactaaaattctcagaaggaagaaagcaatggctactttataactgtctgcactgattggtcattccaagcccttctgtcccttacttccctagggaacatcccctgatacctcacatcttgtcagcacagtgcattttaaagaggttaaataatttttatatcgaaaacagtgcttctcagcc

SEQ ID NO: 713458 - DNA, 1099 bp, Homo sapiens
cagggtgtagggactgcacagatcccagtggaattttccacctggtcctgatgggtcatcctcgtgccttccctctggttctactcacctttccaggctgaatcattaccccagctcccctcccattggtgcccacctttgtcaccagtatggtggccaagttgactgcctttcctcttgtcctatctccttgcttctaaagtttagtttcttatacataggctccagagtacatggagtgaaaattatgcaatttcactttcaaaatgaggattcgaaggtagctcttgagcagtgaccagggtatggctccctgacatcatgactcagtttcctccatccatgtggtctgggcgagggtcacagtggggcgggggctgatgtggtgcctcttggaatttcatcatcatggcagggacagtggcttctctgtgaggcagccagagctgcaattacttcctccttctctttatcctacttggtattttcgggcctcttgaatctatgagtattaactcatctatgagtattaacattagttcttcctcaaatccagagaaatctcagccataatctttccaaatgtttctgcaccatttcctccagccactcttctgaggctctaatgaaacagattagatcttttcatctctcttctgagagacaagagacagagaggttttgtttcttcatgctttattttgccaggtttattctgacctatattccagttcactaattctctctatacctatgtataataaactaataattgaattcctrtcttaggaattaggaattcagtggaattcctaattttagttattttttagttctagaatttctatttggttctttgtcaaagctgctatgtcaggtattgctgctgctgcttttttatttttggccaaaaaattcaagcatagcatgtatttccttgaacatagtaaacataattattccatagtctacagtttttatagtatattgaatattgtgtccctctgttactgtttgtgctggttcttgctctaagtgtctcttcatgcatctgattattttggaatgtgtagttgataccttattttattttattttg

SEQ ID NO: 713459 - DNA, 600 bp, Homo sapiens
tttcacaaatatttattgagcatcacttatgtgtcaagaagtgtactaggcattataaatgttttcttcttaaagagaatgagaaaattaataaataatctaataagccatgttagccaggttttagttttgactaggctgtgtcttatctctgttattttaaaatataggtgtggcttttctgttcacctgttctggtcctggagtagaagggtaaaccggaaggatgcattgggttgatctgaggccaacactttatttttagaaaaacacttattatatcattaaattcccctctactttttggtccagtatattaatttacaaatttgtcccaagatcaggaaaatttcactaaggtttttayttcctagaggtcataatcctttcaatagcctatattcattcaactatcaaaatgcatatttatcacaaagaatcaacacacatggcatttaatatattgtctccataatttttaatttattgcagtacgaaggattaacctcctcccacaccttcagctaccctgtcttattaggaccagatattttataccaacaagaaaagtttactcctgagactacattatttatgctt

SEQ ID NO: 713460 - DNA, 849 bp, Homo sapiens
ttgtttaaccgaccacgtcgcactctttcatgatatttagtcccgattagccaattttaaaaagtttggggctaggtaaagtggctcaagcctgtaatcccagcactttgggagaccgaagtgggaggattgctttagcccaggagttcaagaccagcctgggcaacatgacaagaccccatctgtacaaagaatacaaaaattagccaggtgtggtggtgtacgtctgtaggcccagctacttgggaggctgagttgggaggatcacttgaacccaggaggttgaggatgcagtgagctatgatcatgccgctgcccttcaacccggctgtcagagcgagacactgtctcagaaaaaaagaaaaaaaaagttggggtttaaggggctagctgttagtgagaggagcccaggaatgagtggagcaacgttctttgaggcctgggtcggtcaagtctggtgattttctctctgttggaggttcctctcttggggtccaatcctgccttaaggaaatgacatcccctgtgaccagatcttgaagctcccaattattggttctggctcctataggtactttgggagtccaaggtggatttgcatctacatccaacccaagatagctgggtttctactgggtctggacagcacccaaagcccgaaaggactagtcagtgggactgagatgtgtgaacygcagcccttccatcaagtagctttaaaccttatccatattttgccaataccgtttcatctatgccctgacacccccgcccaccaccacacaccttttttttcttggtcttttgaatgaaagcccagacatggtgtttcagagcagtttcatttag

SEQ ID NO: 713461 - DNA, 455 bp, Homo sapiens
cttcctgagccctcatcaaaagtagatattggtgccatccttcttgtgcagaaccatgagcccaataaacctctttgtaaattacccagcctcagctattcctttatagcaacaaaaatggactaagacaaggtaattagtgaatccatcaccccatgcatttaccattcccttgcagtgagaacattcaaaagcctcttataacctattttctattatactatattttattgycaaccatagtcaccctactgtgcaatagaataccagaattataccagaatttattatttctagctgaatatagctttctctctgttgaccagcctctcctcatcctctattccctatcccctccccagtctcttgtaactactgtttcattctgtttctatgatagtaataaaatgtagaattgttgataaatgcaggtggcatttaatataaatccttta

SEQ ID NO: 713462 - DNA, 622 bp, Homo sapiens
tgacttgtaagaattaccatcttgctgtatgctactattagtaggtactcaaaacttgttaaataactaaaggtaaaaactgaaaatgactcaacacttctgaaaaatgcccagggcaacttggatttaaataaaatctccaggaacttccaggaaaaaactatttacttcattctgttccccgagaccccaagaaaatgaaacaacaataacaacaacaaaacctaatgaagaaactgggaaataattcaagccacagatgtggaaggatgtctgccaaatatatggtatcggcagtgaacccagaaaggatgctgaaaactattaatcacctttccatatttcaatcaggctgagatttgtgtgagtaaatgataggctctggaaacattcaagtgataatgtttactaacacagaggagtggaggactgaactggttcagttctgygagaggcagggaaaagtcgagtaggcacctagttctgtaactgggctgaacaagaggcaggacagatgggagaaacagctgggttctgccatctttacactctccaacacccagactcctaacccaggaaactgcctggagaggaggcagggaggaaagctgtttagtgcttc

SEQ ID NO: 713463 - DNA, 1459 bp, Homo sapiens
gcctgaaagggcgtttttaaatttggtgcagcaaaaaaaaaaaaaaaaaaaaaaaaaattaaacaacaacatttgaaggcctacagtgtgtatagagaaaacctcatcacaagatcataagtgttacagttttaggraatcaagatattctatttaatagagctatagtaaatgtagtcaattaaacctgatctcaaagcttgaagaagctgagcaaaacagggaaagattgttatatttgtctttatgaaattgggatggaatttgctatgcagaattgaggtttgtggcttcgctgttcctgtagggtgcatgacaagatcccttctcttgagaaaggaaaaaattgatcaccctagcagcagtgatgcatagaaacctaattttagccacaccagtcaatcgaagctaaaggattttcttttttgtttcttcggggttttattgaaggggctaggggcgggacgggattcttttcagttttgtataaaaacaaagtttactcatgctttatattatattgtgattgcaagcgttataagcgtgtgccactggcctcctattgttgatgcttaggtaatggaggcctgtggtgagttttatggtgacttgggcatgtcttattcaaaaacaaaaacataaaacacagaaacctttcttcagcataccaaggcaagcagccatttcatgactcacttaacacattgcagtgtaccagtttacagatgatttttccctttttgcgtgacatggcagttctaacccccagagaattccttatttgtaaattggaagtttctactatgccttacagagcttaaattcagaagtttgtgcctcatatctgaaacaaagggaaataacacacccattcaaaagtaaataaatctcctagaagtttttgtttttaacatttccatataaagagctctgttgaatgtcatgaatagactggaaaaaaaaattttaagaacctgcatatgttgtttactagcagatgacaactacaaaaggaatctgaagaacacgtaaaacttgtatttttttttttttggtagattaactagcaggcctattttaaaaaggtaattcagctaaagggcaatttacttttttgtacttcagactatcttgattgtcaaagtgtacgaactgtaattttaaaatttatactgccacatgattgtaaattttagttgtcttaagttaggaattggtgaaaagctatttatgctggatttgggtcaaaatgacttatttgcaaaaaaataaataatgggaagaaagggctgtataatgaaatactgcaagactcacatattggttggaaatttccctcaaatcacctaccgattacccttgatttccctttgttttcagtttctcaaaacgaatgaaatgaaatatagcagaatgttaacccatataaaaataaagtgtacccaaatattgtaatgta

SEQ ID NO: 713464 - DNA, 652 bp, Homo sapiens
cacgtaaaactacagaatttttgtttgtttcacagttctgggggctaaaaaatcaaaggtgccagaatcaaaggcccaaaatcaagatattgggagggccatgctccctgtgaaacctgtaggagaaaatcttccttgtctcytcctagcttctgacggaggtcattgatccttggcattccttgggttacaaatgcatcgctccaatctctgtctctgtcatcacatggcattctccctgtgtgtttttatcttcatgtgttcatcttttatgtacgtgtgtgtgtgtgtctgtgtccaaatttctcttttcttatgaagacaacagtcatactggatttgagcaatccctaactgacctcatcttaactcgattatacctgcaaagacccaacttccaaatgaggtcacattcatagatgccagggtataggacttcaacatatatttctgcaggacacaatgcaacccatagcagatggagagcatcagcatgatgggattgctaataatgggtttaacgtatcaagctttttctcaattcagagacttctcatgtattgtctcctctgtctgcattacttttctgcccactctttgctcaagttctggtgttgtactggagccatctcacaccagctcctgagggtca

SEQ ID NO: 713465 - DNA, 652 bp, Homo sapiens
cacgtaaaactacagaatttttgtttgtttcacagttctgggggctaaaaaatcaaaggtgccagaatcaaaggcccaaaatcaagatattgggagggccatgctccctgtgaaacctgtaggagaaaatcttccttgtctcttcctagcttctgacggaggtcattgatccttggcattccttgggttacaaatgcatcgctccaatctctgtctctgtcatcacatggcattctccctgtgtgtttttatcttcatgtgttcatcttttatgtacgtgtgtgtgtgtgtctgtgtccaaatttctcttttcttatgaagacaacagtcatactggatttgagcaatccctaactgacctcatcttaactcgattatacctgcaaagacccaacttccaaatgaggtcrcattcatagatgccagggtataggacttcaacatatatttctgcaggacacaatgcaacccatagcagatggagagcatcagcatgatgggattgctaataatgggtttaacgtatcaagctttttctcaattcagagacttctcatgtattgtctcctctgtctgcattacttttctgcccactctttgctcaagttctggtgttgtactggagccatctcacaccagctcctgagggtca

SEQ ID NO: 713466 - DNA, 875 bp, Homo sapiens
tgaaatttcagcctcttagaggaggaatcctaagtgggatctaagcctccattcttaccctgcctatatccttcatgctgctggatcatctttcttttgtgtttaaaagctgtctttgacttcccatttaagcttgttgcaggataagagctgggactcaggagagagatagaggcttggctcttaccacttattagctatgtgatctgaatccatttatataaacttttcagtttcttatggtttctgccttagtctgttttgcattgctataacataataccacgcactgggtagtttataaagaaaaaaataatttctcacagttctggaggctggaaaatccaatgtctagacgctggcacctggtgagggtcttcttgctgcaacatctcatggcagaaggcagaaaggcaacaaagcatgcacatgagagaggaaagaggcggaagtaatttttttgtaaggaacccactcctgtgccaactaacccactcccatgataacagcattcacccaattacaagggcagagacctcatgaactaatcacctattcaaggtctcamctctcaacatagttgcataatgaattgtttccaacacacaaactttggaggaaacgttcaaaccatcgcagtttctaagctcatttgtcattttaataagtattttcttcttgtagacttggtgtggggattaaattaaataatgtatataaagcacataacaaagtgtctgaaaaacagtaagtgtgcaatgaatgttcaacattattgtcatttaatgaacttgtccttctctctgcagcctttcctctcgtcctttccccaaatgacccctactactgactatcccaaattactttgtagaatt

SEQ ID NO: 713467 - DNA, 875 bp, Homo sapiens
tgaaatttcagcctcttagaggaggaatcctaagtgggatctaagcctccattcttaccctgcctatatccttcatgctgctggatcatctttcttttgtgtttaaaagctgtctttgacttcccatttaagcttgttgcaggataagagctgggactcaggagagagatagaggcttggctcttaccacttattagctatgtgatctgaatccatttatataaacttttcagtttcttatggtttctgccttagtctgttttgcattgctataacataataccacgcactgggtagtttataaagaaaaaaataatttctcacagttctggaggctggaaaatccaatgtctagacgctggcacctggtgagggtcttcttgctgcaacatctcatggcagaaggcagaaaggcaacaaagcatgcacatgagagaggaaagaggcggaagtaatttttttgtaaggaacccactcctgtgccaactaacccactcccatgataacagcattcacccaattacaagggcagagacctcatgaactaatcacctattcaaggtctcaactctcaacatagttgcataatgaattgtttccaacacacaaactttggaggaaacgttcaaaccatmgcagtttctaagctcatttgtcattttaataagtattttcttcttgtagacttggtgtggggattaaattaaataatgtatataaagcacataacaaagtgtctgaaaaacagtaagtgtgcaatgaatgttcaacattattgtcatttaatgaacttgtccttctctctgcagcctttcctctcgtcctttccccaaatgacccctactactgactatcccaaattactttgtagaatt

SEQ ID NO: 713468 - DNA, 2031 bp, Homo sapiens
caagaaaagctatacactctcctttgcctatgatcttcagttgagagacatacttgtatagaaatatttattttcctattgtgaaatagttcaccatattgatacatcataactttacctgcagctattcatcctcagcccttagttcatctcatattatatatgctcctccccaaagccatggtattaactattactgactcctatgcctttggcaagcttcacatttatctagctcattagtcatctctatctggatatgccacagaaatgtcaaatggaacaggaaatgtgtaattctttcccccagactttttaaaaatatatttcttatttaagagacctaggagggataccagatctccctttctcatgtaatctacaaaatcaattagtcaccaagttttatagattattgctccctaataactctcaaatcagtctgctcttctacattcccagcaagacttctatttttcagaactatcactatgattctatcacttatagatgtaagccccctgacttgcgctaacattcctccaaactgtcccctgtattccagacatattcagattcaggcatgttccatgtgctcctacaattccctgaatctccaggatagaggttgactaaaggttaccatgttatgcccttcattgttaggctctatgcatccctttagatcagtctcttgccagtgttccatgcaaattctttgcatttgctgttctgaattactactggtttgccgaatacaccatggtgtttctttcccatgttgttccctctacttcaaatgtccttggctgttgtctctgttcagttactttccacataagcattttttttctcctaggaatatttttctgaattcccagtgtgatttatgtgcccctctttattgctctcatgacaacatgtatagatctcttttaagatttatcatgctgtattgtcattcttattactacactctatatactggcttatttgtgtatcttgccacctaaactcctaaaggtcaatgatgatgttttgatcatatttatgtctcatctgtctaacctggtagtgttcattaagcatccatggacagaargaagaatgaataagtgaaagctttgctacctagacctagaagaactttccagaacccactgaagcaaggatgcatcatcaggtactgtgtgtgtacattaaatgctatcacatatagtgagaacttagaaatgcagagatatggggactgacaacttttctgtttgatttttaaccagaaagtaagcactacttaggttgtgtaacacaatcctggtgtgtgtgtgtgtgtgtgttctgggagaggggaattgcatagcaaatatgacatatgacctctggaggcctgttccaattctgttgtttcattagctccttttcccaaggcatttaaattgtttgttgttgtttttaatttggattatatatgaatatatatttaatacattttaaatatatatttcaacaaataagactatctatcttcttagcatcaatacaattcctaaattaccaagatctaaaaagtgtattaaagccatagattgagggatgaaaagtcaatacaattaaaattcctctaatggtacttaaaattaattaattagtatattttctttcttataactgagatttgaagagcacagatttgacttcaggcatgcatttatagctcccttttatttcttgccatttgccctgtatgatttattatgagcatcatttatgtagatttggttctaattagggtctgaaaatcattgtttgactgtacagttataacaacataagaaataagaaaaaaatactatttagcagattagaatgtactacagtaagacatccaattgttgaataacccccatgtccttcacctcaaaaatcctgcttggaaggccgtcccaaacgttcattacttacagaatgaaaattacttccttatatgtgaactgactttattttcttttaactctcattaaagtgtctttg

SEQ ID NO: 713469 - DNA, 2031 bp, Homo sapiens
caagaaaagctatacactctcctttgcctatgatcttcagttgagagacatacttgtatagaaatatttattttcctattgtgaaatagttcaccatattgatacatcataactttacctgcagctattcatcctcagcccttagttcatctcatattatatatgctcctccccaaagccatggtattaactattactgactcctatgcctttggcaagcttcacatttatctagctcattagtcatctctatctggatatgccacagaaatgtcaaatggaacaggaaatgtgtaattctttcccccagactttttaaaaatatatttcttatttaagagacctaggagggataccagatctccctttctcatgtaatctacaaaatcaattagtcaccaagttttatagattattgctccctaataactctcaaatcagtctgctcttctacattcccagcaagacttctatttttcagaactatcactatgattctatcacttatagatgtaagccccctgacttgcgctaacattcctccaaactgtcccctgtattccagacatattcagattcaggcatgttccatgtgctcctacaattccctgaatctccaggatagaggttgactaaaggttaccatgttatgcccttcattgttaggctctatgcatccctttagatcagtctcttgccagtgttccatgcaaattctttgcatttgctgttctgaattactactggtttgccgaatacaccatggtgtttctttcccatgttgttccctctacttcaaatgtccttggctgttgtctctgttcagttactttccacataagcattttttttctcctaggaatatttttctgaattcccagtgtgatttatgtgcccctctttattgctctcatgacaacatgtatagatctcttttaagatttatcatgctgtattgtcattcttattactacactctatatactggcttatttgtgtatcttgccacctaaactcctaaaggtcaatgatgatgttttgatcatatttatgtctcatctgtctaacctggtagtgttcattaagcatccatggacagaaggaagaatgaataagtgaaagctttgctacctagacctagaagaactttccagaacccactgaagcaaggatgcatcatcaggyactgtgtgtgtacattaaatgctatcacatatagtgagaacttagaaatgcagagatatggggactgacaacttttctgtttgatttttaaccagaaagtaagcactacttaggttgtgtaacacaatcctggtgtgtgtgtgtgtgtgtgttctgggagaggggaattgcatagcaaatatgacatatgacctctggaggcctgttccaattctgttgtttcattagctccttttcccaaggcatttaaattgtttgttgttgtttttaatttggattatatatgaatatatatttaatacattttaaatatatatttcaacaaataagactatctatcttcttagcatcaatacaattcctaaattaccaagatctaaaaagtgtattaaagccatagattgagggatgaaaagtcaatacaattaaaattcctctaatggtacttaaaattaattaattagtatattttctttcttataactgagatttgaagagcacagatttgacttcaggcatgcatttatagctcccttttatttcttgccatttgccctgtatgatttattatgagcatcatttatgtagatttggttctaattagggtctgaaaatcattgtttgactgtacagttataacaacataagaaataagaaaaaaatactatttagcagattagaatgtactacagtaagacatccaattgttgaataacccccatgtccttcacctcaaaaatcctgcttggaaggccgtcccaaacgttcattacttacagaatgaaaattacttccttatatgtgaactgactttattttcttttaactctcattaaagtgtctttg

SEQ ID NO: 713470 - DNA, 2031 bp, Homo sapiens
caagaaaagctatacactctcctttgcctatgatcttcagttgagagacatacttgtatagaaatatttattttcctattgtgaaatagttcaccatattgatacatcataactttacctgcagctattcatcctcagcccttagttcatctcatattatatatgctcctccccaaagccatggtattaactattactgactcctatgcctttggcaagcttcacatttatctagctcattagtcatctctatctggatatgccacagaaatgtcaaatggaacaggaaatgtgtaattctttcccccagactttttaaaaatatatttcttatttaagagacctaggagggataccagatctccctttctcatgtaatctacaaaatcaattagtcaccaagttttatagattattgctccctaataactctcaaatcagtctgctcttctacattcccagcaagacttctatttttcagaactatcactatgattctatcacttatagatgtaagccccctgacttgcgctaacattcctccaaactgtcccctgtattccagacatattcagattcaggcatgttccatgtgctcctacaattccctgaatctccaggatagaggttgactaaaggttaccatgttatgcccttcattgttaggctctatgcatccctttagatcagtctcttgccagtgttccatgcaaattctttgcatttgctgttctgaattactactggtttgccgaatacaccatggtgtttctttcccatgttgttccctctacttcaaatgtccttggctgttgtctctgttcagttactttccacataagcattttttttctcctaggaatatttttctgaattcccagtgtgatttatgtgcccctctttattgctctcatgacaacatgtatagatctcttttaagatttatcatgctgtattgtcattcttattactacactctatatactggcttatttgtgtatcttgccacctaaactcctaaaggtcaatgatgatgttttgatcatatttatgtctcatctgtctaacctggtagtgttcattaagcatccatggacagaaggaagaatgaataagtgaaagctttgctacctagacctagaagaactttccagaacccactgaagcaaggatgcatcatcaggtactgtgtgtgtacattaaatgctatcacatatagtgagaacttagaaatgcagagatatggggactgacaacttttctgtttgatttttaaccagaaagtaagcactacttaggttgtgtaacacaatcctggtgtgtgtgtgtgtgtgtgttctgggagaggggaattgcatagcaaatatgacatatgacctctggaggcctgttccaattctgttgtttcattagctccttttcccaaggcatttaaattgtttgttgttgtttttaatttggattatatatgaatatatatttaatacattttaaatatatatttcaacaaataagactatctatcttcttagcatcaatacaattcctaaattaccaagatctaaaaagtgtattaaagccatagattgagggatgaaaagtcaatacaattaaaattcctctaatggtacttaaaattaattaattagtatattttctttcttataactgagatttgaagagcacagatttgacttcaggcatgcatttatagctcccttttatttcttgccatttgccctgtatgatttattatgagcatcatttatgtagatttggttctaattagggtctgaaaatcattgtttgactgtacagttataacaacataagaaataagaaaaaaatactatttagcagattagaatgtactacagtaagacatccaattgttgaataacccccatgtccttcacctcaaaaatcctgcttggaaggccgtcccaaacgttcattacttacagaatgaaaattacttccttatatrtgaactgactttattttcttttaactctcattaaagtgtctttg

SEQ ID NO: 713471 - DNA, 1151 bp, Homo sapiens
aattgtttatcttaagctataaaatgtgtactagcaaattgaaatcagttattaaaacctgtttcacagatacatattatactgttattattttatttatttatttttcagataaggtctcactctgtcacccaggctggagtataatggcatgatcacaactccctgcagcctcaacctccccaggctcaagccatcccccgaccttagcctcctaagtagctaggaacacaggtgcttgccaccatgcttgcctattttttttttttttaattttcattttgtaaagatagggtctcactgtgttgcctaggctggtctcaaactcctgggctcaagggatcttcctacctcagcctcccaaagtgctgggattacaggcatgatccaccatgccagccctatattatatattattttcttcaaattttgaagacataacacaaatcatggaaaaaatatttagggactatgtactatattgagtctttggtgacaagtattacctcaaactctgtgctgtggcttttacagttaactttgaaaaagtatttcaaaatttttttcagtaagataatatatattgacctttaatttccaaaattctgggtcagtggtacattttttaatatacgaaaagccagaatataataattgtatcttaaattcttttgaaaccaaattagggcatgcgtagacagatacagagagataaaagagggctatatatggttttatgaattattttttacatgggcagacagatacagagagataaaatagggctatatatggttttatgaattattttttatttgagaggtaaacaacacatctttccatgatatactcttctgtagagtttaaatttgtatattatactaacaataaattttttaaaaataatggtgtttaaattagtttgagattaaaacatgccagtaaatacatatacatgaataactggctcaattcctaattgaactgcaaaggctctcattttgcaaattgagatgttaagctcactgttttaaaaggggarttaagtaattaaagaattttatcaagaagcacatggtggatgtattttaagtggaagtgatctctattatttctccaaatggtctcgctgagacagaatacgatcaaca

SEQ ID NO: 713472 - DNA, 1561 bp, Homo sapiens
gtggcagtcatagaaaacaccttgaattgacagttttcttcagaaagacttaatgttcatcttaaaattcaaagagatgaatgagaatgcctctacataaaagccaatgagccccggtatgaaatagcagtcatattgactgttctcttcataaagctgagaaacaagttgggattcagtgatccatccttaaattgacttgatggttttagtagtttcactgagtgtactctctggggcctgtatgattttgtaccctggctctattagcaggatcctatcttactagctgtgaaaacttgggcaagtttccatttctgtgcctgttatctcatttgtaaaatattgataatattatctaacctgaagacttgttagaaggattaaatatatagataaatattaagctttcagaacagtatttgacatatagtcttgcataaaatatttgacatacagttttttataagtgtttgtagtttttgttttaattattgttttcatttactcttaaaacatcatttgttatggactgacttgtgtcccttgccctcccccaaattcttatgttgaaaccctaactcccagtgtgattatattgtgagatagggcctttagtaaggtaaggaaggttaaatgagctcattaggatggggccctaattccataagactagtgtccttataagaatacgaggagacatcagaaatgcctctctctgcacatgtacaaaggaaaggccatgtgaggacacagtgagaagataactgtctacaagccaggaagacagcattttacagaaaccgatttgcttccaccttgatcatggacttctaaactccagaactgtgagaaaataaacctctgttgtttaagccacccaatttgtggtattttgttaaggcagtcttgcagactaacacactattttgaagattgaggcttccttgtgtatacaacagtaggtagatttttttttcacaagtgacatttctatgtattaaaacaatataaaataaaacacatgttgattaaaacacactactaagaatcaatacatagggtctatgtaatttgaacgctctattttttttctttcaaataggaatgggagacagattatcaaaagttttgataaaattgaccatgatacaataatttaagcactttatgtaggtagactttacagaactttaggaacacctgatgcattatttgaaacatactctattgctccaattatctatactttattattayatttttttctaatggtttaatatattatacattttgatttataaagtgagttaaagattactatggcatacattttattttattcttgaggcatatattaggcccatgaagtatacctaacttgagaggacacaagcacagcaggcttagaacttgggaagagctccttcatctccattttatatccttttccttttcttaaaaaaaaaaggtacaataataagaaaaaagtatataacgtattttggtcattgataaagagattattctttgagaacctagtgtatgtcatatactgagt

SEQ ID NO: 713473 - DNA, 603 bp, Homo sapiens
ttgttatttataaaataagacatatgataaaaggcattgtattagttttttatattacaaactagaagccttttaagagagaaatgtattgtcttcagttctgtaggctgaaagtctgaaatcaagatgccagcaggactgattccttctgagtgctatgagggagaatctgttccagggcttgcccctagcttccggtagccttaggcattacatagctgtagatggacttttccctgtgctttcgcatcatctttcctctatatgtgtttgtatatgtgtccacattttaccttttttataaggacacaggtcatactggattatactggtcatactggattagggcccaaccaagtgacctcatcttaacttgatcatctacactggccctatttccaaaaaaagttcaattcacagctactggggktaaggatttcagtatatttttcagggacacaatccaacccacaataggcatgctgttactttaataaatgtatatatatagcaaattcatttgtttgggtttggaaataatacaataaaaattaatgatttaaaatgaaaagaaccatattaactttgttagatgctagaatc

SEQ ID NO: 713474 - DNA, 3334 bp, Homo sapiens
ttcaggcatactatttctgaatgagatgcccccaattctgcgggaacattgtaccactcttacgtgattctttcagtattacttcttgctttcctttgattattatcttgtcctgtttatcaccttagctcatccctcattctcatcattatcctatttttgccattcctaagatagatatgagaagggaaaataaaggaaaatatcttagaaatgaggtcatattatagtttttattatggacaaaagcccaaatacataaaggaaataggaagtcttcagatatcacaaaatgacttctatcttctttacaatagtacaccttaattcagcgtgtatattagaaactatggggatattttccatatgcaaatcttatcacaaatcttatcatagctgtaatacacaaggctggctttttactttttgctctagcctggaatatccttgtgaaacaacattgggaacttgctataagttaattctgtggaacctgttttatcatgggccacctacctatatagccttatcttttccagaccaggaatataaccactgatcttttctttccattgtcaatttttcctctcacaggcctacgcctttctttttgtgtaggattctaacttcattcactacagagaaatacaagaggtagcaataacactgggaaggctaaagaggattgggaatctcaacaaaattttacatttggaatataaatggaagctacctgtttttgtctccacattcacattcttatttatttaggaagttatggggagagtcaagtgggtggggcattgtaagttcccaagtcattgtaagaatgatttagaatatattcttgcttaatttctatcttgtctggatgagcgttcagacatctttgagttcagaccaagataggattgacctgacaccactgctaggtctggtagaacttgtggtttccttggaaccctcttactttctaaatggtctctgtgggaggtcacaatgaatgggagggcactttcctagctgacctcagaggttctcccagctattcagctgccttttactgcgtagttttcatcagcttttcacttgctgggtctttcagactaattctacctttgagagaaactaggcttttgtgttgctgaatgtttgggtttagtttcctcagtgcctgtgaggttttaatagcaggtgttacttagggaactttcctgctttttaatactagtttccttcagttactcttagccaactcctagattttcctggatcaaaattgtgcatctagttggatgaatttctctttcttatctgagagatgctcatttccagaataaaatgattcatgcctttcctcagggaccaacctgtttgggtctatttcccagatactctttgaatctgttctcaaccgtttttcccccatttaaattctgttaaacagtagtcaaccttaacaatttccaccagtgggaaaagttaggttttcttctaatatttctgcttctgcctctgaaagctctcccatcattcaggggaaaaaacaagctctgcgtctatagtgagtactatcccagtgaaattatgaggctggctttcagtgctttgcctggtttgcttttcattcaaactactaagttaaaatgtttttcccttcttttttcttaatttttgaagtgttaaagtaatagcaagactaaattgaaacaaataaattactctgaagttaaaaaatcctagtaggatttttccccttattttaggaagtttatgaagtgataattgtatatagtaattcaaacatatgtatagttcttacgggtttttagcccctgtctggtgcaaagggcagcagatgcttacctcactcatattgaaagactagaatagtaataaagggagatggatagggaactagagttgatttatttaatttagattgttaaaagaaagaaatttaggactttttaaagttgaactgcgattcctgtgtagcccttttaatttttttgtactgataatggaagttaattagaaatctaaagaaggaataatttatcatgtcattaaatatttctagaaaaaagtttgtgcatattttttcttgagtaaagtataagaagatagacactgtacttattttactatagtggtgctgtcaagaataagagcataagaactctctctgttgagggagtcaatgaattgaatcagttaaaacagatttataagggtaaacagtaattcactttagggttttaatttttgtagtttagatattctaagctagtagggaaaatattttttaattaaactggtccaaaatatttaaaaataagcaaaaagtaaatttttgtgaaatttgacatctttggggagtttcaattaacaaatttctcaactaatattttcattttcaatggaaaatacactcttataacatattacatgttcaatactgtctaaaattatctcatcccttagtgcctctaaaacatatgaaacatttaaattttaaagaaattaagattttgttttgtattatgaattgaaacacttaatttaaggtctttgctgccgctttacctggaagtgacatcgtggtagccttgtggccaaattgaacttactctggatattaaaaatgtaagcaagactgtgcaagctaatgcatcatgtttatatttgacagataattagtttatacagtttaaattaccatacctatcttcttttctttttttctccatgggggattaaaagatttttgtttgtcttggatcagctaaaaatttttacaatgcagaaggataaattggaacttgctccctactagtcatgtccaataattctagaaagtacctcactcccattttcatattaaagttgattttctcatgggttttcctaccattactttaatgtggtcagtacaaagcacaccacattttggctaacttagttgatgatgatgtrataagagtgagtgtaaacatttaagaatttcttttcaggttacatgtcaagtgatgtgccaggaaaaatcttgttgttttttgctatatgaacacagcataggactactgtagaaaaaaaaaaaaaagaaaagaaaagaaaattcatgaagccatcactgtagctatgccagcaggcatgaaaaccttttatctcatgtaaatgagattgctaaagaactttacaatgatccacttccccttaatgcatagtaaatatagaatttttatttatgattttctttataacattttcttttcacttgcctgtatttttctaagtagtctgctcccctgttatacttcttggaatgtca

SEQ ID NO: 713475 - DNA, 1436 bp, Homo sapiens
ccatgtctggctaattttttattattaktagtagtagtagtagagacggagttttaccatgttggccaggctggtcttgaactcctgacctcaggtgatctacccgccttcgcctcccaaagtgctgggattacaggcgtgagctaccaagcccagccttggagtcattttagatctagaaaagaacctctcttattcctgtataattccagtgtggaccaatgatacttatcaatgtccaaatgtgattcctaggtgacaaaatgccaatagttagctggatcacagccagctgaagagcagtaaggagcatttggcagcttttgaaaggctgctcataagactgtgagtagttacagcagtgaaacaggatcagcctgatcaaatgttcaaagcgcttgcaacctgctgttaaggaggtgtgaaaaattagaaatctgtttttaacattgtcttttttaagttcctcattattaacacttaagctaaaaaacagattcagagtgtcaaaatctctgccaatggaaccaaataacatgaatacccagcctttgttttaaacacacttataacgtattttttatattttcaatgagttttagagaaatagataactgacatactacatacagataatgaagatactgaactgagcattagtaatgttctagaacaggaataattgcattagttaacacagacagagacatcaatgaaaaatttaacaactagatggatagttgggcataaaaaagtactactttgctgatgtttcattgatgtcatatattataaacaagtaatactgagcatgtaggtttgggattaaataatttggtgtggccagaaatgtaaacacttacctcatatagaaaggcaatttcaaaattaaaatgactactatcaactttggagaactgaaaagggcaaaggcataaaaatgtaaatttttaaaaactaattaaatcaatgttatattataaataattatctatagagtttagtaaaaatttccattcaatcttgcttagcagtatacattggtattactgtgctgggtgcacttgttaatatgatttgctctacttcaatccaatttgaagatcatcctttatacacaggctcccactttctatggaatcttgatatacacagattgtcataatctttactttctgtctgtgttatcctcacagagagcatattgtcctttatatcctcccaagacactggtggcttcttaatacttgttgactaaccttggaagtcttgctgtactctatttcaatgttttcacataaaaattaacaccagaaccagacttccactcatgccatggaggagaatgtgggatttgacctcttgctgtaaacaactaaaaactggatataggaaacaactgtttttagacacgggacaaaaggcaatgcttccca

SEQ ID NO: 713476 - DNA, 1436 bp, Homo sapiens
ccatgtctggctaattttttattattagtagtagtagtagtagagacggagttttaccatgttggccaggctggtcttgaactcctgacctcaggtgatctacccgccttsgcctcccaaagtgctgggattacaggcgtgagctaccaagcccagccttggagtcattttagatctagaaaagaacctctcttattcctgtataattccagtgtggaccaatgatacttatcaatgtccaaatgtgattcctaggtgacaaaatgccaatagttagctggatcacagccagctgaagagcagtaaggagcatttggcagcttttgaaaggctgctcataagactgtgagtagttacagcagtgaaacaggatcagcctgatcaaatgttcaaagcgcttgcaacctgctgttaaggaggtgtgaaaaattagaaatctgtttttaacattgtcttttttaagttcctcattattaacacttaagctaaaaaacagattcagagtgtcaaaatctctgccaatggaaccaaataacatgaatacccagcctttgttttaaacacacttataacgtattttttatattttcaatgagttttagagaaatagataactgacatactacatacagataatgaagatactgaactgagcattagtaatgttctagaacaggaataattgcattagttaacacagacagagacatcaatgaaaaatttaacaactagatggatagttgggcataaaaaagtactactttgctgatgtttcattgatgtcatatattataaacaagtaatactgagcatgtaggtttgggattaaataatttggtgtggccagaaatgtaaacacttacctcatatagaaaggcaatttcaaaattaaaatgactactatcaactttggagaactgaaaagggcaaaggcataaaaatgtaaatttttaaaaactaattaaatcaatgttatattataaataattatctatagagtttagtaaaaatttccattcaatcttgcttagcagtatacattggtattactgtgctgggtgcacttgttaatatgatttgctctacttcaatccaatttgaagatcatcctttatacacaggctcccactttctatggaatcttgatatacacagattgtcataatctttactttctgtctgtgttatcctcacagagagcatattgtcctttatatcctcccaagacactggtggcttcttaatacttgttgactaaccttggaagtcttgctgtactctatttcaatgttttcacataaaaattaacaccagaaccagacttccactcatgccatggaggagaatgtgggatttgacctcttgctgtaaacaactaaaaactggatataggaaacaactgtttttagacacgggacaaaaggcaatgcttccca

SEQ ID NO: 713477 - DNA, 1436 bp, Homo sapiens
ccatgtctggctaattttttattattagtagtagtagtagtagagacggagttttaccatgttggccaggctggtcttgaactcctgacctcaggtgatctacccgccttcgcctcccaaagtgctgggattacaggcgtgagctaccaagcccagccttggagtcattttagatctagaaaagaacctctcttattcctgtataattccagtgtggaccaatgatacttatcaatgtccaaatgtgattcctaggtgacaaaatgccaatagttagctggatcacagccagctgaagagcagtaaggagcatttggcagcttttgaaaggctgctcataagactgtgagtagttayagcagtgaaacaggatcagcctgatcaaatgttcaaagcgcttgcaacctgctgttaaggaggtgtgaaaaattagaaatctgtttttaacattgtcttttttaagttcctcattattaacacttaagctaaaaaacagattcagagtgtcaaaatctctgccaatggaaccaaataacatgaatacccagcctttgttttaaacacacttataacgtattttttatattttcaatgagttttagagaaatagataactgacatactacatacagataatgaagatactgaactgagcattagtaatgttctagaacaggaataattgcattagttaacacagacagagacatcaatgaaaaatttaacaactagatggatagttgggcataaaaaagtactactttgctgatgtttcattgatgtcatatattataaacaagtaatactgagcatgtaggtttgggattaaataatttggtgtggccagaaatgtaaacacttacctcatatagaaaggcaatttcaaaattaaaatgactactatcaactttggagaactgaaaagggcaaaggcataaaaatgtaaatttttaaaaactaattaaatcaatgttatattataaataattatctatagagtttagtaaaaatttccattcaatcttgcttagcagtatacattggtattactgtgctgggtgcacttgttaatatgatttgctctacttcaatccaatttgaagatcatcctttatacacaggctcccactttctatggaatcttgatatacacagattgtcataatctttactttctgtctgtgttatcctcacagagagcatattgtcctttatatcctcccaagacactggtggcttcttaatacttgttgactaaccttggaagtcttgctgtactctatttcaatgttttcacataaaaattaacaccagaaccagacttccactcatgccatggaggagaatgtgggatttgacctcttgctgtaaacaactaaaaactggatataggaaacaactgtttttagacacgggacaaaaggcaatgcttccca

SEQ ID NO: 713478 - DNA, 1472 bp, Homo sapiens
ctgtgttgtttggcatactgctttgtaactttaagagggaagggccaggcgcggtggctcacacctgtaatcccagcactttgggaggccgaggtggatggmttaactgaggtcgggcatttgagaccagcctggccaagatggtgaaaccccgtctctactaaaaatagaaaaagttagctgggcgtggtggcggtcacctgtaatcccagctacttgggaggctgaggcaggagaatcgcttgaacccaggaggcagaggttgcagtgagccgagattgcaccattgcactccagcctgggcaacaagagcaaaactccatctcaaaaaaaaaaaaaaaactttgccgggcttcacgcgtgtaatcccagcactttggaaggccaaggcaggcggatcacctgaagtcaggagttccagaccaacctggccaacatggtgaaaacctgtctctataaaaatacaaaagttagccaggtgtggtggcacgcgcctgtaatcccagctacttgggaggctgaggcaggagaaccacttgaacccgggaggcggaggttgcagtgagctgagatcacaccattgcactccagcctgggtgacaagagcaaaactccatctcaaaaaaaaaaaggaaaaagagggaaggatagtagaactgaggctcagtaatttatttgtatattggggtgaggggggcaaaatatgaaataaggaccataataaagaatcacgcaattatatttttggattgttatttgatatatcataaaatttgttttggcattttgaaatactatgataataagagaatataaaaacaattcttttcactttttgtgcttataattatatttctgcaggggctatctgatgggttagagtgcctttgagaagaaatcagtggatactggatttgctcctgtcaatgaagttttaaaggctgtaccaatcctctaatatgaaatgtggaaaagaatgaagagcagcagtaaaagaaatatctagtgaaaaaacaggaagcgtattgaagcttggactagaatttcttcttggtattaaagagacaagtttatcacagaattttttttcctgctggcctattgctataccaatgatgttgagtggcattttctttttagtttttcattaaaatatattccatatctacaactataatatcaaataaagtgattattttttacaaccctcttaacattttttggagatgacatttctgattttcagaaattaacataaaatccagaagcaagattccgtaagctgagaactctggacagttgatcagctttacctatggtgctttgcctttaactagagtgtgtgatggtagattatttcagatatgtatgtaaaactgtttcctgaacaataagatgtatgaacggagcagaaataaatactttttctaattaataccttttatatttgttttttaactgacagtgttaag

SEQ ID NO: 713479 - DNA, 1472 bp, Homo sapiens
ctgtgttgtttggcatactgctttgtaactttaagagggaagggccaggcgcggtggctcacacctgtaatcccagcactttgggaggccgaggtggatggattaactgaggtcgggcatttgagaccagcctggccaagatggtgaaaccccgtctctactaaaaatagaaaaagttagctgggcgtggtggcggtcacctgtaatcccagctacttgggaggctgaggcaggagaatcgcttgaacccaggaggcagaggttgcagtgagccgagattgcaccattgcactccagcctgggcaacaagagcaaaactccatctcaaaaaaaaaaaaaaaactttgccgggcttcacgygtgtaatcccagcactttggaaggccaaggcaggcggatcacctgaagtcaggagttccagaccaacctggccaacatggtgaaaacctgtctctataaaaatacaaaagttagccaggtgtggtggcacgcgcctgtaatcccagctacttgggaggctgaggcaggagaaccacttgaacccgggaggcggaggttgcagtgagctgagatcacaccattgcactccagcctgggtgacaagagcaaaactccatctcaaaaaaaaaaaggaaaaagagggaaggatagtagaactgaggctcagtaatttatttgtatattggggtgaggggggcaaaatatgaaataaggaccataataaagaatcacgcaattatatttttggattgttatttgatatatcataaaatttgttttggcattttgaaatactatgataataagagaatataaaaacaattcttttcactttttgtgcttataattatatttctgcaggggctatctgatgggttagagtgcctttgagaagaaatcagtggatactggatttgctcctgtcaatgaagttttaaaggctgtaccaatcctctaatatgaaatgtggaaaagaatgaagagcagcagtaaaagaaatatctagtgaaaaaacaggaagcgtattgaagcttggactagaatttcttcttggtattaaagagacaagtttatcacagaattttttttcctgctggcctattgctataccaatgatgttgagtggcattttctttttagtttttcattaaaatatattccatatctacaactataatatcaaataaagtgattattttttacaaccctcttaacattttttggagatgacatttctgattttcagaaattaacataaaatccagaagcaagattccgtaagctgagaactctggacagttgatcagctttacctatggtgctttgcctttaactagagtgtgtgatggtagattatttcagatatgtatgtaaaactgtttcctgaacaataagatgtatgaacggagcagaaataaatactttttctaattaataccttttatatttgttttttaactgacagtgttaag

SEQ ID NO: 713480 - DNA, 1472 bp, Homo sapiens
ctgtgttgtttggcatactgctttgtaactttaagagggaagggccaggcgcggtggctcacacctgtaatcccagcactttgggaggccgaggtggatggattaactgaggtcgggcatttgagaccagcctggccaagatggtgaaaccccgtctctactaaaaatagaaaaagttagctgggcgtggtggcggtcacctgtaatcccagctacttgggaggctgaggcaggagaatcgcttgaacccaggaggcagaggttgcagtgagccgagattgcaccattgcactccagcctgggcaacaagagcaaaactccatctcaaaaaaaaaaaaaaaactttgccgggcttcacgcgtgtaatcccagcactttggaaggccaaggcaggcggatcacctgaagtcaggagttccagaccaacctggccaacatggygaaaacctgtctctataaaaatacaaaagttagccaggtgtggtggcacgcgcctgtaatcccagctacttgggaggctgaggcaggagaaccacttgaacccgggaggcggaggttgcagtgagctgagatcacaccattgcactccagcctgggtgacaagagcaaaactccatctcaaaaaaaaaaaggaaaaagagggaaggatagtagaactgaggctcagtaatttatttgtatattggggtgaggggggcaaaatatgaaataaggaccataataaagaatcacgcaattatatttttggattgttatttgatatatcataaaatttgttttggcattttgaaatactatgataataagagaatataaaaacaattcttttcactttttgtgcttataattatatttctgcaggggctatctgatgggttagagtgcctttgagaagaaatcagtggatactggatttgctcctgtcaatgaagttttaaaggctgtaccaatcctctaatatgaaatgtggaaaagaatgaagagcagcagtaaaagaaatatctagtgaaaaaacaggaagcgtattgaagcttggactagaatttcttcttggtattaaagagacaagtttatcacagaattttttttcctgctggcctattgctataccaatgatgttgagtggcattttctttttagtttttcattaaaatatattccatatctacaactataatatcaaataaagtgattattttttacaaccctcttaacattttttggagatgacatttctgattttcagaaattaacataaaatccagaagcaagattccgtaagctgagaactctggacagttgatcagctttacctatggtgctttgcctttaactagagtgtgtgatggtagattatttcagatatgtatgtaaaactgtttcctgaacaataagatgtatgaacggagcagaaataaatactttttctaattaataccttttatatttgttttttaactgacagtgttaag

SEQ ID NO: 713481 - DNA, 800 bp, Homo sapiens
tcaagagaagaccaagattattattaaagacttaaaaatactttttggtttgtattatgccacaattttattttaaaactttttaaagttttaaaactggttattttctcataaaaccagttatttttaaaactggttattttctcataaataaagcatgctatcataatcgcctggttccactggctttctagttaattacaacattcattttatatatatatatatatatatatatatatatatatatatatatatatatattcatttgatctgtttttaacatccaatccactgacactgaaacttcttattcaaataagtcctcagtataattgtatttctacacattagcaatgaacataaaacaattccatttagaatagcatcaagaaatacatatttaggaataaagttagcaaaagaagtacaagttttgtactctgaaaactacgaaacattgttgaaagaaattaaagaggatctaataactggaaaaacatttcattgctcatggattagaatatttaatattgtcaagaaatgacagatactccccraattgatgtacagattaagccaatacttatcaaaatcatagctgtcttttttgcagaaattgacaagccccatcttaaaatttgtgtggaaatgcaaaggatacagaatatccaaaataaccttgaaaaacaacacagctgggaaatttacatgttctgatttcaaaacttactacaaagctacaatattcaagacagagtgctatttgcatgaagatacacaaatagatcaacggaatc

SEQ ID NO: 713482 - DNA, 1285 bp, Homo sapiens
ggcagggggaggccattggagatagaagcaaatgagagaatacactgggcaatatggggataagcaaatagatgaaggaaaaatggcatgggaacttggactattttggcaacaggtaaccagcgatgagggtctgatggcatgaccctggggatcacttcagtgtggtgcataattaatctagtgaatcatgagggggtagggaacagggaatgggtgtgtggagaagagagagttgggatggacatcctctattcgcaagaacaggtgggatgctcggggcctcccccagaagtaagagacagttttgctcaaagaaaatgatgccaatttggtttgccccctaacaattcactgttctcctgttgccctcattccctatttaagaaaaggctggcctcactgtggcttatccttcaagaggccatacagacagcagctatacagaagttcataaataaggagtatcattcaaacctggacctgagccacaaatggtgctttaaaaaccacacttttcatcagctaaactttttactgaaagatctacagtaggttcagtagattttagctgcctggggaactgttagttctccaagtcacttcagagcaagaggcccttaagctgggcagttctaactttcaactcattccccacttgtgcagttaagaagactataaagagaataatgaaacagacctttgggagccacagttccagcactcctttcctgtagtttgtgagttcaaacaaggcaaaatgtttccagctctggatgctttctctgaataagagagtagaagccgcgtgggtactaagtgtgttttcaggtctcatgacgtgctgctaaggtgttaggcacaatgccatcttgatggcatgaacttggtaggtcatgtttattttattgaaaagactccctagggtctaccctgaaggcacatttgccatgctgttccatgggctaggaaggccccttaccaaaactgcagctctgtctgatgacttcctactggtctttaggactcacaccaaagtcacggctctgcagtgctctcctgagcttcacctttatggtctctttagttacttccacagcacatcatataacatggcaataactgtaagtttatgtaccccagaggacctagtccacagccctcagtttattcatgatagccctcagaaacattcattgtattttatccaatacctttaacacccaacatcatctttrgtgtagacatggatagagttgatgaaggacagttacacgtagttgtt

SEQ ID NO: 713483 - DNA, 3454 bp, Homo sapiens
aatcaaatggaactgttatgacaaacagtttgggaagttaaataatctccttttcctattttagacttgtataagttcaaaataatctttaagatattcacactaaattgttacctatatagtatcttttaatgcaaaaatatacagtataattgaatataatatcacttttattgaatgcatgtctttcaatctcttttaataatctcttttaataaatgcttacaaggcttttgttttatgagttttattcctccttgagttgagaacacagtttcttaaatttgaccatgaacattccattgagagactgatgataaattcacacgtagcctccctttaactgacggacttaaacttgatccatggatttgcaccacgaacttcaaaagatgaatcactgctgtagatgtgatggcctaattcttccaaatgtggctcaggatcagtggtagcaaactgggcagcatcatcaatttctttcctcacctcagccccaatttcctttaattcttccacagtggcgagcttgctgtttaccattctatcttggagaattattataggatccctcttacttcttacttcctgaatttcttctcgtgtacgataactgactccaggatcactcatactgtgtccatgataacggtaggtttgcagctccatcagtatgggcccctttccagatctacagtagttagctgcaaattttgttgcctcacgaacacacagaacatccattccatcgacctttagcccagggataaaattgcccctcttgtagtaatcagggctggctgctgctctctcagtagatgttcccattccatataggttattctcacagatgaaaacacaaggtaatttccataaagctgccatattgaaagcttcggctatctgcccctgattcgcagcgccatccccatataaagtcaaacagatctcatcgtttcctttatatttacaggccagagcaatgccagcgcccagggggccctgtgcaccgacgatgccattgcccccatagaagttcttggtatacatatgcatcgatcctccttttcctttagcacaacctcctcttcttcccgtcagctctgcgagaatggatcggacagaaagtccccgagtatagcacacaccatgagccctataggatgtaatgacgtgatccgaggggtttatgccggcctcaaggcccacgcaacaagcttcctgaccatcgcacaggtgacagaaaccgcgaatgaatttctgtttgtacagctgatctgccttcaattccatgcggcgaacagtcagcatcatcctgtagtatttaagcccctccgccctagtgagcactgtagtgacagggggaccctcttccaacagataaagatcacatttcttaatttcaaatgtagcgtcatttgaggagttacgggatgccaccagcactctgcgagctgatttctgggcaactcgcctcaacacgcgggagatgaaggcggccagcatattcttcacggagtgctgtagatggcagcggcgtcccgtaacgaccgccggaaggcctggcctcggctccgcgtctccttccggtgctccaatgcgcttggcaccatccgggcagtgcacacgggtgatagaggcaggtcctgcacagcactgggacatgggccacgcagcctgagctgactgatttgtacagtgcctgccagctgtaaaatgaagactaaaagtgatttccttttctggaggacttgggcaaactacagggcatcctaatcgccgtcattgctgaacctcaataatctgagtcccttttccctgttaaaccctggagcactgtatctcaagctttcccgacaagcrtatcaaatagaagaaaggaacaaactcagtccctaaggcacatgagagttctgagagttagtccaaaggtatttcttcctaccaatatttctttaatgtcttgtttttgatctttaaaataggtatgaatatttatcctgctccataatgtgccatatgtattttaaggtaacaacaaagctgtaaattatttgtagcttaattaactttaaaaacaaaacaagcacacgcacgttaacaaaaaccccttttaaagaaaagtcagtactctcaaataatatgccacatttatcctgatggcgtctagcacctgtgacacttgaagtggggagggaaaatgtatacaaacctcggcctgaggataacactttaaacccagtaataaactttgcttggtgtgggaaaattggaagcagggagagagggttgaggtgcagattgtggtaaaaagtttgtagtttgtgacattccacttttccttactctgtttaataattctgaatctctgtttttacctagttttatccctattttctgactacttcacttttgctcttccttttgtttatttcctcttttttttctttttggttttctataaaaatgtcttcagcaggtttccatagactttcaggtggtatttatttatttatttatttattttgctttcatatcaatcaaactggaccagccttagtccaggaaatctagaaacatgttcttatagtgcctttttatgtagtaaccattagaaagtgttacttcttataaagtgacccaccaaacaatacacagtttggactacaagagagcaacagagtttgcttatgccactggaaaccgttcaatcacaagagaagagaagccttagaccaagggatacaaagatcacatatcatttctctctttttgtgcttttaccaggaaggcgattttgtgccccaataagccaaccctaactagggatcctgttttatttagaatattaagccattcaccttaatgcatgctctgttttatatccattgcctatttgcaaatgataaattcttacccaaatgtccctattacatgttcaaagcagctgccttctctatatctagttgcaggtgttattttgggcacttcttttaatattcaggaagaaaagagaaaatagcttgttaaaaagttaagatacctcttaaaacttgatcgtctccccaccttctgaacccagccatcataataggcctcatcttttcactcaattgaaaattcaactgttggaattcatggtcttgctgtgttgtttgctccctctttgatagttagcctgtctctgctgttctctttcattcctccaggtattggagatctccagggagcattatctccataagaatgagaaaaatgacactgcaggatagaacagtagtgttaatgggtcagtgagtgacagctgagccttctctcagaggtatcagccaggccagtgctgccaggaacacaagagctgtacagtaaagtgtgccaatttaatcttgtcacacgtagcctggactgcaaagatagagctccccttaaaagcccagtgtgtcaagcctaaacc

SEQ ID NO: 713484 - DNA, 2137 bp, Homo sapiens
taaacttgatatgtgttcaatataatgtttattgaaagaaaagcaacctcaaacatagaaagattctgacaattgtaaaacagagaaatcaggcttagttaaattactgtgcatctccaacagacactttgcctagctatttatatgcaaattgaggaaaatttctgtaccaaaaagcctttgtaattaaaacatagttatttaaaatgctgactataatttttagtttacaaaacatactctaaaaatattttattttaaatgttaacaaagcatagtacctgaacaccatatgttccccctttttgcccagtaagttttaaattcaagacttcctggaaatgtgtaaccaatgtgaataaaatctgctagcacactagtatcaaagtgctctctcaatttataaagcaaaaccaggttatcaaactgtagggcttataagaattaccagtaaacctcaaaaaagtcacagattcctgcattcccccgtaaggagattctgatccagtagtactgtgaggccaaggggctgcagtttaacacatgtcacaggtgatactgatgaaagtggtaccrgaacatattttctagaactctgctttataaaacactgactgctttatgaaatattaacttaagtggctctttatttcacattcttagcacccatggcagttcttcaatgtcatcctaatctttgcagtgaagatttcatgcagtggccaaattttcaattaaacacaattctactcaaatttaaatcacacacatcatttatcacggctgctaaacctgttggttaaataacttttatgttccactccagaggcacctcatttttgtgatgaattaagaggtccctataaagtagccttatctacctgttcctatctctcatgagtgtttcaagagtatatgatcctcagatgctgaggttgaaaagagaaaacagaaacagcagcatgaagggcaaattaactggctactttagcagaacaatcaaagttgcattctatcacagggtagttgactgataatctaattctccgatttgtaagttaagggattcaattttgtcagaatggctcaaattcaggagggaggtggaaagttatttcatagcagcaacaaaaacaacagcaacaaaagaccaattgtaattaaaaaaatcaacaataatatatctgaagaattaatgggtactatgtaaggcattctaataagcaaaacatatgcactttatcactaattttaagttcaagacttctgtacgagatacataataatattatatatatttggtgaataaaaaactagattaactagatgtccaagaaactagtgggtgaactagaatgcaaatttacaaatgtgccatgagaactataactagcaaagtgacccaagagtactgtcttccactaaaacaatctacacaggaaataaaattaatcagagcaaggagagtggttagttgaatgaacctgatagttaatgacatcaaactatgatggcctgaggcattcatggagagtgctggggaaatgttgacaaatttttcttctcagactcccatttctttacactcaggctaactatcttcaggaatattaatatcattgatccacctatatttatttcatatcaattcaattcttgttatgtgctcctgactgtaccccccaccaccccaacaatcaccttgattaggtggacctttcttaaatctcctccaggataaaccgagagaccatttcacaggatgaggtacttcatcgaatgactaatatactacattacttattgattcttactagtatggttctcggggattaatatgtccatattttaaaaccctctcacttatgcccatctacttattacatcagaaaccagacaatgtaataagtaccctaagctatggtggaaaataatttgtaatcctattcaatcaactgataaatatttattgagagtttactttgtatcaggcaatgtactaagtgctatttcacttattccattctataaacatttgtgtccagtactagaatgtgctgaacaatggaaatctgcaaagaatttactcagtaatacacttaaaaaccaaccaaccaaccaaataaaatacatccca

SEQ ID NO: 713485 - DNA, 1081 bp, Homo sapiens
tttattatctcacttggatttttataggaggtatcttttgtattttattaaaaaaaaattacagcatgccttagtgttgtttcaagctttgccaggattttttctgtagtggcagaactcatgagttttagaaatgagaaatttaatcacgttttttttttttaatttgaccccagagttgtttttaatttatacagtaagttctcacttaattgatagattcttggaaatagtgactttaagtgaaatgaagtataacaaaaccaattttaccawtggctaattgatactaaaacaagagttaaattcccacaacatattcctggtcacaaagcatcaccagactcctaaataatgacccaaaacatttctaatatgaaacattgaaatatatgtgagccatacataaagaatgattaacaaaaacaagtaaggtaattgtttacctgcctattctagttcagggttatgggtggccagatcctatcctagcagctccttgtataaggtgggaaccagccctggctaggacaccattccatctcagggtgtattcacaaatacccacagtcactcacactgggattattagatatgccaagtcacctgatgtccatacctttgagatacttccttctctgggtggaaaccagggtacatgaaaaaaacccatgcagacatggggataccatgtaaagtccacacagacagtagtcccagccaggaatcttttcctttttctcatcaatgttacaacaaaatgatgttgaatgacttgaatgacattattcaaggtcttgctgtaattctaaatcattttagtggtggcaggattcttactgagattcctctgatagttgttttttcagtagtataagttaatattcatttattcttagattgaattgtttaataaaatgtgttgagattcttatacgccagacactgtgttaagcagagtaggtataacagaggaacatgtgaacaatttagggagaaattaatgaatcagtaggagataaaaaagtttctgtagaggaaactacgctttgtagctgatgcgaataaatgattagaagta

SEQ ID NO: 713486 - DNA, 659 bp, Homo sapiens
atgttggaaactattaaaatatagggaaataaattatttgaacttatatatacagccattaaaatattttcaaagattgtttaataacatgggtaatgctcattaatatgctacgtgaaatatcagaatataaagctttacataacatttcaattttattaaaagtatgtatttaaatagtatggtgaaaaaggttttttaaaaaattatgctgtactaaataactggcctctgggtagtagaattcaaggtaatttttgtactctactttttttgaaatttccacattttctacaatgagatttatagggtggaaaatgtgttggtrtatatataagtggagtcttaaggaatcataaaaactgttgaaatttttccttatccctcacctgcttgtgtacagcattgagctttttgtttagatgtgcattgttttgcaaatggttcttgttttcagtggtatcttttagtactgcatatggcatctttctagaaatatgtgtcaaatatttaaaaattcttttacagcttatatacttttgatatgcgtgcactggacactcctgtaatggtccatatggatcatgtatctgcagtgcttgatgtggattactctcccactgggaaggagtttgtgtctgctagtttcgataaatcta

SEQ ID NO: 713487 - DNA, 1906 bp, Homo sapiens
tatgaaaatatttcaatgactcttcactatgttagtcatatggtaaaattatttactcctctccctataaaaataaatacaattattaactaacatgactactgcttaggaatagtacttaatctttacgtacagggcacagaacaattcacacttcttgcccccagtccctccacctaaaacccagttacacaaacattttaactctggaggaaactgttaaataaataaaaagtggaatgcagattggcggcactttgaaggcaatatagtattataaactatagtacaacatatatagtaaaatattatttcagagatattctggaatttgtatctctgaatacaaaatactttttaaaaaataagaatagttcagtatctactttataaaaaaatatatatccaaatttatatctactggcactctttagaggaatgtcataaggagaataaatggccccccaaagatgttctgtcctaattgcaggaacacataaatatgtttccttatatggcaaaaagaactctacagatatgattaaaataagaagattattccggaatatctgggtgaattcaagctaatcacatgagttcttaaaagagaaaaaatctttcctagtcgtgggcagagagagatgcaatgacagaagaaaggtcagagagacggcatcgcaataaagattcaaaatgccccactgcttgttcagagatatagcaagttatgtgcaagtaccagaaagaggcctctaggaggtaagaacagccctcagctgaatagccaacaagaatctcggtcctataacttaaagaacgtaattctttcaacaacccaaatgagcaaggaaacaatcctcctttagtttctagaaagaaatgcggccctacctacacctagattttggcccagtgagaaaaataagtgtgctaatagaagtattaattaattctttcagattgaagactgttttatgtgtgataaaacagattttcatctatgtgcctgggaagcaaactattataaaaatgataacagataccaaatatgccaacaaaacaagatgaatgtgagcaccacctccatctgtcaactgaacaataccaaagcaccaaacaccattgtggttattctgctacccagttatattgtttagtgtatccttttcccctagttttagcctcccagaagcctagttacaggatacaagaaactaccaaactatttgtctcttcgagctgaacataagcttgattggaagaaaaaaatgctaaagggcattcctcctgtgccttaaaggagcatttatccagttcctctgtttagcagaacctatcaaagtatttgtattatataaaaatactaaatgtttataaccatgtaactatacaaaagttgttaattccaaatgccttaaaaagcatttagctagcactatattgtacaaaaagtaagagttttgacaggtatatataatayagatatgtgttcataatatataaactgtattaaagttgttagttcttgaccaattaatttatactatctagttgtcttcaattttgtaggttacccgtattagaaagaaagtaggtaaaataatatattactcctgtgtaaaccttttcttaactttcccctttccatagctctacctcaattcctatttctggagcttcccatcacaaaacccaataaaattcatctcccttttataatacaagcactttctgaaattatgcaataattcagtaagctaatataaagatgcacagaatctctccccaacttacacatgtcatttccataaataatcctccttctatattttcgtaaaatacactcatatttccaaaattcccttagaggtgatacagaaatatatacagggaaggaaatttgtcc

SEQ ID NO: 713488 - DNA, 613 bp, Homo sapiens
taacaaaaagttatttggaggttaaagcataatatatttggacatttggttttaaatgttcttaatttttttttaacgaaagagtaggcaaggaaatgaaatgaatagactttataatggaatgatagtaatgagagacaaatcattttgaagattttgacagtttactaaataatacattatcaatattgggtattaaattacaaatacataagaaaaataatactaacggtcttcaatggttactatttcccatgaagttttagggttcgcttacctagtcattactatcctttgtttctttttagtgctgttcattacattgaaaattaacaygtattttaagagtagagagaaaaataaactgaaatttaaatgcatgtctgctgccttttaacatttatgttaaaaaatacatttgatgtgtgaagatactgcaatggttagataaaaatatttttgcatgatctgtgagtttcaatgttcatattaagtattcatgcaaagtggagagaaagaaggaatttgaaccttattaatatttaatatatagatgacaatacctagatgcatataattttaaatatgcatgtagtgaaagattcatgcttga

SEQ ID NO: 713489 - DNA, 1415 bp, Homo sapiens
tttaactataaattaaatcagtggcagagccagtactcatcatcatagcactaccaccaaagtaagcatgacaaaaatttctacctattaaatacccataaaaggaaatgatatcatttttacaagaataatcttaccaactgggcttctggtaatctattgatatgctggttgtacttcaacttcagcaattcatatgccataaactgaagggcaccatgcgatgttccaaacagcccaggaacaaatccctacaagggaatgatttttaaaaagcaaaacaacataccgtttgaagaacaatatatttaagtaaaatactttctcttctctctcattacagcactttaagcaaattcatttaattttgcacaaatcacatttttaaaatatggggttaaaaacttgtaatataaagacatgggtagtattctcttctactttatttttaaaggtttggatgttcacatattagtttttctttaaacagtatacatataaagaagacccacactgtcaagacttgaggtgtgagtgggaaactaaattctggaaagttaagaaactaaaggtaatggtaaatcaatgaactgagcataggtattctgaaagaataaggcagaaagtgacgaaaaaacataaaaataatatatttataaaattcttgcttataggtcagtaaaatcatatcagccttaaaatgattttaaaagctattactcaattcttgaaaaacaaactgaaattcaatgtgtctaattttgattttaacctatgtatgcctaaaaatttctttatggggataagcaatagatgggaatagaaggcagaaaaggggaaaataaaaaggagttataaaatcagaaaacagatctgacactaggaaaaaaatttttaaaatattacaacaggcaaaaggctgggtttgatttgtttygttatttttaaatttatgtaagatttgagatgaataaaaaaactcaataaaataagatcctgttagaactgctaatgtcttctccagactacattatcccaggtccccaagagaccacagcttccaaggaatggagtaaggaataagtgacctggttgtataacttatcaaatagaaacttgacaaagttttagacagatctcatgcccaccaatgtcatgatgatacatcctatgttaatggggacaaacagcttaaagtacaatttcagtattattaactatatttcagttttcattaaattgttttttgcctaagtgtggcttctttttaggacttactataggtcattcagaactaagacaacagagccaacggaaattcaaatttttcagttatttaaaatatattgataatttgttaccttatataatccacgcacaccttcatacttatatattttcacaagtgtatcaaa

SEQ ID NO: 713490 - DNA, 1415 bp, Homo sapiens
tttaactataaattaaatcagtggcagagccagtactcatcatcatagcactaccaccaaagtaagcatgacaaaaatttctacctattaaatacccataaaaggaaatgatatcatttttacaagaataatcttaccaactgggcttctggtaatctattgatatgctggttgtacttcaacttcagcaattcatatgccataaactgaagggcaccatgcgatgttccaaacagcccaggaacaaatccctacaagggaatgatttttaaaaagcaaaacaacataccgtttgaagaacaatatatttaagtaaaatactttctcttctctctcattacagcactttaagcaaattcatttaattttgcacaaatcacatttttaaaatatggggttaaaaacttgtaatataaagacatgggtagtattctcttctactttatttttaaaggtttggatgttcacatattagtttttctttaaacagtatacatataaagaagacccacactgtcaagacttgaggtgtgagtgggaaactaaattctggaaagttaagaaactaaaggtaatggtaaatcaatgaactgagcataggtattctgaaagaataaggcagaaagtgacgaaaaaacataaaaataatatatttataaaattcttgcttataggtcagtaaaatcatatcagccttaaaatgattttaaaagctattactcaattcttgaaaaacaaactgaaattcaatgtgtctaattttgattttaacctatgtatgcctaaaaatttctttatggggataagcaatagatgggaatagaaggcagaaaaggggaaaataaaaaggagttataaaatcagaaaacagatctgacactaggaaaaaaatttttaaaatattacaacaggcaaaaggctgggtttgatttgtttckttatttttaaatttatgtaagatttgagatgaataaaaaaactcaataaaataagatcctgttagaactgctaatgtcttctccagactacattatcccaggtccccaagagaccacagcttccaaggaatggagtaaggaataagtgacctggttgtataacttatcaaatagaaacttgacaaagttttagacagatctcatgcccaccaatgtcatgatgatacatcctatgttaatggggacaaacagcttaaagtacaatttcagtattattaactatatttcagttttcattaaattgttttttgcctaagtgtggcttctttttaggacttactataggtcattcagaactaagacaacagagccaacggaaattcaaatttttcagttatttaaaatatattgataatttgttaccttatataatccacgcacaccttcatacttatatattttcacaagtgtatcaaa

SEQ ID NO: 713491 - DNA, 1255 bp, Homo sapiens
cgccaccctgtttcactggtttccaaggctatcaccattccagattgtaattcccaaagcttgtgaastgtgtcaggagccctgtgttctacagctctatcatcaactgcctcctcttaggctctcagctcctttaaaggcaaggcttccctcccccagtcacagtgcctggcatatagtagatgctcagtaaacaccgcttgggttgaaccaccattcgtgctcccatgaaaaagccattctccgtcctgcttgtcttaaactttgtcccatttacttcccctggaggacctcctggtttcttctctcaaatcctggctactatgaaacaggctgtgacttctccactccttatacacctcctaattataaagtactattttaggattttgtagcatatgaacagtttaagacataaaccctcactgttacttttcattgtttcatgtgcatttttcttgcccctcagcagagtacaactcattgaaggcatgttttgaatgacctgtgttctctgtccctctcaaaatgcatggccacaaaataaatatttgactgagattacttaaaccaaattggccttggactgaggtttcagagttacatgtcacaagacctccaggatcctcgtagtttaaaatctctccattttaagcctaggagaccatctgccccaaacctcctatagcttgcattgcatctatttaagtaacctacagtcttaaaagtaagcaaaatattccctttccatgttagaatcttgtttcccttttcttaacattgaatgactttcattttcctcttggctctgtcaatgaagtttgatgtggcaagggtaatactgagatacttaatccctatgtgtaaattgaatttcaattcattcgatgacccagttgtctggactaacacatctgtcatgctaccaggcagatgggccaaaaatgcctcccagagaattctagccacctcaccgttcaaccacactggcagtctgacaagccaactgacttcctgggacagccgtcaggcctgtatttcaacaagacttggggtggaagtcagggtgtgtctagagaagctggcttaccctcagccactcagttacttggggtctacagggctcccgggtggtctctgggctgaccagatgtttaatgtgtttaaaggcagccaaaagtgtgtttctctgtgatccagggtggtgaaaataattttgaaatcaaagttctctcccactctgatttcaggagca

SEQ ID NO: 713492 - DNA, 1001 bp, Homo sapiens
aatttaaatcttacttaggaagttataatactgtgcatggttagtccaataattctttcacctaaaagttcccctctctagatgtcaaatgtatagatatttgctagtattaaattgctatgaaaataatcacaatattaactaggcatggtgactcatgcctacagtcccagcactttgggagtccaatgtaggaggatcacttgaggtcataagtttgagaccaggttgtgcaatataacaaaattcgtttctataaacaaaatttaaaaattatccaggcatggtggcacatgcttgtactctcagctactcaggaagctgaggtgggaggatcatttgagcccaggagtccaaggttacagtgagctatgatccagccactgcactccagcctgagagacrgagcaagaccttacctctaaaaaataaaaaataatgatcacaatattctatcaggcaaaatactggtaatgcccaagaacttaatttataacttacctctaaaaaataaaaaataatgatcacaatattctatcaggcaaaatactggtaatgcccaagaacttaatttataactggaaattagcccttcagattttttggccacagggatcataaagctttatattgctccatttctgcaaatggaaattagtgtaaataaacagtgtacctaagaacatgatttaacccaaggtgcaacaaacaaataaacaacaatagtaacaacaaaatctctagcaatttcaaacttttagccaggactctggagagaatggtcatgaaaaagcaactggcatatatatatatatatatatatatatatatatatatatatatacacacacacacacacacacacacacacacacacactccactgcactccagcttgggcagcatagcaagatcacatctataaaaacaaacagtcaatttattatggtaaagtgccaaatattgttccagacttctttatctgaaaattaacacttgtt

SEQ ID NO: 713493 - DNA, 1001 bp, Homo sapiens
aatttaaatcttacttaggaagttataatactgtgcatggttagtccaataattctttcacctaaaagttcccctctctagatgtcaaatgtatagatatttgctagtattaaattgctatgaaaataatcacaatattaactaggcatggtgactcatgcctacagtcccagcactttgggagtccaatgtaggaggatcacttgaggtcataagtttgagaccaggttgtgcaatataacaaaattcgtttctataaacaaaatttaaaaattatccaggcatggtggcacatgcttgtactctcagctactcaggaagctgaggtgggaggatcatttgagcccaggagtccaaggttacagtgagctatgatccagccactgcactccagcctgagagacagagcaagaccttacctctaaaaaataaaaaataatgatcacaatattctatcaggcaaaatactggtaatgcccaagaacttaatttataacttacctctaaaaaataaaaaataatgatcacaatattctatcaggcaaaatactggtaatgcccaagaacttaatttataactggaaattagcccttcagattttttggccacagggatcataaagctttatattgctccatttctgcaaatggaaattagtgtaaataaacagtgtacctaagaacatgatttaacccaaggtgcaacaaacaaataaacaacaatagtaacaacaaaatctctagcaatttcaaacttttagccaggactctggagagaatggtcatgaaaaagcaactggcatatatatatatatatatatatatatatatatatatatatayacacacacacacacacacacacacacacacacacactccactgcactccagcttgggcagcatagcaagatcacatctataaaaacaaacagtcaatttattatggtaaagtgccaaatattgttccagacttctttatctgaaaattaacacttgtt

SEQ ID NO: 713494 - DNA, 573 bp, Homo sapiens
tatggattattttctagatcagtggttcagatagtgcttttaaattttagacaggaattcacatcgcctcttgtgctctctccaaaatactaattaggaataaagctstgactaaacttgtcattacctgctccaaacaaaagttctttatgcagaaatcaactgctattttattacaatacaaaggtagacatgttgctgttcatattatttgttttcatttggcttcccattataaatgtaacctgttgctttgttaaccattgccaacctggaaagaacaaagtcaagtcaacatattttgaaaaggagtcaacagatttggtatccaaattgtagagctgaaaatgcaattccatttaatgagctgagattatacatttatattagaatatgcctagcaattaaggaaacaaatataagagagacactcaagagatcacggattaataagacagacaaaaacgcatttccattgtaactaagcacaatggttttactattatgaaggatggccgacttagtggaggtggggcaaggaaaaggggaggagaagaaaagggacagaaggga

SEQ ID NO: 713495 - DNA, 2669 bp, Homo sapiens
acaaatatttccctcctctcatgaaaaaacacaactattgtataaatcacattgtttgccattatagcgctttgctgatgagagcaaataatattaacatatgtctatagatggtgagagagatatgggtttataagtacctaaatataatgtatcattaccacaaccaattgaatgagtgaatgccttattttccatgcaggtgctctgagtttttggtgaatagagttgtgttatttgacttttttttttgtatgatctgataaattgctagtgatgcaataacaaaatgcactgctattctaagattaatgattatgttgagtgttgagattatttattttcttaaaaaaatcagtaaaaggacaccattcaccttggctttcatcttaaaagaaaaaaacattaacataacttttgatttcaaacatgtttatagcggcagtaaatgatcagtcaaatgtctggatatttttgttttacagattactcaatttgtatttgaacatttaggattatgcacacatactttacacaatggaaaggagggtgcttttataataacttagactccttgtttttatatattattgtattaataaatggatgttttaaagcatatgggattccagaaatggttttgttgccttccagaatgtttcatttttgtatgtaagtcacaggcctaaataacaaaaatgttgacagtctgcccaaacttactttagtaaataaaaagccgacagagcttttttatttttgtgggaatttaagtgggcaaaggtccatatgttatacacaaacacacacagacacgcacacatattttgtctggacagcctgtaatgtcttatacctttgtatatgtttttgttttttctcttatgacatcaaaactctaacaccccaactcttcgcattctgcacgtaaatcatcactgaaaatgaacatcatagcttatatttcatggctttatctctcagaagattcagctgtgtggaaaccaactttgatattgagcatttcccatattcaatttagagtaaataaattttgcataggtttagtcgaaacataaaaatattgaagcatataatttaaaatttgagaacaggagatattaaggtgtttagcatttgaaagcatggtcagctccagatatatttagaacttgcattatagactcttctaggaatgtcaggaaacagatgtgaggtgcatgttctggttcaaatggaaaggcagaaattataaaagacactgaaactaaagaaagaccatgaatatctgtataaaattggatggaaggaatctttggaagaatacttccccggagtcctgtgttatcaccatgggatagagatcttttgcactcattgccattcactctctttattttagttgatctgtgaattagtgatgaacgtgtcttgaatgtacacatgatgacaagggaatcatatattttgtaattggctctgaaaatttgctgaagcatgcacaatttaaactagccagccagccgttctctcctgctgattcgatggtatcaaggacacagcatctaaccctcacattttacttggctgcaaacctccctctgaacagggtccacggagcatggatcgtggtcttatgaaacaaatctttcctccttaaatgtcagtgtctcattagacctttgctttggttcattttagtagtgtttctccctgctctctagtgaaatgaagtgacgtggttaacagtctctgcagtcttaaatgtacaaggctgtaatttgactctaggtagactgtgactctttggaacaaagcatgtttgaacatacatttctatcacggcaggatttaaagatcacaataaaacttcatgaagacacagtgtatatgagagtaatggtagtttccatgttctataatgctcaattaagaggttccaactgacctctaaaagcccctgcctgaattatggtgatgctcaattgttaaagagagtctaccccttgtatttcttgagggttgctacatttggtaatgtgtactatagggacatacattatccataatgttagcagaaggttcctaccactsaactttctgtgttttgagcaaaaacacaattctggtttcataaaacaattttataatacatagacttagaaagataaaggaaagctttatctttatttatttattactgctaacaattataattatgataataacaataataaagggattcccttttattatcacctctcataatatccttcctttctggggactgacctggaagttaacccaggaagattgatcacctcaagttaagcaagagtacatttttatgctagataaatatctagaattctattgtcttcttatcattacaacatcattttttgttaaattcatttttatgccactataaccgtgttaaaactattacaaaaccacggggtattgtaatgatagtccctttttcctatctggtcttcttggaggtagtaatttacctttttccactttcatagtatgctatccacacactcttatttttgtttctagtgctgtattattctgttaaatctgcatttttaatggagacttctttttcgtaattttttcttgagaaaactgttttgctttctgaagcagttttttgcacc

SEQ ID NO: 713496 - DNA, 1445 bp, Homo sapiens
ccagccaatttagatgtagtgactgcattagcagaatttttagtatgtaactgacaagattgttggcaggattaaatgggtgaatatacataaagtgcttgtaataggacctggcacacagcaagtgctataataagtgcttactattatcatcatcatcatcatctccttcttcttcaccttcttcataagactaaattgacaagyataagtgtaccctaatgtaaagaaaatagcttaggcactgtgttttcaagtggataaaatgagatgatataaaacatataatacatagcaagttcttaatatgcaatagctattgttattattctctctaaaaattgacatttatttaaatttaataaaataaaatttaaataaatttaaataatttttatttaaaatttttcagattaaaaagcaacttatttcttatttttctttttttctttctttctttctttctttctttcttttttttttgaaacagggtttcactcttgttgcccaggctggagtgcaatggcgcgacctcggctcactgcaacctctgcctcccaggttcaagcgactgtcctgtctcagactcccgagtagctgggattacaggcatgcaccatgacgcctggctagtttttttgtattttgagtagagacggggtttctccctgttggtcaggctggtcttgaactctgacctcaggtgatctgcctgccttggcctcccaaagagctgggattacatgcatgagccaccgcgcctggcaaaaggaacttttttcaattgactttcatgacacacttatgcagaagagctaaatacaaggccttaaatcctaacttgcaacattcaataaacatatcatatatactatgaacagatattgaaaatatactattgtttctgtaaatattcatttactaatctaaaacaaaaggtttaattactacttgtcaattagcagatctcatataaatacacaaaagtatcattttctgttagtataatggtattgatttatgatcttatttttaacatatattaagataaactatacagttgctcttgtctcatcagttatcacctaggtactattaaataccttaatattttatttcataagcacatttgtttttatgcttgtaatagtcaattaaataaattttatttataagccatcctccataagagatcagcaatttcatctctatgcctgcaattcctgcagctaccaccaggttcattttatagaaatccaatacaaagtatgagaaattgatgcctggaacttggtgcaattgtctgtgacccaaagaaactgtgctaatttataacaaacttacttttttgctgagataaaaatattaaaattgtctaagaaaacaaacatagaataagtggcaaattttaaaacaaacaaactaggaaaatatttgtgatgtct

SEQ ID NO: 713497 - DNA, 639 bp, Homo sapiens
gtttattcttccatttttactcagagtttttaacactggatttctttatttccactctacaaacaaaattattatttttaaaatagaaattagattagtctttgcttaaaggccttgaatcacctcctaatttcttacacattgaaaaaataataataayataattttccaagactttctgagacccagttattgccttctcttttctattattccatttcctgttactcattgtgctctaatctatggttgccagaataaacaaatgaaaatacacctattacttgggagaaatacctacatttttaaaagtgcattgtgtatctggaattcaaacataactggaagtcttatattttctctgcaaccctacatagtggctatattcatctgttttcactctgctgaaaaagacatacccgagactgggcaatttacaaagaaagaggcttaatggaaaagtcacagttccacatggctagggaagcctcactatcatggcagaagtcaaggaggagaagtcaaggaggagaaagttgcatattacacggatggcggcaggcaaagagagcttgtgcagacaaactcccattttttttttttttaaatcatcagatctcatgagactcattcactacc

SEQ ID NO: 713498 - DNA, 966 bp, Homo sapiens
tcaaatcatcatatcgtataccttaaatatatataacttttatgtgtcaattataactcagtaagtctgggaaaatatcgttaagtcaaagattagagtcaacagaaataaagaaaaatcatactttgataacttcaggactaatcaaggatcaatgggtgacatgatatcatgctatgtgccattttgtgttaaacaaattacaccaacaataaaaaaaattggcttcaatcaacgaggttctttctttgtcttagaacatgggtgctttgttctgagtgttgtctgatgggtaggcagattagtttagatttctctataatgtggttaatgacaatagctcttctgctcagtttatgatgcatataaagaattttgaaagtagtcttacaaacttcaccatgaagtttctgcagtgacagctttaccagacatctccgtgtgggattttaaaacaaacacaaggctgtttggaaatacttggtatatataaatatgcaaaatatgctgaacagcgctaacagctgtagggtgaactccctcatccttgagcagaatattttggtggcartgtggttattttttccatctttgcttttaattcccgcccccccccccgctcttttctccacccactcacccatctacaatccactccaaaagcacaaatttaacacccttccccctacttccacactgcttccaagaaaatcattttagtagattcccactggaaaaggtgggtggtggcttgatggaatgtttctgagttacacgatgttgtaaagcctgagcttcggggaacttgcttggacttgatctgacatcaggctcacacacagcccagacactctgcaggccagattccattaaggcttatcattgcaagaagaggaaaagtcctgttgtgagtggccctccagccatgatgattccaaagatggcaaaataatcattttaagtgtg

SEQ ID NO: 713499 - DNA, 2318 bp, Homo sapiens
aaacccagatttagccaaacaggaaactcagaactccataccacccccaaatttttgctattgtcacatctgaatgtatttgctgtgagaagattttataatctcatagccaactgggataaaaagagacagtaggagaagctaaaaatggccaggaaggataggatactttggaagagtgagggagagtaatgtggctttcatgaatgagagctatgagagactttggaattgtagaacattatttgccacttggggatacagaataaattcatctgacatatacttctgatctcaaggaatataattatttctttactcagcttatcctcaaatcttataccggattggaagaattatagcttcttgatgttgacatcttatttttcatctgaaactgtcaactccccaatctctttaggtgttcagcacttgttttgtctgctagaaaaaaaatcaaaattacattttagtcctgaaaaatttttttaatgaagtaccctcatttctcacacttagagtatgtgtttgggcaagactttaacaaacatgaatagaataaatcatttcaaaacacttgtcttaatctgcagcttctgtgtcagaaagctgagaggctataagattctatcatcctcctactccccacttgccagttgtttgacatgggaaatgtacccttcctcattagtaaaaaggagatggtaatacctacattataggatagatatgcagattagatgggataatgtgtaagtgcctgtcaagtactagacttcccaggaagcttagaattttatgcatcaattagtactggctcaaatttactaggcatctataaccaggaactttacaaaagtcacctcttggaatcctcagaacaacttttcaaggcgagtttccttattttcacattagagatgagaaactgagttgcagggattttaaataatatgacacagcagaatcaggattaaaagtccagttgtgtaatttcatagctcatgtattttccactacaccaagctccatctcaatctactatatgattaatattgagtgcctagtgtttgctcacattcacatacaaaatataagtaaggcagaagtctagagatcgtactgcaggtaaccgaaagcctggtttttaaaccgcttataccacaaactagctgtactctctgcactactgtcttactttcttaaaattgcattatgagactgacacatcatgataagtaattggacaatctagtccaatttctgcatcaaaattcagattgctatgaactataatccccatttccttctttctctaaactcatgaaaataaagcaggagaaatcatcctacccccagaacttgtgtgagtgtgtgtgtgtgagtgtgtgtgtgtgaatgtgtgagtgtgtgtgtatcttttttttctctttatttagactttctatagggtcaactatacgtggtaaaaatactaatagaagtaaaacaaagtagtgatttcaatccctagaagtcctgatttgaattcatatggatgtttcatccatttcccttgtcaatgttgacagtgaatatggtgtctgtattgactatttgtaataggctaacccactctctctgatcaggtagtgcacattcataaaaagcaagtctcagaaatgccagctttttcatggaaatatttttagatgcaaccactgcgccttgctctctgctgtacttttggacccgtgaggcttccaaacttgcccgtgctccctggcaccatgacaattctcttagacttgtcaaaaaaaattcagcttctctgatgtggaactttttattgcatgtcccagaaaagatttttacctgtttttatttcttgattgttctactaggtctttgttaccccagccctgctaaacttcagctgctaaagcgagccaggaacaggctttccctctgaggtctaaaaggattagctttggaaacttaatcacctggatccaggatttgtggggcctgagacttatgaaagctggggggaggatgaccttttaagaaaaagaatacaaaatgaataccaagttatgtacataagtgaagactgaaaatgakaaatcacaatggacaaattttgaaaagcaaataaatgccatagaacacaaaattcagaaaaaaatgtatattttcattaattacttgcttaaagatgcatatgtgatgcactgcatttctaatgactagttttaatcctctgcacattttaaacctgttttttatctttttcactaaacccttgtgcttgctgatagaacactgataggatatgt

SEQ ID NO: 713500 - DNA, 618 bp, Homo sapiens
aagcgttagcacctggaagtgccatctgtacttacacagtaaaygaaaagcaaagcctcatccctggagggccacaacaagtttacttccaggaaaaaggcataaggagtcataaagaatgactgagggctgtcttaaactcaggtggttactccaattgcaactgctattccacataggtattctgagtacaataaagcaaacaaggctttagattttggtacacatctattaatctggcttgaaaaatgcttttttcttcttctccatatcaatttgaaaggttgaccaggagcagctcattttctcttgtcagagctatcagtgtattgtatgtataaacatagtatatgaggtatcaacacagtatatgatatgcttctatattataaaaggtatgggagtgttcataccttatgtaatatgcttatacatactcaggaccttgattagtacctttcacagaacatcacatttgtccatgacttagatgctgattgaatctggttagggggaatagaaagaatatcctaaatgattaggaagtcatttgtgtgtacagagtaagagataaaatgaaatttcaggcttctgcctttagagaagtttctaagggca

SEQ ID NO: 713501 - DNA, 618 bp, Homo sapiens
aagcgttagcacctggaagtgccatctgtacttacacagtaaatgaaaagcaaagcctcatccctggagggccacaacaagtttacttccaggaaaaaggcataaggagtcataaagaatgactgagggctgtcttaaactcaggtggttactccaattgcaactgctattccacataggtattctgagtacaataaagcaaacaaggctttagattttggtacacatctattaatctggcttgaaaaatgcttttttcttcttctccatatcaatttgraaggttgaccaggagcagctcattttctcttgtcagagctatcagtgtattgtatgtataaacatagtatatgaggtatcaacacagtatatgatatgcttctatattataaaaggtatgggagtgttcataccttatgtaatatgcttatacatactcaggaccttgattagtacctttcacagaacatcacatttgtccatgacttagatgctgattgaatctggttagggggaatagaaagaatatcctaaatgattaggaagtcatttgtgtgtacagagtaagagataaaatgaaatttcaggcttctgcctttagagaagtttctaagggca

SEQ ID NO: 713502 - DNA, 618 bp, Homo sapiens
aagcgttagcacctggaagtgccatctgtacttacacagtaaatgaaaagcaaagcctcatccctggagggccacaacaagtttacttccaggaaaaaggcataaggagtcataaagaatgactgagggctgtcttaaactcaggtggttactccaattgcaactgctattccacataggtattctgagtacaataaagcaaacaaggctttagattttggtacacatctattaatctggcttgaaaaatgcttttttcttcttctccatatcaatttgaaaggttgaccaggagcagctcattttctcttgtcagagctatcagtgtattgtatgtataaacatagtatatgaggtatcaacacagtatatgatatgcttctatattataaaaggtatgggagtgttcataccttatrtaatatgcttatacatactcaggaccttgattagtacctttcacagaacatcacatttgtccatgacttagatgctgattgaatctggttagggggaatagaaagaatatcctaaatgattaggaagtcatttgtgtgtacagagtaagagataaaatgaaatttcaggcttctgcctttagagaagtttctaagggca

SEQ ID NO: 713503 - DNA, 2297 bp, Homo sapiens
tttctccacatagaagatatgcatgaattgtacagataactaatagcaaagataatgaatataagtatttgttttccaaagagttcattatggacagacagtcccaccagaagtcaaattctcttattttttatttttcaaaatataattaagctactttatcttgtatatagaaaaatacctaaaacacatgtataaattcattgtgggataacataaaaattaagccaatgaatggccaatgtgaacacaagacgtcttttcatatttatatttcaatatgaacaaagaaagaaaaaaataaaataagcaaataaaaaacaaccagcaacaaaaaacaaagaacaaactccccattcacaaatgtactcactttcaacttggtacacagatgtctttgtgtctgtctacacttgttaaaataaaatctatccagaaaaggagtttttcccttaaattggactgagtattatcctgttaataaatatgaattattccctcatatacagaccaacattatatagttatatgtagtcatttgttattcaacaagtattcattaagtctttaattatacacagacattgggaacataaaaatattatttggtttgccctctagaatataacagatacatacataaaaaatttaactctaatatataagtgctagaaatagagtccttttgattttttgaagttagagtaaagttattattacagagtgaggaagaatgacagaaaacataatatgatcccctaagattagtatcaaaagtggctacccaaataattaagtccaaatgtctaattttactaatagggaaacagatttgaaagcatgccacagtgagttagactatatcttgactagatgccagattttttaaatatcttgactgctgactttaccaaggtattgtgaagaataaatgaagtgtaatatatgaagtctttggcatatagcaaggcctcaataaacatctgggaagaagtctgctgcagtgaaaacagcatgaacttggaataaaatatacttggattaaaattccatttcttcctaatgtggcatttaatttaccactgcttggtctaatattactcttctttaaaatagagataagaaaaaaagataattattccaatgtttcatgatcatttagctatgtgagaatttattgtttatcatttaataaatttatcatgtcattaatcatttaatggctgatagatttttgaagaagagattttctctttggaggaagataaaaacttgataaatattttgaatttgaacatggtattcctagtaatacagctaaaagagagttaagttgtacaggataagaaaatttgatgttttgattatgttttgattttctgctttctgaatgggaattgaccaaggagaaggaggtaaccactgcacacacccttttcacgtctgccctagtccaatcaaaagcatctcattcttgtaactcctgttacaattactacattgtaatttttcaatacatgaattaaaggaccattgatggccttattaaaaatctcatgagagaaattacaatgggatttgctgttgttttgctgttaggtgactttttctatatttctaaacactttgtatggagcatgatgtatgtaaatagttttgtttcagtgaaaattaaataagtgattgagctttacagttgggttagagtagaatggagcagagacacatgtatggaaacaggaccctgcagatggagaatatgtctcttgagaatttactaacattttaggggaaaaaaaaactttgaacctccacagagcatggaattgragcttcaagttaatcatacttgtaactcaaagggcaagaagttctcagttaacacctcggttgcattttatgtgaagatttaatgagataatgaatattactacctgggtgttgagacaaatagacaatgatgacccctttttctctttggcttctgacattgattagtggaaccctggcccctgctaataagattggagttagagtctgatgccagcaggaacactcagatatgctttcctaagaatttgcaatcggaaccaagagtttatatttatacacatatacaccatagcttgatacatggataagaaggaggaaaaggcaggcaacagagctgagatgaagcataccacaaaaaggtgccaattttatttccatcaaaacattgttgtatttcataacggaagcattcttttcttggtaattagttacattaagatatgagcatctaaatttctgggatc

SEQ ID NO: 713504 - DNA, 2297 bp, Homo sapiens
tttctccacatagaagatatgcatgaattgtacagataactaatagcaaagataatgaatataagtatttgttttccaaagagttcattatggacagacagtcccaccagaagtcaaattctcttattttttatttttcaaaatataattaagctactttatcttgtatatagaaaaatacctaaaacacatgtataaattcattgtgggataacataaaaattaagccaatgaatggccaatgtgaacacaagacgtcttttcatatttatatttcaatatgaacaaagaaagaaaaaaataaaataagcaaataaaaaacaaccagcaacaaaaaacaaagaacaaactccccattcacaaatgtactcactttcaacttggtacacagatgtctttgtgtctgtctacacttgttaaaataaaatctatccagaaaaggagtttttcccttaaattggactgagtattatcctgttaataaatatgaattattccctcatatacagaccaacattatatagttatatgtagtcatttgttattcaacaagtattcattaagtctttaattatacacagacattgggaacataaaaatattatttggtttgccctctagaatataacagatacatacataaaaaatttaactctaatatataagtgctagaaatagagtccttttgattttttgaagttagagtaaagttattattacagagtgaggaagaatgacagaaaacataatatgatcccctaagattagtatcaaaagtggctacccaaataattaagtccaaatgtctaattttactaatagggaaacagatttgaaagcatgccacagtgagttagactatatcttgactagatgccagattttttaaatatcttgactgctgactttaccaaggtattgtgaagaataaatgaagtgtaatatatgaagtctttggcatatagcaaggcctcaataaacatctgggaagaagtctgctgcagtgaaaacagcatgaacttggaataaaatatacttggattaaaattccatttcttcctaatgtggcatttaatttaccactgcttggtctaatattactcttctttaaaatagagataagaaaaaaagataattattccaatgtttcatgatcatttagctatgtgagaatttattgtttatcatttaataaatttatcatgtcattaatcatttaatggctgatagatttttgaagaagagattttctctttggaggaagataaaaacttgataaatattttgaatttgaacatggtattcctagtaatacagctaaaagagagttaagttgtacaggataagaaaatttgatgttttgattatgttttgattttctgctttctgaatgggaattgaccaaggagaaggaggtaaccactgcacacacccttttcacgtctgccctagtccaatcaaaagcatctcattcttgtaactcctgttacaattactacattgtaatttttcaatacatgaattaaaggaccattgatggccttattaaaaatctcatgagagaaattacaatgggatttgctgttgttttgctgttaggtgactttttctatatttctaaacactttgtatggagcatgatgtatgtaaatagttttgtttcagtgaaaattaaataagtgattgagctttacagttgggttagagtagaatggagcagagacacatgtatggaaacaggaccctgcagatggagaatatgtctcttgagaatttactaacattttaggggaaaaaaaaactttgaacctccacagagcatggaattggagcttcaagttaatcatacttgtaactcaaagggcaagaagttctcagttaacacctcggttgcattttatgtgaagatttaatgagataatgaatattactacctgggtgttgagacaaatagacaatgatgacccctttttctctttggcttctgacattgattagtggaaccctggcccctgctaataagattggagttagagtctgatgccagcaggaacactcagatatgctttcctaagaatttgcaatcggaacyaagagtttatatttatacacatatacaccatagcttgatacatggataagaaggaggaaaaggcaggcaacagagctgagatgaagcataccacaaaaaggtgccaattttatttccatcaaaacattgttgtatttcataacggaagcattcttttcttggtaattagttacattaagatatgagcatctaaatttctgggatc

SEQ ID NO: 713505 - DNA, 2173 bp, Homo sapiens
  misc_feature 1239, 1240, 1241, 1242, 1243, 1244, 1245, 1246, 1247, 1248,1249, 1250, 1251, 1252, 1253, 1254, 1255, 1256, 1257, 1258,1259, 1260, 1261, 1262, 1263, 1264, 1265, 1266, 1267, 1268,1269, 1270, 1271, 1272, 1273, 1274, 1275, 1276, 1277: n = A,T,C or G
  misc_feature 1278, 1279, 1280, 1281, 1282, 1283, 1284, 1285, 1286, 1287,1288, 1289, 1290, 1291, 1292, 1293, 1294, 1295, 1296, 1297,1298, 1299, 1300, 1301, 1302, 1303, 1304, 1305, 1306, 1307,1308, 1309, 1310, 1311, 1312, 1313, 1314, 1315, 1316: n = A,T,C or G
  misc_feature 1317, 1318, 1319, 1320, 1321, 1322, 1323, 1324, 1325, 1326,1327, 1328, 1329, 1330, 1331, 1332, 1333, 1334, 1335, 1336,1337, 1338: n = A,T,C or G
ccttaaaataatctctttatatcagcaagaacaaatatgaactttattatggaaaacatttaattatggttatctgttttgtcattcaaacattgcctgatgccttgcctttcataatgaaaaaaaaattcttttctaaaagaaaaaaagccttttctacctaagagtaattatataggtcccccaaaatatagaaaagtgtgcaatatttttctttattttaaaatagcaatatttccttatagccataaatgaatagtgtatgcttttttcttttaactcagaatgcaccaggaatgatgcatagaggctgatacagaaagtgaacacggcacattaactgagtcagtgactgaatccttcacatattttcagaactcagaggaattctcamcattagatgttccttagaaccacctggggagctttaacaaatcccaatgctcaggccccacagcagatctatagatctgactctctggggctaagacccaggcataagtagttttacaagatccccaagtgattccaataggcaaagttgagaatgacagaaaagaaaaatttgacacaagcatgagtagccagtggccaagcgtgatcttgtgaacgaagcctcagaaactagttcaaaagtaatttgtgggatgaaaagttggaggatctttctcatccatgttttttaggaagaggagaaattatttctttaaaaatccctacttatctatgaactttataatataaatgactaagaattaaggaagccatcaaagatgggtggcagaggttcggagctgggtgagagggggtatgtagttgctttttaagtgattctctttttctgaactatgtcaactttataataccatttgagtaaatgtcttggttttttttgctttttttggagtcaaaatcatatgatactagttatcaattctggaagacagaccaccactacaacttgttacttcattcgctttgtaataatatggaaataatataattttagcctaggaatgagcctctgtactaaaattcaacattcccatttaacagatgaacaaagtaactttgccacacaagtgagaaatggaaatgagagtagacccagattcactgtctttagtatgtgttctacaacatatacctcactttttctctaagtaacttttttctctttctaaaacttgagcagtctgtgtaaatatctagtggattcatattggaggcctctaaaannnnnnnnnnnnnnnnnnnnnnnnnnnnnnnnnnnnnnnnnnnnnnnnnnnnnnnnnnnnnnnnnnnnnnnnnnnnnnnnnnnnnnnnnnnnnnnnnnnnagtagtatattataatatttactaattattatagtaataataacgtatataagtacatcaataatgaatcaatacttatttggagtaaattatataaattatatgtcaaatatataaattatttagttaaaatcataagtaatacattaatgacaaaattatatttattatcatatattattttatgtgcatatgtataataatctacctgagaaaatgatctcaagttatgtaatattttatcatgtttattgaaatgtaaatgatagggaatataatacatacaactttagtttggagagaataaaaatattttcaaataaaatgactctaagctttcaccctgaacataatagcaggtgtatttggagaacacgatgctaatgaatgtcatattactcttaggtatatttatattaaagacattttttgttgaagctagcttgtctattccaatgcaaacaggttctgctacttataatttttacaacctccttctagtcataaaccatcccaatatagtccccatggttagctatatttcgttcgtgccaccttataacagcttgtgtagagatatctttgccattccttcacattatgatatatctgagtgctacatgagagtgtctgggaattgggtagttgagtcatccctgagaagatttaccacatagcaactcattgtttacattgcctgcaaaggaatctcggcaaaagaaaaaaaaaaggaataacatgcttcctttcacttagaataaattgacatggtatatattatacaaagtgattactaatgaaatgaaaaatagtatatttgtgctcatgtatagag

SEQ ID NO: 713506 - DNA, 493 bp, Homo sapiens
ccccatctctaccaacaacaacaacaataaaaaaacagaaattagcctggtgtggtggtgcacacctgtgatcccagctactcgagaggctgaggcaggagaatcacttaaactgggaggcggatgttgcagtgagctgagatcacaccactgcactccatcctggatgacagagtgagactccatctcaagcaaaagaacattgtagttggggctctagagccgcttgctggagcctgctcccactctgtggagtatgaactttcacttcaataaatctgcactttcattgtttctgtcttctctcattgcttcattcttttgttgctttgtgcattttgttcaattctttgttcaatgtgccaagaacctagacaactcacagtcaagactttccatcctgtaacaaatgcagaggtggccrgaaagctgagtgcttcaactcagggatgagagtggaagaaattgccagaaaataattaggaacaagcga

SEQ ID NO: 713507 - DNA, 936 bp, Homo sapiens
gacagttaacattacatctaatccacaaatttcagcacatacacccagtaaaagggtaaaatcatactgatgtagagtgaatctaatttttgaatttcaggcsttaatgatttaaacctttgtgcttaagtacggaaaaattaaatcctttaaaagaagttcataataactgaaaaaggccccatctggcaataatgaagacaaattaacaataaaattttgaaaatctggcaatatgatcaagccaaagcatacgaaattacttctctgtacttagtcactggtggtccaaggaaggatcaacttcctgtcttggattctggcgtctaaattaaagcaggaaaatcgactgcaatctgggttccaggcttctggctcacaagcaacaaagctcgaaactcactaaaagcaggaagactttaaccccaacatattctctaagaagaatctgctttttgaatagctgctttcagtttagttcaaacacaagacaatggcataaattcacaccttggaggttagttgacttttaaagcttattgtgctatattaactccttttgtgccaatttatcttgagcaagagggtttttctttaaactacacatatgagctagaatttactacagaagaaaaaagttttataatctgaattattaaactgaattttttttcctttcagttactttgaattgtgtcatctagttttgaaaatatggttatattccaatgagaacacatggacacaggaaggggaacatcacacactggggcctgttgcggggtgaggggagcagggagggatagcatttggagatatacctaatgttaaatgatgagttactgggttcagcacaccaacatggcacatgtatacatatgtaactaacctgcacgttgtacacatgtaccctaaaacttaaagtataattaaaaa

SEQ ID NO: 713508 - DNA, 933 bp, Homo sapiens
ccaagttgccacaaaatctgtcattatcatcgtgacacttctggttgattacatttaggcatattaaaattcttaaaaatagaaggtaaaaaactaacatttgtgaaaatctactgtgtattagatattttatattagttttatctctactatgcaaaactaccaaaaggtaaaaagaaaattattatcccctaggtaactagagataagaaagaataaatagttccagttgcatagctggtaggtgttataacaagttttttaagccaatatttttcacaaagtttcagaacccagagtctcaggagaaaaggagggaagtaaggcatatttaaggagcatggggataaaataggactgggcctacacaactttatataaaggtattgacatctgtagggagaacaaagaagcaaaaagaaagcctctttcatggagctaccagaaaagtgaagaccaaatttgcctataatgaatataattgagatgcaacctgatagaaacggggagctattagccagtcagctcatggtttcagaaagagtttttatgaagaaagagggtagagggctaagatttcaaaaagaaatatttcttggaaatggtttttctcttttttctcttttcataagaatggagaaactttctactaatattcttctgagaaacttcctatagttgtttattttcaggaatgatactgagctcatttttcaaagcacctgaatgggaaygtcctcaattttgtagagagcatctacaataaacctagagccaataaaaataaaaagaactgtacataaacactgaactctaattgaaaccattgtttttagtagggatataagttaacaactctaatgttttctggaattgaacagttaagtaaatagatggaggattattggggccaggtttcttcctattagagtg

SEQ ID NO: 713509 - DNA, 650 bp, Homo sapiens
atctctgagctcttaattaaatgataagataatattttcctccttcaagatgtaatgactgcttcaaaatatgtcctgtttctgcattttaaaaataacagatctcttgtcctttataatgtgtcctaaaataccttcagtttgggaaggagatttagttcagggtcagttagatttcaattatttgaggaactgtatttaactatgactcaaagccaggtgtataatagatgccaagggaagaaataattcacccagctagttcagactcgcagtgaatttctttagcccagtaagctattaccttcgatgtgtataaatgcaggcccccattttatccrcagccaaacattttaagacacagtgtgacttggagcatttcataaattcattcattccaacagtaattttgttctccaagtatgttttctttgtaatcatatttagctttataaactatatgcaaactctggaggaatttgctttataactttagctttataaacatatacaaaataattccgctttataaactagatgcaaactctggaggaatatgcatagcatattcatagtcagtgatttttagctgatagtcctataacatggtggtaagactagatttagaacttatgccctttgatttattt

SEQ ID NO: 713510 - DNA, 679 bp, Homo sapiens
tttctttacacagtgtgccaagtgattacacctacccctgagcacaagataaacaccagacatagagcttctttatttaagcttcacttggtatggttagctagctttattctgctctagattgtactgtcctctccaatttccccttaggtctgtatctgagctcacacatgagatcttctctcccttgcctttttttctaccagttctttccgctgccttgggtctatgccacacattgctatctcttgtatcaatatagataattaactctttcrtaagaccttgacatgagagaaacactacaaacaagatgcccagaactgctagaaaatgaccatgaattgcactcaagttagttctcacatctcttctgcagctattttggcttctggctcctgcatctgctccactccaacctctaagaaacagatcccaatattttgcatggcttcttcaacacagtgtaaaaacagagtaaaactgggaattatatctcactgctaaaaatgtaggttggtggctttagtgacccagaaatgataataataatgctaagtaatcttaaagtaattcaattttcctgacctcagggaaggaggaggattttgtttcctttgtttggcctacataaattatttatgcaaaaccaaggtctttaaggaaagagaatgtagcc

SEQ ID NO: 713511 - DNA, 605 bp, Homo sapiens
ttttgaatgaaaaccagccttctagctaactcttacgggtgcagtctctatcaaataaaagtgctcatgaaacagttggttggaggtcaagtgaaaagaacacatcaagtttcccacagatttcctccccagcagataatggatgtaagttcactgagaagtgacaaagcatttaaggggacccttcaaacagtatctgcccaaggagttcacaagaattgcccctctagcctagggcttcctgttgtgagtatgaaaggtttttgatcatgtcawttcaatttgtcccacacaacatgtctcagagagaaagagaagtatttacctcatgaacactggttgttagcccagatcttttttctttcattctttccgtctttctttatttttttttcagtagatatgtctcctgaagctttattcctgctatgaccaaagtgccttctgttatcacaacaggataaaaaataacagctaaagaaagagagaaaaaaacaataatgcattgctttgtacgaactcatactctcaagtctactattacttttgcacccaagtctgcgcattcagatttatctcctctaggctgcatatgcttggaggcc

SEQ ID NO: 713512 - DNA, 1875 bp, Homo sapiens
gataattatatttccatatcaactgtactaccctctccttttgattccatgtacaccgcctttatttgggcctccatcacctctcccaggcactctaattaaagctctctaagtagtttctttgccttcagtctctcctttcccaattctaccttacaactcttccatgataattactttcctagtgtaaatcttgatcatgtcagctaccaaactccaactgttctcaagagtcttctgagaacagaaaattagttatttatttttctaattataggatcagggttaagyagcattttttttttttttgcattttatctatgcttgctctgatgcaagattgctttacatgcatatgatgttttaggtcttaactatttaaaccaggtaccatgtaggccataacacataaagacagagtatgacactattggtggttccaatcagtctagaacagcaatgtgaaagctacatctgcaattttaagttttctagtaactatgaattctatagacagaatttgtatgatcccccaaattcctatgttgcaatcttaccctccagtgtaatggtattaggaagtggggtttggggaggtgatgagtcatgagggcagagctctcaggaatgagatttgaaatcttaaaaaggagaccccaaagagctccctcaaccattcttccaagcaaggacacaagggaagacaactgtctgtgaatcaggaagcaggccctcaccaaacactaaatctgccaggatttggatcttgaactttccaggttccagaatgataagaaatgaacttttgttgttacccagtttatggtaatttgtgatagcagcttgaatatatgaagatattacattaaacaaaagtaaaaagaaatatattacattcactttaatactattttattggacctaatgtatctaatatattttcatttcaacatataatcctatacaattgttgagacatttgctttattcatgctaagtctttggaatccagtaaattaactttatacttatagcacatttcaatttagattaatcacaattcatgacacatgactatagcctactatgttcaatattgcaaggctagaatgctttgtcctatctgccttctctttctctcctccctttcatgactgaacttccagaaagcatctgccttgctttctggacttactcaccattcaatctcctgaacccccagcagtctgatttttatcccacttttacactgaaatagttcttgtcaaaatgctcagcaacttccttgtcacattcaatgccaatcctcttttcagcaggagctctaaataagtatagttccaaccaagaacacaagaaccatgccagatgtttcagatggaagagaaggaaactatttacaaaaatggaagaattaaaataacctcaagtctattggagtgttcattttaaatgagagaatagaacaacacgaattattaagaaaaattatccagggcatgatcatgcagtatcttgcaagtcatttttaggaatttggggtgtttgaaaggctgaagaaacaagagcagaaatcaagttaccacaggaagtaacttcaggaaacttttactatgtctatgataggacaaaaaaggcaataggtagcttcaccaccactcaggagtgcgcttacagctgacactggtggaaaaaaagtgctgctgctggtgaaacctctgtgtggaaatttctgacattgggggagcccatagtgcctggtggaccttgtcactgctgctggagggatcaccaaaaagaatgaccgtaaaagatgagtagcttgtctcttctttacatcttttaatatccagacagcacttctcattgctgaaa

SEQ ID NO: 713513 - DNA, 599 bp, Homo sapiens
attgggtcatgaggtatcttccctcgtgaatagattaatccactcatggattaatgggtcaatggattaatgggttatcatgggagtgggactggtggaccttgagagcttgtttggaggttctagcaggggagcgcagttgcccgtatacccttgaccgaagaccagtcctcttctatcagggatggtaatcctctttcaccgagcacagctttgggagggacacacatggagtggtgagggaggaaggggacamccgcctagctggccagatcagccaagtcaactcgggctatcaatggggtggcagatgtcacagacagatcaccctcacatccaggactggtagctttatgagaagaagagagacctgaactaacatgttcagtcccctcaccatgtgatgccgcctgttgctccaccagcaagaaggctttcaccagatatgttctctctacctcagactttccagcctccataactctaagttataaacaaattccttttctttataaattatccagttttaagtattctgttacaagcagcaaaaaatgaactaacacagagcatgactgtagtgaggttttgctatttca

SEQ ID NO: 713514 - DNA, 1935 bp, Homo sapiens
aaagtaggaaaaagagttatttctttaactgatcatctgaaatgtgtcactctaaaacaattttttgagagacaagcacttaaacacagttcactagctcagttctaagaccagagcgatgttcatgaaaatgtgacagaaccacatataaaaggtgattttggaatagagtatgataagactaaatgcctcattaagacaaaaagtcctgagcactttacctgtttgttaaattttgccatgacctccactttacagatggtaaatcaaagcttagaagagttaggtaacttacccataaatccactgcttataaatggtagcttcaatcaaaactcaggccgtttgactccagtgctcacattttcatactgtggctatacaatggagagaaacacacacacacacacacacacacacacacacacacgcacgcattgtcaaccatttctattctgtggtatttttattattccaggattttaaaaaataacagatgaaactgccttttcattggcacatgcaatttttttgacagaagataccacaaatatgtggaacagataaataaaatataaagtactatataattaatatacatggtaaatagtatagactaagaacaacatagagataagaaaatggggcagtgatgtggactgaaatagttagaaaaagattttccagaggtagtagacttgaaatggattttgacatttgagtgataattggacagtygtatttgagaatggatactattctcatctgaaagaaaaccacacaattagctgtacaataaataaaagttagagaggatcaccttagttgtataaaatgtaaagagcccataaagttacacagcatcatgataagattattaataccaattacacctaaaggttatctactttgaataacactaacgactaagttaaagaatagtgtgtttgaatactttgtgatttatgaatataaaattcaagaacaggcaaataattaatcaactactaaaatagaagtcaggccaggcaaggtggctcacacctgtaagcccagcactttgagaggcccaggctggcatatcacttgaggtcaggagtttgagaccaggctggccaatatggcgaaaccctgtctctactaaaaatacaaaaattagccatgcatggtggtacatgcctgtagtcccagctactcaggaggctgaggcaggagaatcgctcgaatctgggaagcagatgttgcagtgagtcgagatcaccactgcactccagcctgggcaacagagcaaaactctgtctcaaaaataaataaataaaataaaatagaagtcagactaggtgactactagtcaagagggtattgactgggaaggggcacaggaaaaccttctgaggtgctagaaatattccgtcttgattcgggtggtgattagagagatgcaagtaaaaattcactgacctctccacttgagatttgtgcacttacaaacttcctctttgtgagttatacctaattaagtaaatcaataaagattagagtcttcagcaggaaacagggttatttagtgtaatatacatttaacattggaaaaatctttactgaccatatggactacacggtaaaaaatgaaaataagaattaaaaaaaatctctcaaggttaacaattccaactctggccttcacagataagaaaactggcaccaaatagatgcaaacagttgccctgggtcacatgacattcaaaggctaacatggattaacattgttgaaagcttttctatcctttggtcatgcctccataatatatttcatgcaccacatatttctaaaaagaagcctgatacactgttgaattcttagtaatatttattttccagtttccatattatcgcttgctttggtcacacttatttttcctccttattcttgac

SEQ ID NO: 713515 - DNA, 1397 bp, Homo sapiens
  misc_feature 233, 234, 235, 236, 237, 238, 239, 240, 241, 242, 243, 244,245, 246, 247, 248, 249, 250, 251, 252, 253, 254, 255, 256,257, 258, 259, 260, 261, 262, 263, 264, 265, 266, 267, 268,269, 270, 271, 272, 273, 274, 275, 276, 277, 278, 279: n = A,T,C or G
  misc_feature 280, 281, 282, 283, 284, 285, 286, 287, 288, 289, 290, 291,292, 293, 294, 295, 296, 297, 298, 299, 300, 301, 302, 303,304, 305, 306, 307, 308, 309, 310, 311, 312, 313, 314, 315,316, 317, 318, 319, 320, 321, 322, 323, 324, 325, 326: n = A,T,C or G
  misc_feature 327, 328, 329, 330, 331, 332: n = A,T,C or G
aattctctcccaaataaagtttatgcaaacctttactcatatctggaaaaaaataggctaaaattttarcagatcgatgctaagggtcattgctattaattgggaggaaagaagaactactcatgttactggaaacatcttctgatacttggcctgagcatcgtgattcagggccattgcaatttttcagtcatattttccatagaataaagtatcttgagaaaacaaaaacnnnnnnnnnnnnnnnnnnnnnnnnnnnnnnnnnnnnnnnnnnnnnnnnnnnnnnnnnnnnnnnnnnnnnnnnnnnnnnnnnnnnnnnnnnnnnnnnnnnnaaaacacaagagagcgagtagttaggctcaagctttctaatggaaaaacttgaagcttctattttaaataaactccaagtgggttttcactaaacatacactaatgatgttttagggagatgtctgtcaaaggaagctactgggttgaacctcatgaagttgctgttattctatcaatttcaacctacaaaaatggcaattccatatgatttaacttaatgcttctcatatctttactaaaatataaaaagactgttcagagcaacaaagcaatcccttggatatccggggaaattctgtgccgaacttgcagctcagggggtgagaagggagaagagaaggttgtgaccaacaggaggctggaatgcccctgacagtttgtttggtgcatgccctggtgcaatttattaagtaaaagatgtggagaaaataattactcgggtggcaccaggccactttgcatcacatcccttgaggcatgaatgtggtaactgtagactttggggagtgaacacctcaaagagatgcctgtattgcattagaagaccctcagagggacctctaaatctattcactaaagacacccttcagactgatagctttcccgctttctttcaagaatgaggttaaaagtaaaatgcttgacaaataaactagattgaggtttcaatcccaaattccccctacacccagcaattggaatcatatcttggtaatttactgtaatgctaaacagaagctatttgaatactagaaaacaaagggatcattttaaaataatttcttgcataaagtgagctgaagatcaactaagacaagagaacgaggaggtttctagtgtaggctggaatttgacagggtctagaatcaagaaaggagtgtgctttacacataaaactaggatggtgtttcaaacacactcatgagagagacaggaggtaagatgactcaaatgtgagaatccaaccctatttattttctaggattgtgaagataagagcctgttaaaaagctgtaatttatataagtataaagaaacactaggagaggacccacttaactgac

SEQ ID NO: 713516 - DNA, 1465 bp, Homo sapiens
tggatctttgtttatgaaatgtatttttctgtatttgaggtttagggaagcttgataatgaggctgtgaagattcatggcctcttttctatggcttaatttaggctctatatcaaatatgtaaaataacgttatatcttcccaccacctctgtggatcatacattttgttattatttctctgccagaggtttttttttttccttctcttctccttttataaagaactactaatagtaggaacatttttaatatagagagccattatctagaccaggaagaagaagtgagtttgggtaatgatttttccttccaggtgtagctttagcgttaggtagacacatacagattcacgctcagtgtcagctgccaccctcacccctctatacactcattccattttaggaaatgcatattccatcatatactgccattatctaaactccccagagccatcatcagcttctgtgaggcaaatgacttgctcagcagagttgcccatgggatagggaagtggagatgatcaggctatacagtgtcctttggggatgggggtatggagtggatgatgttgctgtcagcagacctgtgacttaaggaggcagccagtgatctttaatctatttcattgcaaagcagctaaggccatccttgatcccttccacatgcagtttttacatctgttctgtgatttactttctcttcacctacgtttactttgtgccagtgactttgctttgctctgaggataaagaccaaaatcctaagcattccctcaaagtctagttaacttggccctacccacctcttgcacctcatctcactccatatcctctattctgtgcacctgtcttcctgccttctttcagatccttggaatcaccatgctcctttttgccacagkacctttgcatctgctgttctgtctgcttagaaatctccaggtagtatctttgcctgattaattcctactcttttctcagatatctactttgtctcctcatctttagggaatccttagctggcttctgtctgtcagtcaaatctctgttttgtgtactttcagatcacttcttttcctaatgtggctttgagtaatggctgactctcccactagaccgagacactttgaggcagagactgtgcctgctttagcttctcctctgccttccttgtactttccatagagccctgcacaaagttggcctctggtgtcccttatggaaggcatcagagagcacaacgtgattttcctcttctcgggtttccctaaggacaccactgcgtggcttaatatttggtaaaatgtcatcaaattattttgtatagattggtggctcatttttaaaagcttcattttaggataatagaggaggatagacaagtcttcattcaacttgtacaagaggaagccagcaaatgctctagaattacgtggcttgactctgttagattcctcaggacctc

SEQ ID NO: 713517 - DNA, 2550 bp, Homo sapiens
tactacatttcatcataccatttatttaccggttcagataaatatattatattagattgtaactttatctaatgtgcattgacatactgattgcatgccgtccgtatgtccctatgggtgtgtgtgtgtgtktttttttttttttgtccttaaacaatttgcttggttcatagtgacttgagcactttatcattagaacttagtttaaattcaaagtaactctacctgcctgtccgttacatctttgaagatgagaattttagataaactttgctgctcctctagttttgttagcaaagaaaatacaagcaacttgagtgggagtttgtactcccaacttgatgctacaaagtcaacattgattgacccgtcaactcagacaatacgtggacttcattggttgggaggtttttgccactgaagaactaatagatttagtttaaatctggataaatcagaatgggaagcccatctgcctgcaactatgtatctttcagtagtgctgggctgaagattccctgtcattacatttccagaaggaccttgttaggatgctaatgctaaggaatcatgtgacctccagctcttctcagactagaatgctttgtagagcataagcaatctcaactggttcatagcccaaggctgcccagcttaccactacatacacttctagcatccataggaatcaaacttatttgtcttgtgcatttattaacttatttctctttcccattcgtcttccatttaagttatattaatttaaatataacttagaactcactacctcagattttctggctgtgccttccttctctcagcctctgaattgttgctaaaaaaaaattcaaagggctgatttcttttacgatgatatattgcatttgcaaacctccttatctttgcctgctttatcccagcggacacttacaacaacccaatttgcctattactgtatccacattgtattgttttcattaggacatttaagcaatattcagctgtataaccaatgtgtgatggagctcagttccaagcactgttcttctgaggcttaggccaatgatttctctattcaaacatttccttaaggggcaggaaggttgtggaagaaggacttgtctctgggcccagaagctttcacaattgacatgtagaggtaatgatgcctgcatttcctgcatactttgacatgaagaggggaagagggctcaccattactgaaatgatgtttatggtgtgggactagaaactgatggcaaagggaagctctggtaaaaaacaagcagatggatcaagtcttcaaggacaggcctctgtcactgtgacacattctgtagactacagacctcctgatgtagtgaattctctgtctccaagcaagactacatgcagacagatagtgattatatgtttttaaaacattgttcttcacctagtaaggcaaggcaggtagacagcaaactcaatgtggttcatggttcgttacttcccatcttcatttctcagataaaaatctgcgacaaatttgccataataagacactagtttggtaaactggcaagtgccttgcagcatttcttgtgaggagcatatgctaatggatgcttgtatttgaaaggatgactcacagttaatcattataagaaataggcttaccacttcataaactctaggaaagactgttttctaaacatttaaattgctcagccattttatgcattaaaacccaattataacttagtatgttggagaatttcaaaagctattccctgcaggatctgtgcctaagactacattttatcattccgtagttcacactctgtctaatacaggcaaaaaaaaaaaaaattaaaatgactatttattattattatttttattttttgagagggagtctcactctgaagcccaggctggagtgaagtgacacgatctccactcactacaacctccccctcccctgttcaagtgattttcctgccttagccttctgagtagctgagattacaggcacccaccaccatgcccggctaatgtctgtattttagtagagatggggtttcaccatgttggtcaggctggtctcaaactcctgacctcaaatgatctgcctgcctcggcctctcaaagtgctgggattacaggcatgagccaccgtgcccagcctaataaaataacttaaaacacagcaagacacttgaaaagatgttgggcgttgctccctaatgcggccctaggaaatgtaggggaaagaaagtcattttacagattttctggactttgcttcatcattactggtgattatatcagaaaaaaagataaataagaagaatgcattgtagttggaacctgccctcaagtactgtagagctcagccatgtccattttgtgaagggtatatacaaaacagacttccctttcattgcaatgaaaggcagtcagtcagtagctaaggatgtgaatatggctttaatcctttctgcactataagttataaaatcataggccaggagccagtagaagttttgaaattttcctgagaaacta

SEQ ID NO: 713518 - DNA, 387 bp, Homo sapiens
aaaacaataggctgtaaaagaagcagtttctcattttctgaaatacatatatcttccttttggcaggggcagggagtaaggtttaggaagagtatttttccagagggagatagtgagaatgaattaatgattttgtgactcatggggcatgaggtcatatgacacggtttcatgtagcttcccactgasatagttcagggctgcacaaacagcgtggaaggctttgggcatggggccaatgaaaagtgagaatggatcccttggaggctgaggctagagatgccggcagaacacttgggctgggaatcctatggatagttgagaaaagcggaactaggacagcccctaggtatggaaatatggagggaagaaagtcaaacttatttt

SEQ ID NO: 713519 - DNA, 1124 bp, Homo sapiens
tggttctgcactctgactattgcttggtcctttcttcgtcatcatcagagctccataaaagagagcggggaggggataacataaataatgctgaaatagccctgagggatgagacatggcccagcaactgaagccttcgtctgcccgtggccacagggcactttatggttttgcttcttgtcattcaaccacctgccttggggtgcttcactttgcatttccacgcagagtttcccgcattgccaaacttgatcatgtgccttatgtgtagcagtttgcatgaggtggaatttgcataaattatgtgtgcatcacccaggagcatctgtagttaaatactttattgattctaaattttgcccataatcttaattttttaattattttattttcttttcctcttttagagattggggtctctctctattgcccaggttggagtgcagtggcacagtcatggctcactgtcgtcttgagctcctgggctcaagcagtacttccacctcagcctcccgagtagctgggattacaggctgaagccaccgagcctgcctccgttatcttaattattattataattatttttttgagtcagggtcgcactctgtcacccacattggagtgcagtgacacaatcacggctcactgcagcctcagcctcctgggctcaagtgattctctcacctcaacctcctgagtagctgggaccacaggttcaggccaccatgcccaactgttttgtttttgtttttatttgttttaattttttgtggagacgaggtctcactatgttgctcaggctggtcttgaactyctgggctcaagtgattctcccacttcagcctcccaaagtgctatgattacaggcatgagccactgcacctggtaatcttaatttttaaactgttctttcttctcatcaaaaaagacatttattcaagttagattatattgtcttggtttagttttgcttttgctctttcttaatttttattaatttccagtgatgaaattatttatatattgtttaattgtttctcctttgatatcaccaggataggaagaaaagaaagtttatacctggttaattcgtcactgaaaacaattttctgtatccttttata

SEQ ID NO: 713520 - DNA, 1124 bp, Homo sapiens
tggttctgcactctgactattgcttggtcctttcttcgtcatcatcagagctccataaaagagagcggggaggggataacataaataatgctgaaatagccctgagggatgagacatggcccagcaactgaagccttcgtctgcccgtggccacagggcactttatggttttgcttcttgtcattcaaccacctgccttggggtgcttcactttgcatttccacgcagagtttcccgcattgccaaacttgatcatgtgccttatgtgtagcagtttgcatgaggtggaatttgcataaattatgtgtgcatcacccaggagcatctgtagttaaatactttattgattctaaattttgcccataatcttaattttttaattattttattttcttttcctcttttagagattggggtctctctctattgcccaggttggagtgcagtggcacagtcatggctcactgtcgtcttgagctcctgggctcaagcagtacttccacctcagcctcccgagtagctgggattacaggctgaagccaccgagcctgcctccgttatcttaattattattataattatttttttgagtcagggtcgcactctgtcacccacattggagtgcagtgacacaatcacggctcactgcagcctcagcctcctgggctcaagtgattctctcacctcaacctcctgagtagctgggaccacaggttcaggccaccatgcccaactgttttgtttttgtttttatttgttttaattttttgtggagacgaggtctcactatgttgctcaggctggtcttgaacttctrggctcaagtgattctcccacttcagcctcccaaagtgctatgattacaggcatgagccactgcacctggtaatcttaatttttaaactgttctttcttctcatcaaaaaagacatttattcaagttagattatattgtcttggtttagttttgcttttgctctttcttaatttttattaatttccagtgatgaaattatttatatattgtttaattgtttctcctttgatatcaccaggataggaagaaaagaaagtttatacctggttaattcgtcactgaaaacaattttctgtatccttttata

SEQ ID NO: 713521 - DNA, 652 bp, Homo sapiens
gaaaacaagttgtgctggccttatccaggtgtgcaaaggaggaaatgaacaatctttgtgctctggccttggaaaayaaggaagtgtaaactaggacacagatacagagaaagatgaagataaagcacttggattacaggctcagagaggctaagtcatttgcttaatgtcacattaccagtaattgagaatcatatcttttgatggaaaacccatagatatgtacaccagagtaccctggaattatgctcttgatcaatgtctttccaattatatttgtatattcatatatattttcttggtccattttctactgctataacagaatactacaaagtagttaattcataaataataaaagtttatctggttcatagttctgaaggctaggaagtccaagatcaaggggccacatctgatgagggccttcatgttgtgtcatcccatggtggaaggggtcacatgactagagagcacacacaagggaaaaaatctgggccaaactcatccttttatcaaaagcccactcctgccacaactagcccactcttatgataatagcattaattcattcatgagggcagagccatcaggtcctaatcaccttttaaagaccccacctcttaatactgttgcaatggcaattaagttt

SEQ ID NO: 713522 - DNA, 652 bp, Homo sapiens
gaaaacaagttgtgctggccttatccaggtgtgcaaaggaggaaatgaacaatctttgtgctctggccttggaaaataaggaagtgtaaactaggacacagatacagagaaagatgaagataaagcacttggattacaggctcagagaggctaagtcatttgcttaatgtcacattaccagtaattgagaatcatatcttttgatggaaaacccatagatatgtacaccagagtaccctggaattatgctcttgatcaatgtctttccaattatatttgtatattcatatatattttcttggtccattttctactgctataacagaatactacaaagtagttaattcataaataataaaagtttatctrgttcatagttctgaaggctaggaagtccaagatcaaggggccacatctgatgagggccttcatgttgtgtcatcccatggtggaaggggtcacatgactagagagcacacacaagggaaaaaatctgggccaaactcatccttttatcaaaagcccactcctgccacaactagcccactcttatgataatagcattaattcattcatgagggcagagccatcaggtcctaatcaccttttaaagaccccacctcttaatactgttgcaatggcaattaagttt

SEQ ID NO: 713523 - DNA, 652 bp, Homo sapiens
gaaaacaagttgtgctggccttatccaggtgtgcaaaggaggaaatgaacaatctttgtgctctggccttggaaaataaggaagtgtaaactaggacacagatacagagaaagatgaagataaagcacttggattacaggctcagagaggctaagtcatttgcttaatgtcacattaccagtaattgagaatcatatcttttgatggaaaacccatagatatgtacaccagagtaccctggaattatgctcttgatcaatgtctttccaattatatttgtatattcatatatattttcttggtccattttctactgctataacagaatactacaaagtagttaattcataaataataaaagtttatctggttcatagttctgaaggctaggaagtccaagatcaaggggccacatctgatgagggccttcatgttstgtcatcccatggtggaaggggtcacatgactagagagcacacacaagggaaaaaatctgggccaaactcatccttttatcaaaagcccactcctgccacaactagcccactcttatgataatagcattaattcattcatgagggcagagccatcaggtcctaatcaccttttaaagaccccacctcttaatactgttgcaatggcaattaagttt

SEQ ID NO: 713524 - DNA, 652 bp, Homo sapiens
gaaaacaagttgtgctggccttatccaggtgtgcaaaggaggaaatgaacaatctttgtgctctggccttggaaaataaggaagtgtaaactaggacacagatacagagaaagatgaagataaagcacttggattacaggctcagagaggctaagtcatttgcttaatgtcacattaccagtaattgagaatcatatcttttgatggaaaacccatagatatgtacaccagagtaccctggaattatgctcttgatcaatgtctttccaattatatttgtatattcatatatattttcttggtccattttctactgctataacagaatactacaaagtagttaattcataaataataaaagtttatctggttcatagttctgaaggctaggaagtccaagatcaaggggccacatctgatgagggccttcatgttgtgtcatcccatggtggaaggggtcacatgactagagagcacacacaagggaaaaaatctgggccaaactcatccttttatcaaaagcccactcctgcyacaactagcccactcttatgataatagcattaattcattcatgagggcagagccatcaggtcctaatcaccttttaaagaccccacctcttaatactgttgcaatggcaattaagttt

SEQ ID NO: 713525 - DNA, 631 bp, Homo sapiens
gctcctttcttgcccaggtggctctgctgggaaagcctataacagctgagcgggcttttcaggattggcttgatgccagggccagggcgagggatgacctggccacatagcagtcatcgcctgtgctgctgaagtgcttttcttcagaggatctcaaaacgttttaccagaaacaggagttgtcccagctatgaaaggacacagaaaagaagggtcactcactaagctgctaacagctttggcagtagaagtcttcaaaagactggctccaagggaagtaaacaacagaatccaaggctaaaattgtatccttaataaatactatctgaagttaaaacaggagttcactatttatggaaatctayataaacctaataagcacagagtggtgaatgtgcgtgcgtgtgtgcgtgtgtgcgtgtgtgtgtgcattcagggagggagtggaatagaacaagatgtggcactcactctcttcctccctgtcccttcctgtggtcacacttctcagggtgcacctcacatgagagtattgcctctgggattctgtacccattgttgccttctcctcctctaggcccagcagggcccaggtctcccacttgtgaggagacagccactgtaagccatc

SEQ ID NO: 713526 - DNA, 1106 bp, Homo sapiens
ggtaatttgtatatttatttcatgtaaccagaaatctccatattttatttaaaaataaattttgtctctgggtgttgtttcacttgcgagtacgccaggcttgtgactgtgtatcctttgtcctcctggcttaagtatctccaagtaraattattgggaagtttttagataaaataaaaatcttaggaaaggttggggctggccttggaggaatagaggggagggaaggagacagaactgggtcctgggaaaaaggaggcaggcaggctccatgccaagggctgggattaatcctgggcacctagcctcttcctctctgagttctccttcaccctttgccagttttcaccagtgactctgatagactggggtgcaaatatagaaatgactaatgacataaaaaagttgtttgtccatcgtatgttctcactcataagtgggaactaagctatgaggatgcaaaggcataagaatgatacaatggactttggtgactcaggggaaagggtggaaagggagtgagggataaaagactacaaagtgggttcagtgtatactgctctggagataagtgcaccagaatctcacaaatcaccagcaaagaacttatgtaaccaaacatcacccattccccccaaaacgtatggaaataaaacattttaaaaaaaggaaaaggttttaaggtttttaaaatatgtgtagggaaagattatctcagatgtatttttaaaaaaaccaagatattttatagggatttaatagatgttttcaaaatcaaaataaaagttgtttttcctcattagtaagccagaaagttggaattaaaactacagtgatgtaagtgcctgagtcttaagtaagggtcttaatattagtcttaaacagaggagggatagggttagaaactttctaaatgaatgctccctgactgaactcattgttttaatgcagcatataatcctctggataaatctctgaataaaatttcagatgaaaagaacacttaaatggccacattatatcaacagaaagacaggcatttcaggactaaaaaagaacataacatatggaatactgaaaacctgtactgtagcccagcgccaggc

SEQ ID NO: 713527 - DNA, 591 bp, Homo sapiens
ttaactttttttatttgactcttaacttggctattggtcttctttttaataataaaaacagctcaaccttaaaatgcagtactgaatacatcttagtcttaggttcttttttttacaaaattgaatgatattacctctaacatatccttcatggatgaaaaagcttaaactcatacaactatgaaactaccataataattataaaatggcacctatgttctactctatgtataatagaatattatacatagtgtaatatctacgttttttctagtgttttscaactttcatcttgcaaagcagcaaataatagaacgagaattctggaattccattgggccaaaactgtgctgctgcaaagactccaacttgcaatgagaaattaaaaacctaagcacacgttgagcttatttttttcatgttctctgcaaattttttaaaaatcggaagagaagccaatattaaatagtatcccaagttggttgaaatctgtgatgaagtaagaaatttgaaataacattctgaatccctctgtgattttaaagcattatattctggttattcaacagattttatacaattcgctatcga

SEQ ID NO: 713528 - DNA, 591 bp, Homo sapiens
ttaactttttttatttgactcttaacttggctattggtcttctttttaataataaaaacagctcaaccttaaaatgcagtactgaatacatcttagtcttaggttcttttttttacaaaattgaatgatattacctctaacatatccttcatggatgaaaaagcttaaactcatacaactatgaaactaccataataattataaaatggcacctatgttctactctatgtataatagaatattatacatagtgtaatatctacgttttttctagtgttttccaactttcatcttgcaaagcagcaaataatagaacgagaattctggaattccattgggccaaaactgtgctgctgcaaagactccaacttgcaatgagaaattaaaaacctaagcacacgttgagcttatttttttcatgttctctgcaaattttttaaaaatcggaagagaagccaatattaaatagtatcccaagttggttgaaatctgtgatgaagtaagaaatttgaaataacattctgaatcccyctgtgattttaaagcattatattctggttattcaacagattttatacaattcgctatcga

SEQ ID NO: 713529 - DNA, 574 bp, Homo sapiens
ccgcatgcctaggcgcgcgaccgaatgaaaagggaggggggaagggaagggtggagaggggagggggaagaggagcggcggccacgcgccaggccctggcggcgccacgaggaaagcgcgcggtcgccgctcttccatcacccggcggacgaggacgacccgcgcgggccccaccaccggccggccgcagccagccggaccttggcgctgccttctgccccgccccacgcttcgcttcaggccgtcccctcacctgggtggccttccccgaccgactctgaggtgaaaaggaatgtgccctcctcgatgaacgcctcgtggaagccgttgagctgtccgttcatgttggtgtcggtgtgcggaagtggccttacgaaggagcagcggcgaggcggcagcggctgcgaaatgcgcaagctgcggacagcgttctactcgtagcaggcgggcggcgcggagcgaacgaagcagcsggcggtgcggcccggtatttatagagcagcgcccgcgcgcgcccggctcgggccccgcccctcggcgccgcgcgccaatgcaccacttgcgcgggggtcgg

SEQ ID NO: 713530 - DNA, 509 bp, Homo sapiens
atttcacattaaattcccaaatggatcctgaacttttctgtgtctaggatggcagccttggatccaagtaacaacgcctagtgtgttattctgtgcaaagccttgctcgatctgcactaagcataattattaacttaagtacctacttggaaggggttttgggtttggcacccttggtaagtattagttaattttctcarttgccgttctaaagagaaagattttcaacatcctttgagaagaatggacttccttgaaatgaagaatcaattcaggaggttagaaatagaggagtacagaaggaaaagcaattgtgaaatttcttagaaggagtggagaatgagacattgggatacaaaggcattataaacgtttatgcatacacgcatacacacgtgtacacgcacatatatatgtatacacataaatatatctaaattcctaacttcctaatattaactaatattcctaatattaataataggctcttccttacttgtcataaataa

SEQ ID NO: 713531 - DNA, 1936 bp, Homo sapiens
gggtaaaaatttgtggttaggaacagagaatgattaagcagcagagagcttggaataaaagataaatttctcacaattactttcacctgctgaagccccattcctcctttaaaacagccaaagtttcatcaatgttgtgaaatttttcagtcacacaaccaatagcttttcttatatttgtgaatttctgaacattatagtacctctctcagatgttctttatagggattttgcacaatattatagctattttgatattattttgtcctctcctactacgtttaactatttttataatagaatccaatgttcagttttctttacatttctcacggctgctttctcaaacttggtgtggtggagattgctcattgtccatttggaataaatcagcttttctcttcttccatagtaatagaggtgaagctggaacatggcagctttatctgaggctatgtttgttcctgcgatggaactaacatcaatggaatatcagcagatatgacatgtgcaactttgacttaatttaagatgatttttctagcttggaacttcctatctttctcctctgtgccaatgggtatgccagtgaggatagcgactttggaggctacatgttgaagacatggtttagagccaatgacatcctgcaattctcaccttggactgttatgtgaagaaaaagttacctttgctttttactttcctaaatcactgattctggagaactttttgttacagaagtttcaccaacactactaaaattgatgcgtaataaatacttgttcaaatgaacagatagatgcttgcatgaatggattcatgaactaaaggaatttgagcctaaacacttggttggtgcctaaagaagcaaaatagaaatggtactatggcactgatttcacaaaagagtttaaagaagagacagattcattactaaattggaaggatgcagtagacttcttaaaaagaaagaaagaaaatattccatgctagcagtgaatagcttgataaagtagaagaaaataatctatagccattgaattmtctaaagtattattttttattatatatgtaaaccacccatcattacaacagaaatatcctgaaatttctcacagatcaaggtaaggtcattgtttttgcactaaaagctatgaataaagtttgaggctaataataggttcacaataattatataacattgttgaataaataatgagccaggaagaccatgttaggaaaaaactaacatttagagtgttaggataaaataaaaaaggaagaactaatgtcatctttggatcaataaattttcactgaagaagttttgtttatgctatgaactagaggaaaatttaggtaggcaaagagatgaaacaataactttttagagatgatgtaataaatccatgagatagaaaagataaaatggctaagctggaagagaagatgagcgtggctactaggctccaaagaataccaggaaatcaaaatggcaatgtgggtggagtccagtacaagatcattcaactagaatacatagcaaacgttgcattttacattgcaaactcagacccctgcataaactcactcacacatacaaacacacacacacatacacacacacacacacacacacacacacacacacgttttctgaaataataatcttaaatatggattatgtcctttggaatgttctcttctttctcttctatttcttgtaaaatattacatcaagggtactaataggctgctctccacacatttcaaatacttatttgatttatgataagtatttttaaattcattctaagcaatggagattaactgaaggttttaatgagggaggtggaaggaggtttggcagaatcagattttgtttaaaactgtctgtaccttcattgtcagaacggattggatggagtcaaaa

SEQ ID NO: 713532 - DNA, 3433 bp, Homo sapiens
ctcaggcaactccacacagtcctgagagggcagccagagtcagagccgtcccagcccaggcttgacacccttctggaccccctgcatgagaccatcagggccaatacaggacatccacaggtccatgaatcagagacttaaaacctggagagttctcatcctcgatgcacctgatttattttaaaggccagaagatcccgccccattagcaactataacataaaatcagtatcctggactggctcacagatagacttcagtgagctatttctagcacgagtggcttacacgtgaagcaaggaagcaagtccgttttgaatcctatttggtgactttagtctcataccaaaattattcaagaatttcacctctcctaaaactggaaattaccagcgttttttttgtgtgtgtatgcaagttccttaaatatagcaagttcagatttatctttacaatcccagcacctaacacaatacttgaatcttaagtggtaaatgagagtttagagtttcatttaccactaagacaacataagttaatgagaagtctatcagagtagtgagtatttaatttatttaaaaaggtggatatgtttataagaaacttttaaaaaaagatccagcctgggcaacatagcgagaatctatatcttcaaaaaaatttttaaattagccaagatggtggcatgcacctgtagcttcccagctacttggaaggctgagtgggaggatcacttgagcccaggaggttgaggctagagtgagccgcaatcacgccactgcactccagcctgggtgacagagcaagaccctgtctcaaaaaaaaaaaaaaaatgaaaagtataattactagtaagaaatcagtatcatttcatctacttttttaaattttagaaaattaaaaggaaaaaatctaacacataacaacaattacccataagtggaatacatggagtacgagagtgaaattcttccatgtttcagttgcatcatttagaaacatttatagctacaaaagcttcagagatcttgtagctcaaaccatatttcatagcagtcaacaggccatggatctttaaaacatttctctatctagccctcccatcaaaacagggacaatattgttgctcaggaacaaaaataaataaataaatcactaacagattttaagtttctataaagtcagaggaagttaggtaaaagcatgcagtttgctgagattatttcattgaaattaacacttcacaatattagcagtcaaaaacttaagttttttttttaattttgaaattgaaacaaagttgtaagcatttattttttaaacatttagatatgtggaaaacttttaataaaaatagtctaatttaaatttaagggaatttaaccaaatcagtactttagtccacatgaagtcattcagtggaataaaaataataattagcaactattagagagctttaatttatamaatttactcttcccccaaaccctatcaagaaaatgtattggtgtgctcattctcagatgaggaaactgaaaatgtgagaagtgaagtaatttttcaaaggctacacaatggaaacgtcataaatccctaattaaaaaccaaaagactttattaataacattccaaggttagtgttaaagatttttagattagagattagaaagatgtttccataaatactccaaagagaatgtattctcttttttgtataaactaatttgtacatcattttttgtgctctgatttttttactaggtttgcaaaataaataaataagacagtgttttggaagtgtattagcaaaggaaaacaatgtaaagagaacacattttaggaacattcactcctatagattggcacttctgtttctgaaatagtttctgcatttcccaacagagaatgagtattctgtcctgcaccctccggtaaaaacattagtcagctcttaacatgctcaacgtttgagggagtggatgtgtagagagcacaagaaagattcaacatgtggataattcaaaacctactcagagctggcattggaatgtgttagtacacacacttcaacatgggtgtggcttgtcttttgaaaagtagctcaaagcaaaaccatcaggacacgcaggcaactgtctgacccggcttaggaagacaatgagctgctcgaaggcctgggtgatccagatgatcttctaaaaaaaaccctccaatttcacgtctctgtgacttaattcagaggctgctgggatattgtccattacacagagaaagtggtgactgtcctcattccaatggccagcacagctcttccctgaaatccaacccgaaagatttccctctcagtgtgagtgatgccagcactgtcctctcagcacccttccagctccagggaagatgtcacagtatttgtgtttcaagctataattaagcagagcaggtgctaaatgccagcacaaagtttcaacatgacaacttctgaagtggtgatgatgatgtcaaaacagacagaaatacatccacctcgcatacctaaagggcttccaaatctctgtagcagcacccactgacgaaaaagcagttccaaaagcctgtcatttcacccaggagttttctatcaagtaagaatacatgaggccttagagaatgacggacatgtttcactgacatgaaacacacgggtgatgtgcctggcacacatgcacatgcgcacgtatcatcccctacaaacagtcggggaggtgctcctggggcagctcttgtccctaccttcctttccccaaaggggactgggtgtaccagtaattttcagaatctttcatttgaatcactaaggttgtacttgttccaatttcttgaagaaaaaaaaaaaaaagagcattcctgagagagcaatgccgaaatgaaggtacaaaaattcacttctgaatattaaaatctctgcagatatcttctttattaccctcatagtccaaaatcttaccaacttttcataaggttcttgcctgaaatcccttactttaaaataaaaacacattgagtgcttccaccttgacactcacaaaagatcatgggataaatggacctttgcagaattattttcttccctttcaaatgccaggctccttctgtgtgaattttccacaatttcatagctcataatagcctatccttactgttagatattaaataatttttctacaacaaagtcgcagataagaaaaatcagacccagcatattgcaaacattactggctgtgaagcattgagcctaagttcaaaactaggagtaaaactttacagcattagtaagtcaataggaaatgacagaatttgaatatccccattctgccaccctaatagatctagaaaacgattatcaatgaatgctaataacacaaaaagagagactagtagtaatgatgtccctcct

SEQ ID NO: 713533 - DNA, 3433 bp, Homo sapiens
ctcaggcaactccacacagtcctgagagggcagccagagtcagagccgtcccagcccaggcttgacacccttctggaccccctgcatgagaccatcagggccaatacaggacatccacaggtccatgaatcagagacttaaaacctggagagttctcatcctcgatgcacctgatttattttaaaggccagaagatcccgccccattagcaactataacataaaatcagtatcctggactggctcacagatagacttcagtgagctatttctagcacgagtggcttacacgtgaagcaaggaagcaagtccgttttgaatcctatttggtgactttagtctcataccaaaattattcaagaatttcacctctcctaaaactggaaattaccagcgttttttttgtgtgtgtatgcaagttccttaaatatagcaagttcagatttatctttacaatcccagcacctaacacaatacttgaatcttaagtggtaaatgagagtttagagtttcatttaccactaagacaacataagttaatgagaagtctatcagagtagtgagtatttaatttatttaaaaaggtggatatgtttataagaaacttttaaaaaaagatccagcctgggcaacatagcgagaatctatatcttcaaaaaaatttttaaattagccaagatggtggcatgcacctgtagcttcccagctacttggaaggctgagtgggaggatcacttgagcccaggaggttgaggctagagtgagccgcaatcacgccactgcactccagcctgggtgacagagcaagaccctgtctcaaaaaaaaaaaaaaaatgaaaagtataattactagtaagaaatcagtatcatttcatctacttttttaaattttagaaaattaaaaggaaaaaatctaacacataacaacaattacccataagtggaatacatggagtacgagagtgaaattcttccatgtttcagttgcatcatttagaaacatttatagctacaaaagcttcagagatcttgtagctcaaaccatatttcatagcagtcaacaggccatggatctttaaaacatttctctatctagccctcccatcaaaacagggacaatattgttgctcaggaacaaaaataaataaataaatcactaacagattttaagtttctataaagtcagaggaagttaggtaaaagcatgcagtttgctgagattatttcattgaaattaacacttcacaatattagcagtcaaaaacttaagttttttttttaattttgaaattgaaacaaagttgtaagcatttattttttaaacatttagatatgtggaaaacttttaataaaaatagtctaatttaaatttaagggaatttaaccaaatcagtactttagtccacatgaagtcattcagtggaataaaaataataattagcaactattagagagctttaatttatacaatttactcttcccccaaaccctatcaagaaaatgtattggtgtgctcattctcagatgaggaaactgaaaatgtgagaagtgaagtaatttttcaaaggctacacaatggaaacstcataaatccctaattaaaaaccaaaagactttattaataacattccaaggttagtgttaaagatttttagattagagattagaaagatgtttccataaatactccaaagagaatgtattctcttttttgtataaactaatttgtacatcattttttgtgctctgatttttttactaggtttgcaaaataaataaataagacagtgttttggaagtgtattagcaaaggaaaacaatgtaaagagaacacattttaggaacattcactcctatagattggcacttctgtttctgaaatagtttctgcatttcccaacagagaatgagtattctgtcctgcaccctccggtaaaaacattagtcagctcttaacatgctcaacgtttgagggagtggatgtgtagagagcacaagaaagattcaacatgtggataattcaaaacctactcagagctggcattggaatgtgttagtacacacacttcaacatgggtgtggcttgtcttttgaaaagtagctcaaagcaaaaccatcaggacacgcaggcaactgtctgacccggcttaggaagacaatgagctgctcgaaggcctgggtgatccagatgatcttctaaaaaaaaccctccaatttcacgtctctgtgacttaattcagaggctgctgggatattgtccattacacagagaaagtggtgactgtcctcattccaatggccagcacagctcttccctgaaatccaacccgaaagatttccctctcagtgtgagtgatgccagcactgtcctctcagcacccttccagctccagggaagatgtcacagtatttgtgtttcaagctataattaagcagagcaggtgctaaatgccagcacaaagtttcaacatgacaacttctgaagtggtgatgatgatgtcaaaacagacagaaatacatccacctcgcatacctaaagggcttccaaatctctgtagcagcacccactgacgaaaaagcagttccaaaagcctgtcatttcacccaggagttttctatcaagtaagaatacatgaggccttagagaatgacggacatgtttcactgacatgaaacacacgggtgatgtgcctggcacacatgcacatgcgcacgtatcatcccctacaaacagtcggggaggtgctcctggggcagctcttgtccctaccttcctttccccaaaggggactgggtgtaccagtaattttcagaatctttcatttgaatcactaaggttgtacttgttccaatttcttgaagaaaaaaaaaaaaaagagcattcctgagagagcaatgccgaaatgaaggtacaaaaattcacttctgaatattaaaatctctgcagatatcttctttattaccctcatagtccaaaatcttaccaacttttcataaggttcttgcctgaaatcccttactttaaaataaaaacacattgagtgcttccaccttgacactcacaaaagatcatgggataaatggacctttgcagaattattttcttccctttcaaatgccaggctccttctgtgtgaattttccacaatttcatagctcataatagcctatccttactgttagatattaaataatttttctacaacaaagtcgcagataagaaaaatcagacccagcatattgcaaacattactggctgtgaagcattgagcctaagttcaaaactaggagtaaaactttacagcattagtaagtcaataggaaatgacagaatttgaatatccccattctgccaccctaatagatctagaaaacgattatcaatgaatgctaataacacaaaaagagagactagtagtaatgatgtccctcct

SEQ ID NO: 713534 - DNA, 628 bp, Homo sapiens
aaaaaaaaaaaaattttttttcttggattcaagattcaaagataaatatttaagtgttgattgtattactattggattggatttgatcttagaacaagcagcatacacttaaatcaaggctagaaaggtatttttaagtgttacaggatactgtaaaaacatattcagatgtttggtttaaaatatagcctgggatgctgccaagcaatgctcctcagcaacttggtggtaagtgctttgtataatcctgtcttaggtttgtcttgtttttaatgtactttagatactccatcctccataagatgaaaaagaaatcagtctacatttttaaatgtttataatgccaggcacggtggctcacgcctgtaatcccaacacttcggggagttgaggtgggaggatcgcttgagcccaggagttatgtgaccagcctgggcaacatggtgaaaccctctctctacaaaaagcacaaaaagttagccaggcatggcagtgcrtgcctgtagtcccagctacctgggaggccgagatgggaggatcacctgagctcgggaggtcaaggctgcagtgagccacgatcacaccactgccctccagcctgggtgacagtgagacactgtctcaaaaa

SEQ ID NO: 713535 - DNA, 1540 bp, Homo sapiens
tacctgccttggcctcacgcttgggattacagccacgagccatagtgcctagccagtatcttcttatcttctttccttttctttctttctttctttcttttttttttttttttttttgagacagttgtgctctgtcgcccaggctggagactggagtgcagtggcgcgatcccagctcactacaacctctgcctcctgggttcaagcgattctcctgccttagcctcccaagtagctaggattacaggtgtgcaccaccacacctggctaatttttgtatttttagtagagacaaggtttcatcatgtggaccaggctggtcttgaactcctgacctcaagtcatccacctgtctcagcttcccaaagtgctgggattacaggcatgagccaccgtgcccagccttttgtgtctttttttcttaagactcattcccaccctgtacctacctcttccctatggttctcagagctagccttttctttcctctggtgtcacactgatcccatcctcaaaacaaatgaccttatgggacatcggccaataggcaccccccactgataaaatatttaatttaatcagccattacagggatccaggattcatagacaagggtactttaggtagaccccttcccactggcgaggtcccataaccactgaaggtctctctaaaattttaaaaagtgaaacaaaaatttgcatatttgcaaaatgtttgattcataataagcccacttgggaatctgtgattatcttgaacaatcttaattctggacaaatgagcttgtcaaattgttcttcctcctttcttttatttttttttgagacatggtgtccatctgttgcccagactggagtgcaatagcacgatcgtggctcactgcaacctccacttcctgagttcaagcaattctcctgcctcagcctcctgagtagctgggattacaggtgtccaccaccatgcctggctaatttttgtatttttagtagagacagggtttcaccatgttggtgaggctggtcttgaactcctgacctcaggtgatcagcccacctctgcctcccaaagtgctggaattataggcatgagccactgtgcctggcctgttccttctttctaatggtggattaccttcctgtaaacacactggaatttacagaaagacaagaaggtaatgaacaattacataatatatgctaggtggtgataagtgctgggaagaaaataaagcagtgtaaagggataaagattgatggttgggttggggattggtgtctcatgtagaacggtcatggaaggctcctgacaaagtgacattggattaaaggcctgaagaagtgaggaagtgagcccaccgagatctggtgggagaatgtttcaagcagagggartggtgactgcagaggctcagaatggagcatgaccagcatgcctgaggaacgtaaggaggcctttgtgtgcctggacagactgggtgagagagaggcataggagatgggggcagtgagatcatcccggctgtggaggctgtgggaaa

SEQ ID NO: 713536 - DNA, 889 bp, Homo sapiens
gctcagaatgatggtttccagcttcatccatatccctacaaaggacatgaactcatccttttttatggctgcatagtattccatggtgtatatgtgccacattttcttaatccggaacttagacaaaaatttaaaaaaggaaataaaaattacaaatggaaggctgggaacracgtcactagttttacaacttttaaaatccttaattatcttgtgccatttctgcacaaatggaaactattttttaaaaaaactgcatgattaatatctcagttgcatctgtggttataagaaaataaaggtgtgaggcacctctggtattgtattagtatacaccactggcattttactgtttgtgtgtatgtgtgtatgtgttttaaatgaataaaataattgtagtgattaaaagaagtccgtgttctgtttgggaggcccgaggcaggtagatcatgaggtcaggagttccagaccagcctggccaacatggtgaaaccccctctctactaaagataccaaaaattagccgggcgtggtggctcacgcctgtaatcccagtactttgggaggccgaggcaggcggatcatgaggttaggagttcgagaccagcctggccaacatggtgaaaccctgtctgtactaaagatacaaaaaattagccaggcatggtggtgcatgcctgtaatcccagctacttgggaatctgagacaggagaatcacttgaacccgggagacagatgttgcagtgagccgagatcatgccgttgcactccagcctgggcgacagggtgacattccgtctcaaaaaaaaaaaattccgcgttctgtgtgtctgttgtgtatgtgctgtgaactgaaggtcctactatcaggtgtagtccctacccttg

SEQ ID NO: 713537 - DNA, 889 bp, Homo sapiens
gctcagaatgatggtttccagcttcatccatatccctacaaaggacatgaactcatccttttttatggctgcatagtattccatggtgtatatgtgccacattttcttaatccggaacttagacaaaaatttaaaaaaggaaataaaaattacaaatggaaggctgggaacgaygtcactagttttacaacttttaaaatccttaattatcttgtgccatttctgcacaaatggaaactattttttaaaaaaactgcatgattaatatctcagttgcatctgtggttataagaaaataaaggtgtgaggcacctctggtattgtattagtatacaccactggcattttactgtttgtgtgtatgtgtgtatgtgttttaaatgaataaaataattgtagtgattaaaagaagtccgtgttctgtttgggaggcccgaggcaggtagatcatgaggtcaggagttccagaccagcctggccaacatggtgaaaccccctctctactaaagataccaaaaattagccgggcgtggtggctcacgcctgtaatcccagtactttgggaggccgaggcaggcggatcatgaggttaggagttcgagaccagcctggccaacatggtgaaaccctgtctgtactaaagatacaaaaaattagccaggcatggtggtgcatgcctgtaatcccagctacttgggaatctgagacaggagaatcacttgaacccgggagacagatgttgcagtgagccgagatcatgccgttgcactccagcctgggcgacagggtgacattccgtctcaaaaaaaaaaaattccgcgttctgtgtgtctgttgtgtatgtgctgtgaactgaaggtcctactatcaggtgtagtccctacccttg

SEQ ID NO: 713538 - DNA, 889 bp, Homo sapiens
gctcagaatgatggtttccagcttcatccatatccctacaaaggacatgaactcatccttttttatggctgcatagtattccatggtgtatatgtgccacattttcttaatccggaacttagacaaaaatttaaaaaaggaaataaaaattacaaatggaaggctgggaacgacgtcactagttttacaacttttaaaatccttaattatcttgtgccatttctgcacaaatggaaactattttttaaaaaaactgcatgattaatatctcagttgcatctgtggttataagaaaataaaggtgtgaggcacctctggtattgtattagtatacaccactggcattttactgtttgtgtgtatgtgtgtatgtgttttaaatgaataaaataattgtagtgattaaaagaagtccgtgttctgtttgggaggcccgaggcaggtagatcaygaggtcaggagttccagaccagcctggccaacatggtgaaaccccctctctactaaagataccaaaaattagccgggcgtggtggctcacgcctgtaatcccagtactttgggaggccgaggcaggcggatcatgaggttaggagttcgagaccagcctggccaacatggtgaaaccctgtctgtactaaagatacaaaaaattagccaggcatggtggtgcatgcctgtaatcccagctacttgggaatctgagacaggagaatcacttgaacccgggagacagatgttgcagtgagccgagatcatgccgttgcactccagcctgggcgacagggtgacattccgtctcaaaaaaaaaaaattccgcgttctgtgtgtctgttgtgtatgtgctgtgaactgaaggtcctactatcaggtgtagtccctacccttg

SEQ ID NO: 713539 - DNA, 889 bp, Homo sapiens
gctcagaatgatggtttccagcttcatccatatccctacaaaggacatgaactcatccttttttatggctgcatagtattccatggtgtatatgtgccacattttcttaatccggaacttagacaaaaatttaaaaaaggaaataaaaattacaaatggaaggctgggaacgacgtcactagttttacaacttttaaaatccttaattatcttgtgccatttctgcacaaatggaaactattttttaaaaaaactgcatgattaatatctcagttgcatctgtggttataagaaaataaaggtgtgaggcacctctggtattgtattagtatacaccactggcattttactgtttgtgtgtatgtgtgtatgtgttttaaatgaataaaataattgtagtgattaaaagaagtccgtgttctgtttgggaggcccgaggcaggtagatcatgaggtcaggagttccagaccagcctggccaacatggtgaaaccccctctctactaaagataccaaaaattagccgggcgtggtggctcacgcctgtaatcccagtactttgggaggccgaggcaggcggatcatgaggttaggagttcgagaccagcctrgccaacatggtgaaaccctgtctgtactaaagatacaaaaaattagccaggcatggtggtgcatgcctgtaatcccagctacttgggaatctgagacaggagaatcacttgaacccgggagacagatgttgcagtgagccgagatcatgccgttgcactccagcctgggcgacagggtgacattccgtctcaaaaaaaaaaaattccgcgttctgtgtgtctgttgtgtatgtgctgtgaactgaaggtcctactatcaggtgtagtccctacccttg

SEQ ID NO: 713540 - DNA, 889 bp, Homo sapiens
gctcagaatgatggtttccagcttcatccatatccctacaaaggacatgaactcatccttttttatggctgcatagtattccatggtgtatatgtgccacattttcttaatccggaacttagacaaaaatttaaaaaaggaaataaaaattacaaatggaaggctgggaacgacgtcactagttttacaacttttaaaatccttaattatcttgtgccatttctgcacaaatggaaactattttttaaaaaaactgcatgattaatatctcagttgcatctgtggttataagaaaataaaggtgtgaggcacctctggtattgtattagtatacaccactggcattttactgtttgtgtgtatgtgtgtatgtgttttaaatgaataaaataattgtagtgattaaaagaagtccgtgttctgtttgggaggcccgaggcaggtagatcatgaggtcaggagttccagaccagcctggccaacatggtgaaaccccctctctactaaagataccaaaaattagccgggcgtggtggctcacgcctgtaatcccagtactttgggaggccgaggcaggcggatcatgaggttaggagttcgagaccagcctggccaacatggtgaaaccctgtctgtactaaagatacaaaaaattagccaggcatggtggtgcatgcctgtaatcccagctacttgggaatctgagacaggagaatcacttgaacccgggagrcagatgttgcagtgagccgagatcatgccgttgcactccagcctgggcgacagggtgacattccgtctcaaaaaaaaaaaattccgcgttctgtgtgtctgttgtgtatgtgctgtgaactgaaggtcctactatcaggtgtagtccctacccttg

SEQ ID NO: 713541 - DNA, 889 bp, Homo sapiens
gctcagaatgatggtttccagcttcatccatatccctacaaaggacatgaactcatccttttttatggctgcatagtattccatggtgtatatgtgccacattttcttaatccggaacttagacaaaaatttaaaaaaggaaataaaaattacaaatggaaggctgggaacgacgtcactagttttacaacttttaaaatccttaattatcttgtgccatttctgcacaaatggaaactattttttaaaaaaactgcatgattaatatctcagttgcatctgtggttataagaaaataaaggtgtgaggcacctctggtattgtattagtatacaccactggcattttactgtttgtgtgtatgtgtgtatgtgttttaaatgaataaaataattgtagtgattaaaagaagtccgtgttctgtttgggaggcccgaggcaggtagatcatgaggtcaggagttccagaccagcctggccaacatggtgaaaccccctctctactaaagataccaaaaattagccgggcgtggtggctcacgcctgtaatcccagtactttgggaggccgaggcaggcggatcatgaggttaggagttcgagaccagcctggccaacatggtgaaaccctgtctgtactaaagatacaaaaaattagccaggcatggtggtgcatgcctgtaatcccagctacttgggaatctgagacaggagaatcacttgaacccgggagacagatgttgcagtgagccgagatcatgccrttgcactccagcctgggcgacagggtgacattccgtctcaaaaaaaaaaaattccgcgttctgtgtgtctgttgtgtatgtgctgtgaactgaaggtcctactatcaggtgtagtccctacccttg

SEQ ID NO: 713542 - DNA, 1362 bp, Homo sapiens
gattttggtcactgggagctcctggtaccagtctgtacatggcgagccatcatccaagctctcagagcgtgactcagatatgattatttcctcaaagccatcaataataaacaggagcttctctggttgagacatgaactcttcaatgggggcatcaaaatcgggccaatccaaagaaatcaattcagcaaaggtagtttccttcatgtaccttattttatggcagctgagatagaaaacataggagaacctttgctgaaagagaactccatttgcccagtgcagcatagcctgcattgccaaggtggtcttcccaacccctgccctccccaccaagactatcgtctgggcctgggctctagtcctattaggatccagtaggcgctgcagttcctcatgttcgtcctttgatgtattacggatatatacgtggtctttaggccaactgatgttgtcccatgtctccagtagttcagccttcatgttctctctgtattttcttctgtggtctagagagggcggagtggggagaagaatggtaagaataaatttcagagttaggaatgattcagttacaaagttcctaccccaaagacttgaataagagaaactctgccttccaggattttgtgggaatgcagtggtagaaagttgcaaaaggaggctgaggtaggagaatggcgtgaacccgggaggcggaggttgcagtgagccgagaggcaccactgcactccagcctgggtgacagagtgagactccgtctcaaaaaaaaaaaaaaaaaaaaaaagttgcaaaatatgaagacagttaaataatttgatgatatatacaaatgaaaaatacagaataacataagagcgatcaagaacacctttaagagagggcagagaagggatcatagcgagaagcctctcactagaggattctacactgagaatggagaagaatcatcagaagagaagtcagtctggggtactttcaggcggggggaaggccaaggtgaatgcccacccagaatttttttctgcaagcctcgtgagtgtgcccactccattgcctgaccagctcagcaccccaaaracaccttctagccagtagagggggcccatgagccctcttccctcaccagctatcaggttttcctcacttcctcgaaacacttcagagcaacaagggatttgggcaggtcagagtcccccactcacagaaggctgacccgactcgactcacaagggaatcagtaactgtagagcctgccagttttcctggtccctgtgcccagacagcttcagctggtgagggcttagactctaggttgccctgaagatcaaggctttgtctctcccattctccccattcctg

SEQ ID NO: 713543 - DNA, 1112 bp, Homo sapiens
tgaagcatagtaatagaatttcaaaatagaaaagattattggggacctgtgtttaacccagcttcattttgtgtggagctccttgaggctcagagacaggaaaggaaacacagaatgtaagtgaaaggagaaagagggaaggaaggagagtggtccacaatttcaaggcacagtgtacaggctggctctgcacaacagccctaggataagaagtgggcaatgcctttccaggaattagagaaaaacagcagccagcccatctgcccaggaggctgtgagtgcctggacagtgcatgttttgttaattagtacaaaggttctacctgagctggcggaggtcctgccaagtactcttcctggagctagaaaacttgggctgggatctgggcacggctagagtgagtcctctctctcctttgagaccgttttatttgcataaaacagagtgtggcttcctcactgttcacagggttgctgtagaatccaatgagaccatggacgtaaaagatgcacagcacattgtgaaatgctgacactgcccgtggctagtcttggagcttcctctttctctggacttcattcattgctcctctagctacctttaagactagctcaggtgaatctccttttatcctggccttcccggtgatcctgagattgccttgcttacctctgctatcttagtatttaagtctgtgctatgtgcattgggtggttccaggaggactctcgttgtaagtgacaggaaaccaactcaggtttacttgagttgggggaaaggagaaaacacttttgtattcatgaaaattagaagttcaaaattagttctggcttcatctccctctctcagctctgcttttatcttttcagctccattctcaagcaggctrtgatggttaatagtgtcaacttgattggattaaaggatgcaaagcattgttcctgggtgtgtctgtgagggtgttgccaaggaagatcgacattttagtcagtggactggaagaggcagactcactctcaatctggcaccatctaatcagctgccagtgaggctagaataaagcaggcagaagaacatggaaggactagactttctgagtcttcgagccttc

SEQ ID NO: 713544 - DNA, 1112 bp, Homo sapiens
tgaagcatagtaatagaatttcaaaatagaaaagattattggggacctgtgtttaacccagcttcattttgtgtggagctccttgaggctcagagacaggaaaggaaacacagaatgtaagtgaaaggagaaagagggaaggaaggagagtggtccacaatttcaaggcacagtgtacaggctggctctgcacaacagccctaggataagaagtgggcaatgcctttccaggaattagagaaaaacagcagccagcccatctgcccaggaggctgtgagtgcctggacagtgcatgttttgttaattagtacaaaggttctacctgagctggcggaggtcctgccaagtactcttcctggagctagaaaacttgggctgggatctgggcacggctagagtgagtcctctctctcctttgagaccgttttatttgcataaaacagagtgtggcttcctcactgttcacagggttgctgtagaatccaatgagaccatggacgtaaaagatgcacagcacattgtgaaatgctgacactgcccgtggctagtcttggagcttcctctttctctggacttcattcattgctcctctagctacctttaagactagctcaggtgaatctccttttatcctggccttcccggtgatcctgagattgccttgcttacctctgctatcttagtatttaagtctgtgctatgtgcattgggtggttccaggaggactctcgttgtaagtgacaggaaaccaactcaggtttacttgagttgggggaaaggagaaaacacttttgtattcatgaaaattagaagttcaaaattagttctggcttcatctccctctctcagctctgcttttatcttttcagctccattctcaagcaggctgtgatggttaatagtgtcaacttgattggattaaaggatgcaaagcattgttcctgggtgtgtctgtgagggtgttgccaaggaagatygacattttagtcagtggactggaagaggcagactcactctcaatctggcaccatctaatcagctgccagtgaggctagaataaagcaggcagaagaacatggaaggactagactttctgagtcttcgagccttc

SEQ ID NO: 713545 - DNA, 599 bp, Homo sapiens
atgattttttttggtaagtctgatttaacctatattaatccctttgtcctacttttagtaacttttttgttctttttctagcttctaaaggtgacagtttagtaaatttattttaaatcttttttgcttaatagaaaaataaatattttttagggctttatatatttctttgagtataactttggctgcatgccatagattttggaaaccattgctctaactgctattmatttctatgtagtctcaagtttatattttgatttaaatgttgtttggaaatatgtttctcaaaaattattaaatagctagaaaattttatttggggtttctcttaattgttaatttctagtttcattgcaccgtggtcagagaatatagcttgtataggtgttgctttttgcattatatgtgtgtatacatagtcagtttcttgaaatgattccatggacatttataaaaacgtaatattctgttttgggggcatataggattttagatatattcattaaatcaagattattcattatgctattagaatcctctatttcttcatggctatttgatccatccaattttaaggtttatattctttttgtaag

SEQ ID NO: 713546 - DNA, 890 bp, Homo sapiens
tggttgatggaaacatcattatgcattaccatgactgcaaatctaggtagtgtctgtcccaactactcaattctgcctgtcatagtgcaaaggcagccatagacagtgtgtaaatgaacaggcactgctgtgttcccatagaactgtacattcgctgaaatcccaatgtcacatgattttcatgtgtcatgattttaatcgttttgtttcctaccattaaaaaaagtagaaaccattcttatttatgtctgtacagaaacgagcagcgggccaaccttgaaaggaagtaaaaggaagatgttcctttttcaaatgcagtgagaatatcccagagaggaccatgacataggatgtttcrcaaaaggctgagcatcactggggtgttccccaccctgttccatcaagcattattttgggaaatgtggtgctaagagtttgaacttgcaggatctagtatggttcccagcacaaggtaagtccagatggaaagctggttgagggatatttatgtagtgctgactaggaacccgacactcttctaagtgctttatgtatattaattcctctaagtcctcatcattatcccatgaggtagttatttagtatccccattttgcaaatgagcaagctgaggttcaaaggaatgaatgatttgtgtcaggctacccagtcagtgaggggcagagccacattgaagcctgttgaggagaagaagggattggtagggtagccctgtgatagtggcaggtgggtagaggggagttggttctgggtcataactacagaactacacgataagaactttatggagccaagagcaacagcccaggacatcccagtgaagatgtccaactggcaagattggccctcaggagatagttaaaggctga

SEQ ID NO: 713547 - DNA, 890 bp, Homo sapiens
tggttgatggaaacatcattatgcattaccatgactgcaaatctaggtagtgtctgtcccaactactcaattctgcctgtcatagtgcaaaggcagccatagacagtgtgtaaatgaacaggcactgctgtgttcccatagaactgtacattcgctgaaatcccaatgtcacatgattttcatgtgtcatgattttaatcgttttgtttcctaccattaaaaaaagtagaaaccattcttatttatgtctgtacagaaacgagcagcgggccaaccttgaaaggaagtaaaaggaagatgttcctttttcaaatgcagtgagaatatcccagagaggaccatgacataggatgtttcgcaaaaggctgagcatcactggggtgttccccaccctgttccatcaagcattrttttgggaaatgtggtgctaagagtttgaacttgcaggatctagtatggttcccagcacaaggtaagtccagatggaaagctggttgagggatatttatgtagtgctgactaggaacccgacactcttctaagtgctttatgtatattaattcctctaagtcctcatcattatcccatgaggtagttatttagtatccccattttgcaaatgagcaagctgaggttcaaaggaatgaatgatttgtgtcaggctacccagtcagtgaggggcagagccacattgaagcctgttgaggagaagaagggattggtagggtagccctgtgatagtggcaggtgggtagaggggagttggttctgggtcataactacagaactacacgataagaactttatggagccaagagcaacagcccaggacatcccagtgaagatgtccaactggcaagattggccctcaggagatagttaaaggctga

SEQ ID NO: 713548 - DNA, 1077 bp, Homo sapiens
gcatgccgttcaaaaatcataaacagtgttactgggaaaactgattgggaaattaatcctttgaaacaacaacatatgaatgcaatgattacacagaataaataaacagcttccccacaatttctcttttggataaatgtaaagtcattagtttcagaacagttttcccaaggacgtaaggttttgcttttcctccgtaatgcctcctcaaagctggtacatatcttatgctgagccatccctgaaaaggtagccttaatcaaaatctaatctataaatcacctttaaagccttgaatgtttggctttatgaggtcttacacacactttgcaggttcgcaaagaccacagatcagattattacaattcctctcaagatgtggcttaatgagggtgagggaagtatagaagacttcaactccagaccctcggaactagatcccctagttcactggatacatattttatggaaaagggtaagattgtatcacagtgttaatccagaaactcgaatcctctgattagaatcagaggagaactgagaagaacctgccggcggatgcacgagtgggttagaatggaacttctccccacgaaggcagcacaggcttcgatggagcttttttcctgggtcccgagccacatcctgacaggccactgtggccctattgcacgcctggtgaggcggtgcatcagcttggattttctaacaggttcytttccagaacttttgctgcgggcacggagactcttaccaaattcggctccataatacattccccaaaacattagaacccaggataggtctacgcctccactgatacggaaaaatatatgaaagcgtggattagggtttttgccacagatgagaacaaaatccaacggagacttgacatttctttagaaaggctgccaccagcagaactttccccagaagttacatccgtgctgaccttcatcagttacattgagaaaaaatctgttctatgtgactgtcagccacaggagagggaattttaggcactgaacgtgacgagaaggactttctaactttgattcagtttcaactcacactccc

SEQ ID NO: 713549 - DNA, 873 bp, Homo sapiens
tgtgagccactgtgcctggctgagattctttttaaagtataatttacttcaagttatttaagttattattttacttcacatccagagggataaggaaggaaacaaatagcatgtttctaagaaccctagaatcattattgtattatgtccaaagggcatcccatggtttagaatgaataaaaacaaactaaatttataaaaattgcttacaatggcttatttattttttaacaatgaattttgccaaagagctatatttttgaagaactcagtgaatctgatgactagtgcaacattataaactgagttaaatgaaatgttatgacatttattcagcaagtcatgagactttcatatcagataaagaaaccaagacacagaggagtaagtgacatcaccaggttacagcagtaacagatgtggaaccttacccaagatccaggctctccagcaggggggtggcattgaaggggtagccctgactggactggaagctccttgagggcaggggccctgtcctatctattgctggagcagcggccatgacagtgcctgacacatagaggtatatgctgactgagataatgagtgaatgaaggaggacgtggtcccttccaggttcagtgactcagttaagccagtgactcagtgcctctggtgggggcagagatgagagtgaagggaagtctgtgttgtctgttgaatccactccaggctgcattgtcactgatgctagtggccatctgcccatcctcctactgactccatgtaccaggcagcattggtcccttcacggcactgattaggagcaagcctrctgtttgtaaggtaggtttgcttccacctttagaggcttgagagaaggaagtttgc

SEQ ID NO: 713550 - DNA, 458 bp, Homo sapiens
ctaattttttgtatttttagtagagacagggtttcaccgtggtctcgatctcctgacctcatgatccgcccgccttggcctcccaaagtgctgggattacaggcatgagccaccgcgcctggccaatagcattagtttaaaatcatgttgtggataaaaatgtaatcaagtagctttacattgctcttattaaacttgatacacacagtttaacatggtcttgtggaagaaaacaggaaaaatctctggcattctcgatatgttctatgatatgtrgcagctcttatgttctgtgtctgtcgcctattttgtaaacaggcaacaaaacaccatacttcatcccaaagttacgagaaacaaggaattaagcatgttgtgttggatggagttaatgatataacgttaaaaaataaccccacagtttccatctactctcttgctctctgcaatcaagctgg

SEQ ID NO: 713551 - DNA, 624 bp, Homo sapiens
ttagccgggcgtggtggcgggcgcctgtagtcccagctactccagaggctgaggcaggagaatcgcttgaacccgggagggggaggttgcagtgagccgagattgtgtctcagtgctccagcctggcaacagagcgagactctggctcaaaaaaaagaaaaaaaaaaaagtggtagcactgcttctctcagaaagacaaatgtctggaatacacaagtggcactgaatgtctcaggtcactgagasaggctggacagaggactgtgggaaagtgcaagtactaggtgactttaaaggacatcccaaaagtccaggttgaagtgatttttaatgagaatgtgcatgctgtgtatcttttttacgtattctaaaagtaatagacaattacaattattttaaaactccatcattacagaaaaacataatattaaaaagaccccacccagagattatcactgtgaaaagctgggggtattcttcatatttctaaagaatatactaacatatattttagtctgtacatgtatatttaattctttgcttcaacaagccgttgaaaaggatactcagtttgtaacttcacagccatgtgaagaagaaaagaatatttagggatcattggta

SEQ ID NO: 713552 - DNA, 639 bp, Homo sapiens
caaccaccttgttaaatagtttggcaatgtcttaaaatattaaacatacacttagtattttactcagcccttctactccaaggtattctcccaaaagaaataaaagtgtatgtccatataaagagttgtacatgaatgttcatagctttaatttatatatattatatataattattttaaatatatatgttatrtgcataattatacatatcatatataaattatatataatttatattcacacacacacacacgcacacacactaggcatagacaaactgtttttgtaaagggccaaacaattcatattttcaaccttcttcgtcaaatagtttccactaagctctgccattctatgaaacaagtatgtacaatatataagcagatgggatggtcatatgtggcgaacaacaggatgcattttgtcagttgaatttggcctgctgaatttgccaaactctacatacagtgaactattactattcagcaataaaaagaaataagctgatatatgtaataatatggatgaatcttcacatagttatgctgaatttaaaaagccagattaagaaaaggaagcatactgtataattccagttataaaattctagaacttacaaaccaacctatagtggtgaa

SEQ ID NO: 713553 - DNA, 1239 bp, Homo sapiens
gaatctaaggcaaataagggataaatgagagttggataccatgttgaataaaacaaaaaaatttgttccagtaattataaaatcttggtaatatattgattcttcattctaatgactgaaggcttgagttgagtgcctgcaagttacattttaaaaagctagctccaatttgtatagtcaagatgagagtacttcctctgttagtgatataaaaataacaccagtcaaaaggttgctcaatagtgaatcatcagtggcaggaagttagctttttgactgaatttctgcttcttgcagaagcagttgtagttcatttgaccgtatacatagagtaaatgcagcacattgttattttactgaataggttaatcacatgtttctggcttttcttacaatataaattatatcctagaaacaaaagatatttatatacttattaccactttcaaaaataagtataagagaaagataatatcaaacagatttttatttatttatttatttacttattttttagacagagtctctctctgttgtccaggctggagtgcaatggcacaatyttggctcactgcaacctccacctcctgggttcaagtgactcttgtgcctcaccctcctgagtacctgggattacaggcttatgccaccatgcctggctaatttttatatttttagtagagatggggtttttccgtgttggacaggctggtcttgaactcctgatctcaagtgatccgccagcctcagcctcccaaaatgctgagattacaggtgtgagccacaatgcctggctagatttatatttatttatctaaatagtggtatttactttttaaagttcttttgtaccagcacaagaatggctataaaaatcatttatatgtaaaataataataaaattccattttaatgaaaaattaagacaataaactaaaagctccacacatttagcaggctgtaaagactttattttgtaagatcacacaataattaaatccaaatagtctttagataataatcataaacacttgtttttgagtatgaatagcttcaaaagataggatataaaaattcccagactaatttctttcattttcctcacatcacataatcacaacacagaagcgtctagcagagaaataaaaaaatcttctatgttatgcatgcagatgagttctttgatgttagagcaaatgtgtaagtatctatttaaattgaaaaccatttttacagatt

SEQ ID NO: 713554 - DNA, 605 bp, Homo sapiens
tgccttccaaatggtatgtgcacaataaatggtagctattagtattatgcattttattaaaacatctgcaaaataaagatgcactactttaaaggatacccaaatacaaaggatagttttaaatatatgtgctatctacacaataaaattacctactttaattcaagaaaattacatatatttttaaattattctaggccaattttataaaactactatatcaatgtttatactattttagargcatatatgtttgtgtatatgtgtgtttcttatcactagatattacagaaagttaaattactgtctagaaatttcaatttttcattatgatattgaaaagtcatttctataaaattaaaagagtagtattcacacctgtaggtataaagatcttctcagatttcccaaactttagaaactattcatttagatgttaaaaacaaattacctgtgtcctgcataaattacaaataattcatgaaccccacaatgaaatatttatggtctcattgaatacttcccaggataataaaataaagactatgttctgtttatgtgcctgaatggccagaattttattttctgttttagttgataattca

SEQ ID NO: 713555 - DNA, 888 bp, Homo sapiens
acaatcctttactgaactcttattaaatggcagactgttctggttcctggggatacagctctctctcattctctctctctctgtacttacttacttaatttatttatgtatttattttactaaattaagagggtatataactgaacaagctctcatgatgcctcccttttaatgtaggagggacaaataatttaaaaagtaaacaagaaaatagcaggtggtgataaatgcagaacaatgacaataatcagtgtgatgtcttagagagcccctaggggccatttttggcagggtggtcaaaaaaggcttctccaaaaaggggatttcagctgaagctttcgtgataagaaggagcatgctttctgagcacgtgggcttaccaggtaaaaagggcagctagtgcgaaagccctgtggtaggaataagctttggcaaatacaaggaattagaagaaggtcaatgtaccagaagcacagtcgttaaggtggacagtaaggaatggaatatgagacagtcagacaaatcctaagaaggcagggccttcataggccaggcgaagagttcagattgtactttaagtgttacagaaagccattggagggtttcaagcaggggagtgacatgacctgactcacattttaaaataattactttggcctctctttggagaacagaaggtaaggggtaaatgtggaagcaggaaggccaagtaggaggcgagtacagtattttacacgagacwcgataaaatctggactgtggttgtagcagtggagatagaaaaatgtaaaagaaaaaagaattaagacacatttttgaggcaatactaatattctaccttacaatctaccgcctccttactctgccaaatctcacacatacagcatg

SEQ ID NO: 713556 - DNA, 1296 bp, Homo sapiens
aaacaaaaaccgtcactaagatgaaagactcctgtgttttcataagatttatatcatttattttggcatgtattgatagtaccaagacatgtagggtgcctgctatttcctgctttccaagtcttttagaatacctatcagtacaatgatgctgcatgttattgcataatatggtaagataatttaggtccctgtgggttaaatttcatcaaagaggcagggttgatgggttacaargttggaaaacaaaagtatactgctatccctgctacatagaagcaaattacttctattttttttttccattcatcaaaatgtaggggagaaacagtatatggtgtgtatcaggttgctccaggaaaaaaggctgtatcaggaacagtagaacatttaaagttaccatcagattaacatattccttttcaagatacatgtattttgttcagctaactcagagacaaaataggaatatgctaggaatgatcacccctaaaatattcaagtctgaaattcccctggagattattacttttgatttactattttggtaggaaagtgtggggttagcttgcagttggcctgtggtagctttatgtttatctccaaagatggttggagtcacagtactctcttttagccaagacagaaatgaaatgcactagctagtgatatataacatgctatttatatcctgaagctcccttgaatgcactctgtactagcttgtctgcatcatttttttaaaaatacagattggtaatcttcacctgtgttatctgatacgtagacaggttttggctatgtgatcagtggaatataaaagatcccttggtaaacttttgctgtgaagatgaagtgcattctgcacgacagcgggaggaccaaagaagttgtacctgaatgttcaggaccaacctgaagttgccttgtgctttcttgtccctgattctgtgtagcctttgcttatagaaaatctttctgagtaaacatcaccagagtctagtaagtcctttcaattatctgacccagagcttctttgaccccttttttaaaccataataacctttattccataggttagatggccactaaaaacttatgccattttttgcatatatctacacactcagaggaataaccataggatgggctcagagtctactaggtctattatagaattaaaaaaattaatttacctgatatccattgataagttcattctgggtccctggaaattagtattagctcagagttaacatctaatgtcgagcaatccaaaagttttggatataatct

SEQ ID NO: 713557 - DNA, 1296 bp, Homo sapiens
aaacaaaaaccgtcactaagatgaaagactcctgtgttttcataagatttatatcatttattttggcatgtattgatagtaccaagacatgtagggtgcctgctatttcctgctttccaagtcttttagaatacctatcagtacaatgatgctgcatgttattgcataatatggtaagataatttaggtccctgtgggttaaatttcatcaaagaggcagggttgatgggttacaaggttggaaaacaaaagtatactgctatccctgctacatagaagcaaattacttctattttttttttccattcatcaaaatgtaggggagaaacagtatatggtgtgtatcaggttgctccaggaaaaaaggctgtatcaggaacagtagaacatttaaagttaccatcagattaacatattccttttcaagatacatgtattttgttcagctaactcagagacaaaataggaatatgctaggaatgatcacccctaaaatattcaagtctgaaattcccctggagattattacttttgatttactattttggtaggaaagtgtggggttagcttgcagttggcctgtggtagctttatgtttatctccaaagatggttggagtcacagtactctcttttagccaagacagaaatgaaatgcactagctagtgatatataacatgctatttatatcctgaagctcccttgaatgcactctgtacyagcttgtctgcatcatttttttaaaaatacagattggtaatcttcacctgtgttatctgatacgtagacaggttttggctatgtgatcagtggaatataaaagatcccttggtaaacttttgctgtgaagatgaagtgcattctgcacgacagcgggaggaccaaagaagttgtacctgaatgttcaggaccaacctgaagttgccttgtgctttcttgtccctgattctgtgtagcctttgcttatagaaaatctttctgagtaaacatcaccagagtctagtaagtcctttcaattatctgacccagagcttctttgaccccttttttaaaccataataacctttattccataggttagatggccactaaaaacttatgccattttttgcatatatctacacactcagaggaataaccataggatgggctcagagtctactaggtctattatagaattaaaaaaattaatttacctgatatccattgataagttcattctgggtccctggaaattagtattagctcagagttaacatctaatgtcgagcaatccaaaagttttggatataatct

SEQ ID NO: 713558 - DNA, 1296 bp, Homo sapiens
aaacaaaaaccgtcactaagatgaaagactcctgtgttttcataagatttatatcatttattttggcatgtattgatagtaccaagacatgtagggtgcctgctatttcctgctttccaagtcttttagaatacctatcagtacaatgatgctgcatgttattgcataatatggtaagataatttaggtccctgtgggttaaatttcatcaaagaggcagggttgatgggttacaaggttggaaaacaaaagtatactgctatccctgctacatagaagcaaattacttctattttttttttccattcatcaaaatgtaggggagaaacagtatatggtgtgtatcaggttgctccaggaaaaaaggctgtatcaggaacagtagaacatttaaagttaccatcagattaacatattccttttcaagatacatgtattttgttcagctaactcagagacaaaataggaatatgctaggaatgatcacccctaaaatattcaagtctgaaattcccctggagattattacttttgatttactattttggtaggaaagtgtggggttagcttgcagttggcctgtggtagctttatgtttatctccaaagatggttggagtcacagtactctcttttagccaagacagaaatgaaatgcactagctagtgatatataacatgctatttatatcctgaagctcccttgaatgcactctgtactagcttgtctgcatcattttttwaaaaatacagattggtaatcttcacctgtgttatctgatacgtagacaggttttggctatgtgatcagtggaatataaaagatcccttggtaaacttttgctgtgaagatgaagtgcattctgcacgacagcgggaggaccaaagaagttgtacctgaatgttcaggaccaacctgaagttgccttgtgctttcttgtccctgattctgtgtagcctttgcttatagaaaatctttctgagtaaacatcaccagagtctagtaagtcctttcaattatctgacccagagcttctttgaccccttttttaaaccataataacctttattccataggttagatggccactaaaaacttatgccattttttgcatatatctacacactcagaggaataaccataggatgggctcagagtctactaggtctattatagaattaaaaaaattaatttacctgatatccattgataagttcattctgggtccctggaaattagtattagctcagagttaacatctaatgtcgagcaatccaaaagttttggatataatct

SEQ ID NO: 713559 - DNA, 1296 bp, Homo sapiens
aaacaaaaaccgtcactaagatgaaagactcctgtgttttcataagatttatatcatttattttggcatgtattgatagtaccaagacatgtagggtgcctgctatttcctgctttccaagtcttttagaatacctatcagtacaatgatgctgcatgttattgcataatatggtaagataatttaggtccctgtgggttaaatttcatcaaagaggcagggttgatgggttacaaggttggaaaacaaaagtatactgctatccctgctacatagaagcaaattacttctattttttttttccattcatcaaaatgtaggggagaaacagtatatggtgtgtatcaggttgctccaggaaaaaaggctgtatcaggaacagtagaacatttaaagttaccatcagattaacatattccttttcaagatacatgtattttgttcagctaactcagagacaaaataggaatatgctaggaatgatcacccctaaaatattcaagtctgaaattcccctggagattattacttttgatttactattttggtaggaaagtgtggggttagcttgcagttggcctgtggtagctttatgtttatctccaaagatggttggagtcacagtactctcttttagccaagacagaaatgaaatgcactagctagtgatatataacatgctatttatatcctgaagctcccttgaatgcactctgtactagcttgtctgcatcatttttttaaaaatacagattggtaatcttcacctgtrttatctgatacgtagacaggttttggctatgtgatcagtggaatataaaagatcccttggtaaacttttgctgtgaagatgaagtgcattctgcacgacagcgggaggaccaaagaagttgtacctgaatgttcaggaccaacctgaagttgccttgtgctttcttgtccctgattctgtgtagcctttgcttatagaaaatctttctgagtaaacatcaccagagtctagtaagtcctttcaattatctgacccagagcttctttgaccccttttttaaaccataataacctttattccataggttagatggccactaaaaacttatgccattttttgcatatatctacacactcagaggaataaccataggatgggctcagagtctactaggtctattatagaattaaaaaaattaatttacctgatatccattgataagttcattctgggtccctggaaattagtattagctcagagttaacatctaatgtcgagcaatccaaaagttttggatataatct

SEQ ID NO: 713560 - DNA, 1836 bp, Homo sapiens
gtcaaactgcttatttgacgggacttcagcccccmtccccaccgccttcattccccggtttccctgtgccaatctggctgctggttagtgccctggggctgcacaggggtagacagcatggtgggaggaggcgaactgggcagggggttgaccccgacaggtggaggagtgtcaaacagattaggtcgcggatgaaaggaggacagagccactctttaggccagcagagatcccttcaagtgtgtgcaaatggattgcagctcccatagcaggagacgacactgtggttgcatcatggcaagtgccacccttggcctcagatgggagttccttctgtgcgtggtatttttgttaatagcctgaaacatttcttgaaagggctgtcagaatcctaagatggtcaggacaggatctcaagggccaggaaaagggctacaaggctcccaaacctggagccttaaatggacttgtgcttgccaaagccagacaagagaaagtttgctgagattatccacaatgtggctgaaggaacaagtgaacagtgtatatttttgtgtctccatcagatatattcccacacattcaatgttgaaataaaaggcaaacaaaaagtaactaacgttgataaacatgtaaatgacagtatattcacatgtctccaagtggctgtggaggccggctagtagaactgcctcttttagagattggaaaatacaagtccgggtagttcaaggccaaagctgcacttggagttggtgggtgacatggaactggaactggagtctcttggagtccaacacgatttctaaaacccatgtggggctggacgcggtggctcacgcctgtaatcccagcacttagggaggccaaggcgggtggaacatgaggtcaggagattgagactatcctggctaacacggtgaaatcccgtctctactaaaacaaaacaaaaaattagccaggcgtggtggcacacacctgtagtcccagctactcaggaggctgaggcaggagcatcccttgaacctgggaggtggaggttgcagtgagccgagatagcaccactgcactgcagcctggggacagaacaagactctgtctcaaaaacaaacaaacaacaacaacaacaaaaccacacgggtcatgacttttgtcattggggggagttttattcttcatagcaaactacctctaggaagttgggttttctaattctccttgggtctaaactgtgtactcgtcacttaaaaattaggcactttaattatataaaaaagcatatgaattgtaaacaaattttaaaatgaacttaaaaattagcatcagaaatcaattcctttaattcaccagccactaggttaatttcagcagaaaaatgctttagtatactccaaatatcatactaatttgagaaagtttccattatttctactgtgtgtttctttttatccttcttttattgtttatctcttcacaaaaatacagagtgccttctttctgtacgcctgttggtgagcattctagagaatgtgcattaagaagtgcaggaccgctgggcgcggtggctcacgcctgtaatcccagcactttcggaggccaagtcaggtggatcatctgaggtcaggagccggaggccaacctgaccaaaaccccatctctactaaaaacacaaaagtgagtctgacgtggtgggaggctgaggcaggagaatcacttgaacccgggaggcggaagttgcagtgagccaaaatcgtgccacaggactttagcatgggcaacaaaagtgaaactccatctcaaaaaaaaaaaaaaaaaaagtgcgggatcaactttaca

SEQ ID NO: 713561 - DNA, 1655 bp, Homo sapiens
gtaacaaaatatcacaggtaccccgtaaatatgtacaaatattatgtatcaaaatggttttgtgaaactgcctgcaagatgaaaaactgaacttggcctgtctaaggatggctacaggtattcagttctggtccctttgactgaggcattggagcagctgagaggatgtctcaggcctcctgtgggtggaacacccctgggctggctgggcactgttccccaggcccagaggacagctgtgtaagggagagagagcctccctttgggagagtcgggaggagccctccccaccatatgggctgggagaggagcgattccatgtcctggaaggccttctatgttatctccacctatgggagtaaaatatctgccaactaaatattacatttctttccaaaagtagtttgatatattttccacaaaatcagtttgcattttgaaattttctatcctgactcaaagtaccgccatgacccaattgcccaagccagtgtggactcctcccagccacccccatctcagcatcaggctggcctcaaagcctgaactccatgacctcctgaattcctcccgtatctgtcacctcctctgtgtccccgtcggcacacctcaggacaggcgtccctcatcacttcccggagtcaccacagccacctccacttacctcctcatcgcattaaagctccttgaacttaatccaaaagcttcagctggcccccatttcacatcaaatgaagtccaaaaccaagatctggcattcaaaggccataatccactcgcctatctctctcattgtgtctcctgccttcccccaagagaagcctcctccaaggtgcacccgaagagagaacaggcatttgtccaacaggctgtgtttcttctcacctcctgtgccttgttacggtgcagtggtacaagtgtgcgtccagacacctaaggaggccaagccacccacgaggtgtcagcttcaacatttccccatgggaccgtcctttctagggaaagccccccttgggagacctccggcgatttctaagacttaagaattgtttagtgagagaagaagttcttggaaatattcatcaccagaacatacatgtatcaaaataaattctcccattaacaaacaaagatacactatctcacatcattagggtgcctattgtcaaaaataaataaataaaagacagcagagaaattaacaagtgtgggcaagaatgtgaagaaattgaacccctgagcagtatcagtgcgaatgtaacatggtgcagctgctatggaaaacagtgtggtggtgcctcaaaaattaaaagtagaattattacatgatccagcaattttgcttctagctacattcacccacaagaattgaaatcagggaatgaaagagctacttgtacacacatgttcatagcagcattattgacaatagccaaaaggtgggagmaacccaagtgtccatcagtggacgcatggatgatcaaaacgcggttctccccattcaatggaatatgattcagcggtaaaagggaaagaaatcctaacacacgctacaatgtgggtgaacccggaggacatggtactaagtgaaataagccaatcacagaaggacaactactgtgtgattccactcacatgaggctcctagagtagtt

SEQ ID NO: 713562 - DNA, 655 bp, Homo sapiens
gtctctagttcccattgaaaagcttcatcatgaactctccacacgatgatcttgcaacatgcctgctaatgaatcctctaaactacagcattgagaaaaatggcatagctctgaaaaatcagcagccatgtcctcaccaagctttgaattcaattggtggaatgtaactctcagaacaataactaatagtgctgctgtgatgtgaacttccagtaaccttacagattcatcaaatgccttatccttacctgaggcacggatgttgagagatcatgttataacatggtacacttctgattaaagccttccaagttttattatataaagtattatraaaattaaaatatagaagcaacactcatcctcacaacccaaaataattattatcccacctacaaacacccctggtattctgggtgcagtggtccttagcatatgaaggaatcacaggaagccaactgtcaagtaagccttatatatgacaagaggtagacattcttctcttggtgtatatttcattacagattagaaggaggccatgagattcatgaagtagtggggaagtggtagattggggattggaaagtttggattctgcctgcctatgttatgatttcaaaaaaatcaagtatttctctgtatttaaactggttat

SEQ ID NO: 713563 - DNA, 611 bp, Homo sapiens
ctgttagcagctccatcataaaattatctaacttaatctatgtatatatttctataagaaatagcttctgaattggatattttttctggaaccaaatttctgtttcaatatttctcttaagaaatgggagagaatcctctcaatgagaaagcrtaaaagaaaattccccaaggagggagtagtcaaaagctttataatgtcactataatgctaaatagagcttaaattgaataggaggagagatgtctccttgggacctgtatctggtaaaattgagggaagttgtgtgttatgatcagatccacctgtatttagtatatattgagaataaaactttggctaaaatataaatgagaacagagaccattttaatgctggtctattatttaaactagtttctaaatattacatattgatcttaaaacatgtaaaaatattttcaactgagatatatactttaggtgctcaaatatatttaaaatgtttaattaaccaatttccaaggagatgtccattacgaaaaattatataatcctgtactataaagtaaacctcagttaaacacttcagttacgttaagattatcatatttagcaaataaaaattcaaga

SEQ ID NO: 713564 - DNA, 611 bp, Homo sapiens
ctgttagcagctccatcataaaattatctaacttaatctatgtatatatttctataagaaatagcttctgaattggatattttttctggaaccaaatttctgtttcaatatttctcttaagaaatgggagagaatcctctcaatgagaaagcgtaaaagaaaattccccaaggagggagtagtcaaaagctttataatgtcactataatgctaaatagagcttaaattgaataggaggagagatgtctccttgggacctgtatctggtaaaattgagggaagttgtgtgttatgatcagatccacctgtatttagtatatattgagaataaaactttggctaaaatataaatgagaacagagaccattttaatgctggtctattatttaaactagtttctaaatattacatattgatcttaaaacatgtaaaaatattttcaactgagatatatactttaggtgctcaaatatatttaaaatgtttaattaaccaatttccaaggagatgtccattacgaaaaattatataatcctgtactataaagtaaacctcagttaaacacttcagttaygttaagattatcatatttagcaaataaaaattcaaga

SEQ ID NO: 713565 - DNA, 645 bp, Homo sapiens
aaagaagctcaagtagtttactttcaaccttacatcactccgtttatagtcccacaactgtttgggccttaatacctcacacctgggttaggacaataatttccacactggacattttgcatcttgacttttttttcaataatccatcttgcaaacaatttcctggaaaaatatrcttaaaacatttctgagcatttcaaaacagttcaaaaaccttcactagctccctactaacctgtgaattttttatcaatgtccccactgggaactagacctacaggtggccacctcaaacttttccaaaggtctattaactggcagccagcagtttttggtaaggataatttgttggatttacagagtgttttataaaatgttgaaagtagttactcctgtttaaaaatcagaagagatctcatttttaaaagcatgtgccctagctaccttgggacctatccccaggggacaacggttacattatagctgaggggaagctgcctccttgcttctgggatcatccctctagtttgccagaaattcttattgccttatacttcacctgtttccctcattttcttcacctgcctataagcattgtagttggtaacctctgttgtgtactacgatactacaaaaacttctacc

SEQ ID NO: 713566 - DNA, 645 bp, Homo sapiens
aaagaagctcaagtagtttactttcaaccttacatcactccgtttatagtcccacaactgtttgggccttaatacctcacacctgggttaggacaataatttccacactggacattttgcatcttgacttttttttcaataatccatcttgcaaacaatttcctggaaaaatatgcttaaaacatttctgagcatttcaaaacagttcaaaaaccttcactagctccctactaacctgtgaattttttatcaatgtccccactgggaactagacctacakgtggccacctcaaacttttccaaaggtctattaactggcagccagcagtttttggtaaggataatttgttggatttacagagtgttttataaaatgttgaaagtagttactcctgtttaaaaatcagaagagatctcatttttaaaagcatgtgccctagctaccttgggacctatccccaggggacaacggttacattatagctgaggggaagctgcctccttgcttctgggatcatccctctagtttgccagaaattcttattgccttatacttcacctgtttccctcattttcttcacctgcctataagcattgtagttggtaacctctgttgtgtactacgatactacaaaaacttctacc

SEQ ID NO: 713567 - DNA, 645 bp, Homo sapiens
aaagaagctcaagtagtttactttcaaccttacatcactccgtttatagtcccacaactgtttgggccttaatacctcacacctgggttaggacaataatttccacactggacattttgcatcttgacttttttttcaataatccatcttgcaaacaatttcctggaaaaatatgcttaaaacatttctgagcatttcaaaacagttcaaaaaccttcactagctccctactaacctgtgaattttttatcaatgtccccactgggaactagacctacaggtggccacctcaaacttttccaaaggtctattaactggcagccagcagtytttggtaaggataatttgttggatttacagagtgttttataaaatgttgaaagtagttactcctgtttaaaaatcagaagagatctcatttttaaaagcatgtgccctagctaccttgggacctatccccaggggacaacggttacattatagctgaggggaagctgcctccttgcttctgggatcatccctctagtttgccagaaattcttattgccttatacttcacctgtttccctcattttcttcacctgcctataagcattgtagttggtaacctctgttgtgtactacgatactacaaaaacttctacc

SEQ ID NO: 713568 - DNA, 645 bp, Homo sapiens
aaagaagctcaagtagtttactttcaaccttacatcactccgtttatagtcccacaactgtttgggccttaatacctcacacctgggttaggacaataatttccacactggacattttgcatcttgacttttttttcaataatccatcttgcaaacaatttcctggaaaaatatgcttaaaacatttctgagcatttcaaaacagttcaaaaaccttcactagctccctactaacctgtgaattttttatcaatgtccccactgggaactagacctacaggtggccacctcaaacttttccaaaggtctattaactggcagccagcagtttttggtaaggataatttgttggatttacasagtgttttataaaatgttgaaagtagttactcctgtttaaaaatcagaagagatctcatttttaaaagcatgtgccctagctaccttgggacctatccccaggggacaacggttacattatagctgaggggaagctgcctccttgcttctgggatcatccctctagtttgccagaaattcttattgccttatacttcacctgtttccctcattttcttcacctgcctataagcattgtagttggtaacctctgttgtgtactacgatactacaaaaacttctacc

SEQ ID NO: 713569 - DNA, 2114 bp, Homo sapiens
ccgcgcagaactgagggcggctctactggagcctggggcgctctgagagcctgggaggcggagaggggccgggttggggccggcggcggcggagattgacggggcggatgcccaaagagggagggaggaggaggacaggagagcggggggagcgggcgaagacgaaaaggggtggatcgaggtggggagagaagaggagagaagggaaggcggagaccgtttaagggggtgtccaggaggaaggggagggagaggggtggaaggagactccaggggaagaaagtttgggcagctttggctaggagagggctctgcagcctcgcccagaccctacagggttccccttctccccaggtcaccgcgtccctcccaggctctctgttcaccgggcacattctaccccggcgcaggccagtgggatgggagagtttggacgtgctcgggtgccgcccaaagacttggctttttctgctgacagcgccccacccccatcctagaaactctggactcagcggtcctcgagggaaaaggggagggagtagacgaaagaaatggggaagatttggcagtggcgcagcggacgccggagaatcgacttcccggagatcccgcctttcctccctctcctagccccgccggctgtgcgcctgtaccgccccaactctgcgctctctgctcctcgccgggcggggactcagacttaaccccacgggtcccacagcccgaggagcgccaggcagttccgtgtggcctctatggaagctgactccggccggcagctgcgacgcagaaccccggacggcgcagacccgcagtctgcccaccggggcgggggagaggggcgacggcagggactctaggacggtggtggggcttccccggtgggtggtcggggaggagaacggaggcaagattcccagtcctcccgcttcgccgctggggatcggctcggctcctggccactccagcctgggaaccggctcgctgagctccgggatgaggtgctttaaaagggggtcctgttttttgcttctttgtcagggtgccaatggaaacatgtggtgctggtcctgtgggagaagggctcgcacaaaggtgggagaactgaggatgggtgtgttcttgctctacgttttgaaaagcccggggcttagctccttcccggacatgtcctttccacttccttcagtttcctcctcttcccccctcagctgctgcaggccaggagctcctagggccatactcagtgcctgacccaagccagcacaaatcctgggctctgccctcagccagtctagggctatggaacccgagtctaggccagttccttctttcccacccttttatgctttctatggagtttgtgctaggagcgcggaatgggagtctagagccctgggttcaacttttggttttgcttggtgtctatggtaaggcatatatttatgcctttgtgtttatttccttctctgcaagatttcaaaaattttccctgtgctgcagcattccggaagtcctttgggagtgttgtaggcatgagagaatggaaccctgggactcctcttaagactttagcttccaggggcctaccctggcatgttgaatgaggccacagggctgacaaagtaggtcccaagccagtgcgggtgcagaaaggggaagctttctgcagaaatccaggtggcatctttagagtctgtatctgtgggctgggaggaggtctgctgtgtccaggccaccctatccagagtcctatgcactgctgcacaggggctgccccagagttggatctaaggaccctgggagacatggagaagaatttaccgcagactgtgatgaggttcaaagcccaatttgctgacctccaacaaaagtgcaacgtactcttttcagcacgtctccttcagctacrtggttaaaaggattcacctggctggctggtcccagccctggcaatggccatcttacatcttagcgtgcttaggctggggctgcagaggagcaccctggtctggtgtgggtgagtgagaccaggcagtcacttcctggtatgagaccctgggccagtccccagtctgctcttcattctcttccactattagattgaagcctgg

SEQ ID NO: 713570 - DNA, 2114 bp, Homo sapiens
ccgcgcagaactgagggcggctctactggagcctggggcgctctgagagcctgggaggcggagaggggccgggttggggccggcggcggcggagattgacggggcggatgcccaaagagggagggaggaggaggacaggagagcggggggagcgggcgaagacgaaaaggggtggatcgaggtggggagagaagaggagagaagggaaggcggagaccgtttaagggggtgtccaggaggaaggggagggagaggggtggaaggagactccaggggaagaaagtttgggcagctttggctaggagagggctctgcagcctcgcccagaccctacagggttccccttctccccaggtcaccgcgtccctcccaggctctctgttcaccgggcacattctaccccggcgcaggccagtgggatgggagagtttggacgtgctcgggtgccgcccaaagacttggctttttctgctgacagcgccccacccccatcctagaaactctggactcagcggtcctcgagggaaaaggggagggagtagacgaaagaaatggggaagatttggcagtggcgcagcggacgccggagaatcgacttcccggagatcccgcctttcctccctctcctagccccgccggctgtgcgcctgtaccgccccaactctgcgctctctgctcctcgccgggcggggactcagacttaaccccacgggtcccacagcccgaggagcgccaggcagttccgtgtggcctctatggaagctgactccggccggcagctgcgacgcagaaccccggacggcgcagacccgcagtctgcccaccggggcgggggagaggggcgacggcagggactctaggacggtggtggggcttccccggtgggtggtcggggaggagaacggaggcaagattcccagtcctcccgcttcgccgctggggatcggctcggctcctggccactccagcctgggaaccggctcgctgagctccgggatgaggtgctttaaaagggggtcctgttttttgcttctttgtcagggtgccaatggaaacatgtggtgctggtcctgtgggagaagggctcgcacaaaggtgggagaactgaggatgggtgtgttcttgctctacgttttgaaaagcccggggcttagctccttcccggacatgtcctttccacttccttcagtttcctcctcttcccccctcagctgctgcaggccaggagctcctagggccatactcagtgcctgacccaagccagcacaaatcctgggctctgccctcagccagtctagggctatggaacccgagtctaggccagttccttctttcccacccttttatgctttctatggagtttgtgctaggagcgcggaatgggagtctagagccctgggttcaacttttggttttgcttggtgtctatggtaaggcatatatttatgcctttgtgtttatttccttctctgcaagatttcaaaaattttccctgtgctgcagcattccggaagtcctttgggagtgttgtaggcatgagagaatggaaccctgggactcctcttaagactttagcttccaggggcctaccctggcatgttgaatgaggccacagggctgacaaagtaggtcccaagccagtgcgggtgcagaaaggggaagctttctgcagaaatccaggtggcatctttagagtctgtatctgtgggctgggaggaggtctgctgtgtccaggccaccctatccagagtcctatgcactgctgcacaggggctgccccagagttggatctaaggaccctgggagacatggagaagaatttaccgcagactgtgatgaggttcaaagcccaatttgctgacctccaacaaaagtgcaacgtactcttttcagcacgtctccttcagctacgtggttaaaagkattcacctggctggctggtcccagccctggcaatggccatcttacatcttagcgtgcttaggctggggctgcagaggagcaccctggtctggtgtgggtgagtgagaccaggcagtcacttcctggtatgagaccctgggccagtccccagtctgctcttcattctcttccactattagattgaagcctgg

SEQ ID NO: 713571 - DNA, 1284 bp, Homo sapiens
ttaaagaatccaggccgggcgcggtggctcgtgcctgtaattccagcactttgggaggtgggtggatcatgaggttaggagttcgagaccagcctggccaacatggtgaaacctcgtctctactaaaaatacaaaaattagctgggcgtggtggcaggcgcctgtaatcccagctacttgggaggctgagacaggataattgcttgaacccagaggtggacattgcagtgagccaagatcgtctcaaaaaaaaaaaaaaaaaaaaaaaaaaaaaaggaatccactgatattttaaaatttcaataactttagtttttatttacagaaattgtattaggttattttcaaagtatgtcttatctctttaatagtagattattttttcctcatattatactttgttctttattaaatggtaaacataattgttttatatttttatccaatattataatgtcaatgattttttccagatataatattactcacaataattcatggtaatttgtttccttatgagttattaattttgtactttgagctcaattcaaagtgtgacctgactgattggtctttgcttctgcccaggttgtttgggcctctttttatgtgaatactcagtgtggcggattctgaatcatgtacaagccctagtgggttcagggctgagtttataacttctctgggraaaaaaaacaccccttaattttttttttttaattagagtctgggttaagatctttaagcttccttttttcctctctatggtgaccctgcatttttcattttgtgcatcaaggaatctggctttctatcaggatctcacttctatcgtcacattccatatgagcccaacatttacctcctatcattttgatgtcatttaaattcacaactcttggttaataagataagtatatgtcgttagggcagccagagccttagcctacccactctagactcagttctccttcagggtctggtattttgaaatttccctagctttcctatttcctcagatctatatcttaaagtatgttagtagtatttcttcaaaacattacaattctctttagagaaaagttgttttattcttattaactatttggctatattgttgaaaacagatttgagaaatgtcttagaggtcatctagactaatgcagtatccagtgtttgaattctcctacttctagtaatatcactatttacgaaaaattgatgtgtgccagtttgctaactgctttcatgcattatttaacatatccttacaaaaaattcaat

SEQ ID NO: 713572 - DNA, 607 bp, Homo sapiens
tggaggagaatccatcttccttaaattgtccagcttcaaagggtgcctatatactttagcttgtggtcccctttctctctttcatgccagcagcatagcatctactcttctttctggtttctgattctgttcttgtatcttctctttttgaccatcttgccttccatgaggctcttgggattacagggggtccacctagataatccaggataatcttcctatgccaagatctttcactcaatcatatctgaaaagtctcttttgctatgtaaggctatacattaataggtttggggcactaggatatgaatatctttgtgttgcaggcaactgaaactgtgaaactataacactacacaaagagagtgtgtagactaataaaaagaaaagagaagatgatttggagaacattgacctttaatgagcaatagaagaaagagtctttaatataagatcatgaaaaaaagtgataagaaaagttggagggaactgtgatgtgggggtataaccaagaccaatggagaagagattttyaagaaggtgaaatagtcaagtgtgtggagtttttaaaagatgtcaaggaagaggaagggtgactattgtttga

SEQ ID NO: 713573 - DNA, 599 bp, Homo sapiens
aagagttgggcattccgtgagtttacaggggcagcagatatgcagaggcacaaggctgccccctccactccctggtcttccttctgtggtccaccagcttttgattaggtgctagacatataagccattcctcagggcctttaaaataatgaccatcccttttaacaggctaactgttgctttcatttaattcgtttaacaaatatttrttgatcatctcttaagtagaagaccttgtgctggtttctgtgggagatgcaaggatgagtaaggcgtaggttgtacatattagtgttattgtcaagtgaggaaattaagacaagaacacacatgaaaaaggaagttttcaacactggtgattcagaaaagagaccatatttgggacttgggtggaggatggaaagaggaaaaattgagttaaaaaacaaaggcttccatgaaataggtggcctttgaactaagtcttggaagacagatggtgtgggtgggggtattgagagtacatggagacatcttgggcaaagaaaacttgaacaagggctttcatggtgtctctaaaagatcattttatgcatcatggtggaattacctatactgtc

SEQ ID NO: 713574 - DNA, 599 bp, Homo sapiens
aagagttgggcattccgtgagtttacaggggcagcagatatgcagaggcacaaggctgccccctccactccctggtcttccttctgtggtccaccagcttttgattaggtgctagacatataagccattcctcagggcctttaaaataatgaccatcccttttaacaggctaactgttgctttcatttaattcgtttaacaaatatttgttgatcatctcttaagtagaagaccttgtgctggtttctgtgggagatgcaaggatgagtaaggygtaggttgtacatattagtgttattgtcaagtgaggaaattaagacaagaacacacatgaaaaaggaagttttcaacactggtgattcagaaaagagaccatatttgggacttgggtggaggatggaaagaggaaaaattgagttaaaaaacaaaggcttccatgaaataggtggcctttgaactaagtcttggaagacagatggtgtgggtgggggtattgagagtacatggagacatcttgggcaaagaaaacttgaacaagggctttcatggtgtctctaaaagatcattttatgcatcatggtggaattacctatactgtc

SEQ ID NO: 713575 - DNA, 590 bp, Homo sapiens
atttccttaattgtcttagtaatttttcttatggccgttattttctaaagtccgaaatctagccagagatcacacattatgtttagttgtcacatctcattagcctcattttgaatctataatagtcttccagctttttcaaagtcttttgtgacatgtagcatcttgaaaagtccaggctaggtcttgcggaatgtcccccagttccaattgtttcctcctataagatgcgagaatatcccatcaagacagagtggccttcccctgtggcaccacaggaagtacacggtgtcacactatccctttggtgggatgtrtggtcacatgaataaggctgtggccaccagatttctctgtgctataaggttctttcttccttttgtgattaaggagcctgtggggtgatcttttgagaccaggtgaatatcccattccccgtagtctttcgcagaatgatctttgcctgaattggttatttcattggtagttactgtgcctcaatatttgacaaaaacaaaaggcagttgtgctttggaagccagagaaatgacttcagagaggaaaaaagccatgtcttttttattttaaaa

SEQ ID NO: 713576 - DNA, 1112 bp, Homo sapiens
tgcaattagatattgagaatattgatgagccaataggagctgatgggttagaaaaataaggaggtgaagagaatccaggattttaaggtttaartgaagttagagactagatttggagcgagtaagagaagatacagaattctatttaaaagattcagaactgggaaaattagaactagcattagttttaactgaaatcatataatgcatgtgttcataccaagtagaacaaaaatggcctttttttctctcatatttaaactccacattatctactgtaatgttccacaaagagcacatgtttagtaaatattgcctttagtgtccaattatgtttgagcttgctgtagagtttagatttctaattgctaatcatgtttcatttttaaaataatctataatgttatttgcaagaatttcaatccatagcctcctagaaaaaaaatcaataccataggcagaaaaataatatttcaggtaatagagcatatcactgcatacaaatccattcttacttcaatcaaaaaagaatatgatgcctttattgagacaataaagaaagaccgaagaactacattttgtcttcatggaaaacttaaaggtttggcagcagagcctacagctttggtatattacaggaaaagaacaatccaacttgaagcaaagtaagtattttagtaactagcccaaaagatggtagttgttgcttgattataataactagccagtgtaactctagctggtggttcttagtcttattgaatttcaattttatttaaatgatgcatttttatgttaccttctcctagtaacttgaagttactgtattgtttacttacttcaattaaaaaatattacttttgtttgagaacgtttatagtacctcttagtatatatatatatatatatatatatatatatattttttttttttttttttttttttttttttgagacagggtttcactcttgttgcccaggctggagtgcaatggcgcaatcttggctcgctgcaacctctgcctcctggtctcaagcagttgtcttgcctcagcctcctgaatagctgggactacaggtgcatgccaccatgcccagctaatttttttttt

SEQ ID NO: 713577 - DNA, 1112 bp, Homo sapiens
tgcaattagatattgagaatattgatgagccaataggagctgatgggttagaaaaataaggaggtgaagagaatccaggattttaaggtttaagtgaagttagagactagatttggagcgagtaagagaagatacagaattctatttaaaagattcagaactgggaaaattagaactagcattagttttaactgaaatcatataatgcatgtgttcataccaagtagaacaaaaatggcctttttttctctcatatttaaactccacattatctactgtaatgttccacaaagagcacatrtttagtaaatattgcctttagtgtccaattatgtttgagcttgctgtagagtttagatttctaattgctaatcatgtttcatttttaaaataatctataatgttatttgcaagaatttcaatccatagcctcctagaaaaaaaatcaataccataggcagaaaaataatatttcaggtaatagagcatatcactgcatacaaatccattcttacttcaatcaaaaaagaatatgatgcctttattgagacaataaagaaagaccgaagaactacattttgtcttcatggaaaacttaaaggtttggcagcagagcctacagctttggtatattacaggaaaagaacaatccaacttgaagcaaagtaagtattttagtaactagcccaaaagatggtagttgttgcttgattataataactagccagtgtaactctagctggtggttcttagtcttattgaatttcaattttatttaaatgatgcatttttatgttaccttctcctagtaacttgaagttactgtattgtttacttacttcaattaaaaaatattacttttgtttgagaacgtttatagtacctcttagtatatatatatatatatatatatatatatatattttttttttttttttttttttttttttttgagacagggtttcactcttgttgcccaggctggagtgcaatggcgcaatcttggctcgctgcaacctctgcctcctggtctcaagcagttgtcttgcctcagcctcctgaatagctgggactacaggtgcatgccaccatgcccagctaatttttttttt

SEQ ID NO: 713578 - DNA, 1718 bp, Homo sapiens
tccctaggctgggagagactcggcggttgaaagcagggaggsgctacaggagagaaagggctgaacccccgcttccgcagatttcacctatttttcagtttgcctggagcaggccacgcaaattcccttcccttgaaggcccaaggagcgtctggtagattgctgattctctgcccatcaccgcttctggaagtgagtgaaggacacctttcgtgccccgcaccctttgccccccgcttaacatttgctctagtcacttccggcccgttcccacgctccggaaaccattattccgcttcatcctacctccagtcctcacctgagtccttttctccaaacaccgacttcagtgcttagagatagtaactagggaatctgggaggtggaactgcatcttgggacaagtagtccaaggtagaagaaagcagtggagaactacagttcccagaatgcacttccatttcctacctcttccccaagaggcccccctcgacctccttttaaaaattctcttagccacgttgattgtacgggaaaagcctttttaaaacatcttttacgttgcttaaacctacagtttcgaaagcattccgaaggctaaagtgagaaataagcccaggctagggagaggagaaacgaagttcacgtcctagtctggcaccgggttggattgtcgctgggacggcagtcaggcatttggtgtggtcgcctaaggggtgggtccttcggcgggactccgggaaaccccgtgggcctgcgcggcgttcttccttttcgatccgccatctgcggtgggtgtctgcacttcggctgctctcgggttagcaccctatggctgcttctcttgtgatccctgacctaacctgtctcttccttttcctcaacctcaggtggagccgccaccaaaatgcagattttcgtgaaaacccttacggggaagaccatcaccctcgaggtacgggccgggtggtcatgaggaagccaaggtccgaataaggtcctgaggtggattttaggaccggcgctgctttccatgtcttagaccatgattccgaatttgggttctaaaacttaagctttgaaatgagtaccttttgctgagcaacgacctagaggtgattttcggtggccaaaggctggacctgtctcctctcgaggggttccagctagttagttaaaacggaggagctgcggtggggaaggagacgctctgcccgccgggtgcgagcacgtgtggccctgcggcgccgcccgctctgggctggggagatgaaggtgctttccggtagccgacttgggaggttgcccactgggtgggtaataggtctctcgagtaggtctcagccctgtcgctggttcggttcagtggtaattgtcaaactaaatgagttctgctgtagttccttaatgtgtaaccaacatgctttcactttaacactcataggttgaaccctcggatacgatagaaaatgtaaaggccaagatccaggataaggaaggcaagtagtattttgtagttaagaaaacttaacctgcggagacttcggcctacctgtaggtgctagacatacctgctcttggtgatgggggaaggggtcagattgacaaagcgaaatacttgtggaataacacaatagacattggtgatcggggagcacagtacctagattggaatccttgaggtgtatttcacttgcgtgaatttggacacttattta

SEQ ID NO: 713579 - DNA, 1718 bp, Homo sapiens
tccctaggctgggagagactcggcggttgaaagcagggaggcgctacaggagagaaagggctgaacccccgcttccgcagatttcacctatttttcagtttgcctggagcaggccacgcaaattcccttcccttgaaggcccaaggagcgtctggtagattgctgattctctgcccatcaccgcttctggaagtgagtgaaggacacctttcgtgccccgcaccctttgccccccgcttaacatttgctctagtcacttccggcccgttcccacgctccggaaaccattattccgcttcatcctacctccagtcctcacctgagtccttttctccaaacaccgacttcagtgcttagagatagtaactagggaatctgggaggtggaactgcatcttgggacaagtagtccaaggtagaagaaagcagtggagaactacagttcccagaatgcacttccatttcctacctcttccccaagaggcccccctcgacctccttttaaaaattctcttagccacgttgattgtacgggaaaagcctttttaaaacatcttttacgttgcttaaacctacagtttcgaaagcattccgaaggctaaagtgagaaataagcccaggctagggagaggagaaacgaagttcacgtcctagtctggcaccgggttggattgtcgctgggacggcagtcaggcatttggtgtggtcgcctaaggggtgggtccttcggcgggactccgggaaaccccgtgggcctgcgcggcgttcttccttttcgatccgccatctgcggtgggtgtctgcacttcggctgctctcgggttagcaccctatggctgcttctcttgtgatccctgacctaacctgtctcttccttttcctcaacctcaggtggagccgccaccaaaatgcagattttcgtgaaaacccttacggggaagaccatcaccctcgaggtacgggcygggtggtcatgaggaagccaaggtccgaataaggtcctgaggtggattttaggaccggcgctgctttccatgtcttagaccatgattccgaatttgggttctaaaacttaagctttgaaatgagtaccttttgctgagcaacgacctagaggtgattttcggtggccaaaggctggacctgtctcctctcgaggggttccagctagttagttaaaacggaggagctgcggtggggaaggagacgctctgcccgccgggtgcgagcacgtgtggccctgcggcgccgcccgctctgggctggggagatgaaggtgctttccggtagccgacttgggaggttgcccactgggtgggtaataggtctctcgagtaggtctcagccctgtcgctggttcggttcagtggtaattgtcaaactaaatgagttctgctgtagttccttaatgtgtaaccaacatgctttcactttaacactcataggttgaaccctcggatacgatagaaaatgtaaaggccaagatccaggataaggaaggcaagtagtattttgtagttaagaaaacttaacctgcggagacttcggcctacctgtaggtgctagacatacctgctcttggtgatgggggaaggggtcagattgacaaagcgaaatacttgtggaataacacaatagacattggtgatcggggagcacagtacctagattggaatccttgaggtgtatttcacttgcgtgaatttggacacttattta

SEQ ID NO: 713580 - DNA, 603 bp, Homo sapiens
ccctggggtttttccacttactgacctggccagaccacagctaactggtttgtcttttcccaaaaagtcagaagagacagacaaacttttcattacttcatctaaaagattctcttgacttgaggactttatctgtttaaaaaaaaattcaaagcagattagtgaatatagtgccatgtttttactttcctgatttagcagactgtgcaatataaaattgtggtacctcttaatactccttaacttacmaaaaaaaaaaagctctgaagttcaattacagaaatttaacttgtggtgttcatctaaattaaggtcatcatagataaaactaacctgtactgaggtaagcttattgctttcttccaaaaactgttgtagagtaacaacttcacttccaggggaaccagttttgatcttgtgatgtcgactctccagtgtttcagatattttgtgctggagcactgggcttgatctggtctgtcttttcaagtactggattggactgctaccactgctggaccaagcctcatggtcatgaagcaggctaaattctccactgctgtggctttgtggcctgctttggttattaactgcacctgcttt

SEQ ID NO: 713581 - DNA, 584 bp, Homo sapiens
gaaacgttttgctgaagaatgcatttataaaagaattttagaaatgaycaaaaaattttaaaatacataatcttcgctctttttcaccattgaacactcagcactttgcacaatgcttggctatcgtagagactccataattacttgttgaagaataaacaatttaaaacttaaccattttttatttaagaaaattcaagtttcttcacacacacacttttcttcccaaagatactaagctactgcatgattactcttggaatcattgcttagtaaaatatttctcaaacattgtttgaataaagattacttggcatttggacaaacaggaccaaaagtcagactcccagatcctgcccctgagagtctggttttgtctcagataatgccagataaataataggcattccatctaggatcctctccaactccaagtctttgaaatctttgtcttactttaatttcaaaaggatatttccttgacttcctactaagttgtccatctttctaccatgtcactgctgataatgtagttgtggagaagatattagactgcataaaagccaggttccaccacataactg

SEQ ID NO: 713582 - DNA, 1093 bp, Homo sapiens
agggtggtagacgtggagagggaggtaagtcagggagcccaaagatatatagagtcaatagggcttactgatgcagggagagaggaatcagataagtcttctaaaactggattgtgatgaaattgcacaaataaagttcctttgggaaattcattgaactacatacttaaaataggtgaattcatggtatgtatattatactcaataagctgtttttaaaaatgagtcctagatttttggctaataataactttatttaaaagagatgagaatgtgaatgatggaataaaactaatttttatgattttcacaaatgattgcatttgtaaaatttcagatcactaggcctttagttctttaagtctccaacctgcatttcatttatcaaagcaaacaaaaataagtaaataaataaataaacatcccacatatctgccatcatattatcatttatttagaactctgtaattttacctacttttattaaactcatcttaaaatctaggagagaagagttatagaaaagcccatgaaggtaaatctgtttcatcttgtagaaagtccttgatcttcatcttgtaaatcagttttattttgtagagaggaagttcctatccacagaaaacacatgtccatgatcttcttgggatttgaacattcagtttgagaaccactgggcatcacaaatgaaaatccaaaaatttaactatttcattcatctttgtatgatactaatcatacagtttgattagcacttcagatatttctttttttgagacagagtctcgctctgtcaccccaggctggagtgcagtggcacaatctcggctcactgcaagctccgcctcccaggttcacgccattctcctgcctcagcctcccaagtagctgggactacaggtgcccgccaccacgcccggctaattttttgtatttttagtagagacagagtttcaccgtgttagccaggatagtctcratctcctgaacttgtgatcagcctgccttggcctcccaaagtgctgggattacaggcgtgagccaccgcacccagcccagaaatttctattgttgttgcaagtcatatgttata

SEQ ID NO: 713583 - DNA, 1093 bp, Homo sapiens
agggtggtagacgtggagagggaggtaagtcagggagcccaaagatatatagagtcaatagggcttactgatgcagggagagaggaatcagataagtcttctaaaactggattgtgatgaaattgcacaaataaagttcctttgggaaattcattgaactacatacttaaaataggtgaattcatggtatgtatattatactcaataagctgtttttaaaaatgagtcctagatttttggctaataataactttatttaaaagagatgagaatgtgaatgatggaataaaactaatttttatgattttcacaaatgattgcatttgtaaaatttcagatcactaggcctttagttctttaagtctccaacctgcatttcatttatcaaagcaaacaaaaataagtaaataaataaataaacatcccacatatctgccatcatattatcatttatttagaactctgtaattttacctacttttattaaactcatcttaaaatctaggagagaagagttatagaaaagcccatgaaggtaaatctgtttcatcttgtagaaagtccttgatcttcatcttgtaaatcagttttattttgtagagaggaagttcctatccacagaaaacacatgtccatgatcttcttgggatttgaacattcagtttgagaaccactgggcatcacaaatgaaaatccaaaaatttaactatttcattcatctttgtatgatactaatcatacagtttgattagcacttcagatatttctttttttgagacagagtctcgctctgtcaccccaggctggagtgcagtggcacaatctcggctcactgcaagctccgcctcccaggttcacgccattctcctgcctcagcctcccaagtagctgggactacaggtgcccgccaccacgcccggctaattttttgtatttttagtagagacagagtttcaccgtgttagccaggatagtctcgatctcctgaacttgtgatcagcctgcctyggcctcccaaagtgctgggattacaggcgtgagccaccgcacccagcccagaaatttctattgttgttgcaagtcatatgttata

SEQ ID NO: 713584 - DNA, 1194 bp, Homo sapiens
gggaaagaagtagaatgcatctcaaggttaatgtgctttcttatagctttttcagcatcataactttctaattattgtcctgccttcaggtgtccttgcttttgcaggaatagtggtgaaaaggggaaacaaagatgaaacgtgaacttaacctactytatttgtggagacacaactcaaactgattatagagttttcagaaagatatgtgaagctgtgttttatcttcttaaaaagggtgtaagctagaaaataatgtgtgcaataaattgtccaaaaggtcacctcttttggggggtaggaggggcagtgaacatctgtatgatttttaaattattattcagaagctttatctggtttcaattaactacattgttgaaattccctaccccatccccagcccccattaaacacctgggtcagtgaatattggtggtgtgatccctgccaaagtgttgaaatttcagtgtctctgggctactctaagacaccgcagtgcctgcatgcctgaagttagcatgacatgctccatttaagatgcatttgacaaatatgtttgtgtaagccagaatgttacaatccttaatcattttgccaaaaataagttagctattatgttttataacatatgaagtgtgataataagaaacttgtgtttccatctcttctgttattttttactggaatatttgactcttgtaagattttgaggacatatgtgtagtttagtagctagctggtttatttagttttattttggttcagctctttgtaatattttcataactaattataggcaacttggtcttaaatcattttaagagacttattgtatatgtcagatatactgtctgacctgtattttaatatactaaaaaaaagttgcccctttaaaaaaatctggcatttaaagttgtttatctaaacaaattccatacatagaattagagatattcttcatatattttgaaattagtgctcagtatagggaatttaaagagaaacttgagcaaataggtaattgaaagactgttaaatagtagctatcatgacttacaataataaacataattgtttttagattcatagaatcttagaactgagataggctttagagacaatctggccccatctttcattttatcagtgggaagtgagagaaaggtcccttgccagtattcagccttggctctg

SEQ ID NO: 713585 - DNA, 668 bp, Homo sapiens
gtcagacacaaacaagtatacattatacaattccagttatttaaagtccaaaaccaggtacatctagatgttagtagtagttacatttgggaaaatggagtaagtgagatgggcagaagcataagggggtcttctgagactcgggcaatggtgattcttgagtgggtggcagttaatagaagtttgttttgtgataattcatgaagggacacatttatgttttaagtacttttttgtcattcttaaattaaaaaaaaacttaaaaattcaaataatttgtaaggagtcctattttctgaaagtaaattttttcatcagggaatgtaytccatcccacctttattcctacccttatttatttcttggtaatttcctatctaagcatatattttttttaatagaacaccagcttcttttccagtaattgctccaaggaagccatctttgtcattcctcagaaatgctcataatacaacatagtggtcagaaataataataccaaatagaagtgtaatttcctaagtggaaaacacatttctcttggcaatgactgtcaacagcattcctggaaatccagcagaactcagaatttcaagcactacagtgaaggaaatgtctagtagcagtagtaatggaaacaaaaacatgaaggaaagagaatgatttgg

SEQ ID NO: 713586 - DNA, 632 bp, Homo sapiens
tttctctattaaaagaaatctccttttaacatttagttttttattttatttttwttttttgagatggagtcacgctctgtcacccaggctggagtacagtcgcgcaatctcggctcactgcaagccccgcctcctgggttcacgccattctcctgcctcagcctcctgagtagctgggactacaggcgcctgccaccatgcccggctaatttttttgtatttttagtagagacgggatttcaccgtgttagccaggatggtcttgatctcctgacctcgtgatccacccgcctcagcctcccaaagtgctgggattacaggtgtgaggcatcacgcctggcctaacatttagcttttaatccagacctttagttaccaataattaatgatattacagtgaaaattctagctttctcttcagcagtaaaccctggagacctacgattaaagctatcgcttgttaatatttcactttcttacagacccagcattaaagctgaacagagtactaaccactatatgatcatggtgagccactggagacaaaggagcatttcaaacaatcagacctgaatcaaacctcttatctttaataagtcttacctttgttaaaacgaaagagatttacaaaa

SEQ ID NO: 713587 - DNA, 632 bp, Homo sapiens
tttctctattaaaagaaatctccttttaacatttagttttttattttatttttattttttgagatggagtcacgctctgtcacccaggctggagtacagtcgcgcaatctcggctcactgcaagccccgcctcctgggttcacgccattctcctgcctcagcctcctgagtagctgggactacaggcgccygccaccatgcccggctaatttttttgtatttttagtagagacgggatttcaccgtgttagccaggatggtcttgatctcctgacctcgtgatccacccgcctcagcctcccaaagtgctgggattacaggtgtgaggcatcacgcctggcctaacatttagcttttaatccagacctttagttaccaataattaatgatattacagtgaaaattctagctttctcttcagcagtaaaccctggagacctacgattaaagctatcgcttgttaatatttcactttcttacagacccagcattaaagctgaacagagtactaaccactatatgatcatggtgagccactggagacaaaggagcatttcaaacaatcagacctgaatcaaacctcttatctttaataagtcttacctttgttaaaacgaaagagatttacaaaa

SEQ ID NO: 713588 - DNA, 601 bp, Homo sapiens
aaagaggaaggagaaaaggaagaagaaggggaaggaaggtttctaatatcttccactgagaataatcatcaacaatccttctgaagtgtcatgacaattcagcaaaaagtgttgggaagtaagctgataactgaataagtatacactcaaaaaaaagtttgtgttttttttatattaaaaaaaaaaagaggccaggcactgtggcctcatgtctgtaatcccagcactttaggaggctgagacgggaggatcgcttgaggccaggagttccagaccagcctagtcaacatagcgagacttcatctctattttatttagggaaaaaaaaaaaaaaaaaaaaaagagctctggagagaaacgataatgtgatggccgtaacaaccacccctggaaaacagcctacattctactttgacacaagtaatgtcagaggcagagatgrcattctgcctaaagagtcttagaattacttctaaaggttatctacacaaaaattatactcggctttggaaataagaagataaaaattcccatgaaaacacttagcaagtgtagtctctgaaatataaacccaatcatatagttaaccctaataattaca

SEQ ID NO: 713589 - DNA, 1111 bp, Homo sapiens
tccctctgttgcccaggctggagtgcagtggcgtgatctcggctcactgtagcctctgcttccccagttcaggcgattctcctgcctcaatctcccaagtatttggaattacaggcacgcaccaccacgcccagctaattttttttgcatttttagtagagacggagtttcaccatgttggccatgctggtcttgaacccctggcctcaagggatcagcctgctttggcctcccaaagcactgggattacaggcatgagccaccttgcccagcccaaataacacctaatagaattttaaatctgaaagagacttcttttgtatatcaatagagtttaaggtatcttttaaaactgggtctgacatgcttatctccaaatagccaagatgcagagaaaatcagaggtttcactttgaaaggccagattagaaaacattgagtctcaaatataagacatgaatatgaaccccattcatcctttgaagatatttaaaatctgttctctccccagagtgttgtcatatggcgctatataggtcagataacacccaagaaaacccacaaaaactttatctatagaaaagctgaattttatgtgaagttgaatcaggcaattttgaaatcatctcagagaagtggcaacacagtttatgtttacaggcaaaattaaatataaaatgacccttcatccaattatcccagatctgggcactgtagaattcaagattttattctgataagttaggaagaaagtgraatattttgcaaggtggtcacatgatataactaattgaatgaatgagtcaaaattctgcttcagtctagcggtaagctttgagaatgtgtcctgatgtctctggatcacattttacttatctctaatatgggatgattgaaccagaaaatgccttaagtcctatcatctctaaaattctgaatctaggtcatacagttacacatctcagaatatgatcatgatagcattaattagtacctctttactgatgcaacttccctcccatgtaaatcaagtaacaggtattgcaagttttctttgagatttgcaatctcactgtgtgtatatagcaataatgatgtcaattagataaca

SEQ ID NO: 713590 - DNA, 983 bp, Homo sapiens
gtttcactgtgttagccaggatggtctcgatcgcctgacctcatgatccacccgcctcagcctcccaaagtgctgggattacaggtgtgagccaccgcgcccagccgtaagcttgttttaacatgtgaagttgatggacactaactttcccaaggattccggaacttgaaaacygtttaggtatctggtccttcttcactgccacctgagaaggcttgtggaggctgcactgcggagaagcagcttcacactcctggcagctgggggctccgttcctgctcccaggccgcagcaccttcaccaacctgggtgggaggccgaatcctcagcttagccaggtttctgtgcttctcagacacgaccagaggccccattccgacttgagctacgtgtgtggcaatgaatcatcctgacagtactgtcagtgtgactgaacacgtctagcttggtggcacacaactgaacaagtagaaatgaacagcaagctgcggtgtgtcaggacaagctctagcacttgaattagacaaaggctggggcggaagggtgttggaggaagtctcttttttcattcatatctactcaaatagagaagaacagccttaaacccaagggcccaaattagttttaaaacttgtactacatcctttctaaaaagtcctcaaagcgggcctcgtgtagcaacttacaaaaggaaatcaggaagtctgcactgacaatatgcattttaaaaagcagcatcaccaaggagcaggtaactcaccaactgcagctggcaagcaggatcgtcccaaacctgagaacaaaaaatctacaaaaccgctaacagcacaggtaaattaacttagatttgttgaccatataaaaacaagagaacatcccaagtcagctacatttcaaaaaagataagacaaaggatgtactactccacacgggcagttcaggttgttacctgcacaggtaataaactgatcaccaagaggtaa

SEQ ID NO: 713591 - DNA, 646 bp, Homo sapiens
taaatctttgaactaaatgtccttctctgcttcaaaaacatctcaggttctgcttaatgatttccaatgattagtcaatgtatcttttcagattttcatcagcagaaaagaaatgcctgattgaagatattttaggttgggttttttctttaaccctaaaaatctgaaagatacttatatacctaaataccaactatacactttcattgagtagtgagaatacaagtgatctttaatttttcctttttgtgaggtatttggcaaattacaacagatgtacattatgcaataaaaaagacaaatggtaagtgttcatgcaagggcaatttttaatttaacttgcaaattaaaacattcattggcaataaactgggtttctatgatttctgaattgttaagggtttagcgagtggatacagaaaaggcagaagttgggatgagctggttatgctgcartgcaattagtgatagtgataggtccctgttatttcaaaaagtttgtgtcaatcaacaaatatttcatgcctattatgtaccaggtactattggagacacttaggctgcctataatcccagcactttgcgaggccaaggtagtagaattgcttgaaggcaggagtttgagaccagcctgagggatacagca

SEQ ID NO: 713592 - DNA, 3065 bp, Homo sapiens
ccctggccctgcacctcacatcacgatgttcgcacgtcagcacagtgggcggttggagtactcctgcagccagcgataatcgccacatgccgcgtgactccaaaccacaccaacacataccactattcccacctaacccagcccaacacaaactccctcagctagaggccgaaaatgcccatggccactccagctgcacccagcataagaggaagcaggacaatgggaaagtctagtgaaaagaggtagtgatcttaactgacgtggttgtgatagctttctttcgcaaatctcataaagccatgtggccgcaatgcaagtgagaggccctgaggtttaagctctgctcggaacactctccctgcctgtactacagtcatccctcggtatccctagagaaatggttccatgacccccaccaaataccaaaatctgcagatgctcaagtcctttacttaaaatggcacagcatttacatgtaacatcctcccgtacactttaaatcatctctagattacttataatacataatacaatgtaaaggctacgcaaacagttgttacattgcatgttttaatttgtattgtttttatcattgcattgttatttttcattgggtttttttcccgaatattttcattccgcaacgtttcattctacattgcttgaatctgcagatgtagagcccacagtaggctaagtatcctagcaaacagctcaagcagggacttttgtagctccggggatcaaggctgtgttgtcacactgaactcaacaccagtgatgttatccacattaagtaggtgacgtaaattttgggcaaggatagtgcaagctttaccttgccgcacgggagaactggatctgatgtctatcacttgcgaaaggattaagttgtatgacagctcagctcccctttcactctctttcacttcgcgattgactgacaatcacaaggctaaatgcttgtgttgtttggaaaatctgtacaaaggctcctctctcctcccctgggcttttgtcagaaagaaagctcgaagtataacaatggaaacgatgcaagcagagatctctcacatccccgccggagttgaaattatttacctagaatcagcaatccagatcttatgctgattagaccttcctaggaagctattcagaagccacctcaacacagacttgctccgtgaacccctgtgtacgggaggaccggcacagaaacagcgggagcagggacactgctacggccaatgccaaaggaaggtggtctgtgcctagcagggcttacctcgtcatacatgaactgaagcgtcagggctgacttgccaacgcctccgctgccaaccatgatcaccttgtggagggccaaggagctctggcccttactcttgttggcagccatctcgctggtcttctgaggctgtgacacacagatgacccactgaagagctgctgatgacaaagacaaagacttagaggcgatttgctttcaacctagctaaaaccaaatgtcattcacatcctccattaaagcctaactaacccagacattccaacaggaaagtaatcctttcaggctcagggcagacatgcgagccctccaacaactctggaagtcacttaccccagcacagctgggtcgaagccaaggctagaggggagaaacaggagcgcacaccccacgcccgcctcactgggcagggtggagaggacacccagtcaccaaaaatcatcagaccctcagcagggcctcactgaggcagagaccaaaccgctcgtagctccagtttcctacctctctgctcggttctcggctgccgcggagaacagcttgggacctcaatccccagctctttagctttactcctcgctttgccctcttaccctctaccccacaacacgcacacactcacaacacgctcacacacgctctcacattcacactcacaaacggtcactaacacactcacacatgcccacattcacacacatgctcacactcacacacgctcacattcacacacactcacgctctcacattcacattcacacatgctcacacactcgcacacacattcacacatgctcttmttcacacacattcactcacattcacacattcacactcgctcacacacgctcacattaactcacattcacacacacgctcacactcattttcacactcatgttctcacattcacacatgctcatgttctcacattcaaacacacatattcacacacttgctctcacacgctctcacacactatcacaggctcacacatgctagcacacgctgtcatacatgctcacattcacacacaagctcacacactatcacacacgcactatcacacacacccacatacacactttcactcataacacgttcacaacgctctcacaacactttcaaatttgtgctcatgtacactcacaagctcacatgctctcacaacacacactccatacactatcacacacttgtcctctcataggtgcactcacgctttcacacacacacacaactacacactcacatacgctctaacgttcacatgctcataccacacatacatgttcatgctcacaccacatacatgctctaacacatgctcatatcacaggctcagaggctctaacatgcacatgcgtgttcacatgctctcacacatacatgttcacgccaccacacacatgctctcacacacatgttcacatgctcacaccacacacaatctcacatgctgtaacacgttcacagaacacacacgctctcgcacatgctcccatgcactcttatgctctcatacactttctcacacacacatatgctctcacactcttacacagccccacacatccctctggttgattaaagaagtgagttcaagaacaaataccccttcatgacatgagagttaaaaggagaaatctcaaaatcaatttgccctaatcagaaggaagataaaatgagtagagcaactccagtattatgggacaacaaagcatcccaagtaagtatatttaacagggacctggaatctaccgtaacccaagtg

SEQ ID NO: 713593 - DNA, 3065 bp, Homo sapiens
ccctggccctgcacctcacatcacgatgttcgcacgtcagcacagtgggcggttggagtactcctgcagccagcgataatcgccacatgccgcgtgactccaaaccacaccaacacataccactattcccacctaacccagcccaacacaaactccctcagctagaggccgaaaatgcccatggccactccagctgcacccagcataagaggaagcaggacaatgggaaagtctagtgaaaagaggtagtgatcttaactgacgtggttgtgatagctttctttcgcaaatctcataaagccatgtggccgcaatgcaagtgagaggccctgaggtttaagctctgctcggaacactctccctgcctgtactacagtcatccctcggtatccctagagaaatggttccatgacccccaccaaataccaaaatctgcagatgctcaagtcctttacttaaaatggcacagcatttacatgtaacatcctcccgtacactttaaatcatctctagattacttataatacataatacaatgtaaaggctacgcaaacagttgttacattgcatgttttaatttgtattgtttttatcattgcattgttatttttcattgggtttttttcccgaatattttcattccgcaacgtttcattctacattgcttgaatctgcagatgtagagcccacagtaggctaagtatcctagcaaacagctcaagcagggacttttgtagctccggggatcaaggctgtgttgtcacactgaactcaacaccagtgatgttatccacattaagtaggtgacgtaaattttgggcaaggatagtgcaagctttaccttgccgcacgggagaactggatctgatgtctatcacttgcgaaaggattaagttgtatgacagctcagctcccctttcactctctttcacttcgcgattgactgacaatcacaaggctaaatgcttgtgttgtttggaaaatctgtacaaaggctcctctctcctcccctgggcttttgtcagaaagaaagctcgaagtataacaatggaaacgatgcaagcagagatctctcacatccccgccggagttgaaattatttacctagaatcagcaatccagatcttatgctgattagaccttcctaggaagctattcagaagccacctcaacacagacttgctccgtgaacccctgtgtacgggaggaccggcacagaaacagcgggagcagggacactgctacggccaatgccaaaggaaggtggtctgtgcctagcagggcttacctcgtcatacatgaactgaagcgtcagggctgacttgccaacgcctccgctgccaaccatgatcaccttgtggagggccaaggagctctggcccttactcttgttggcagccatctcgctggtcttctgaggctgtgacacacagatgacccactgaagagctgctgatgacaaagacaaagacttagaggcgatttgctttcaacctagctaaaaccaaatgtcattcacatcctccattaaagcctaactaacccagacattccaacaggaaagtaatcctttcaggctcagggcagacatgcgagccctccaacaactctggaagtcacttaccccagcacagctgggtcgaagccaaggctagaggggagaaacaggagcgcacaccccacgcccgcctcactgggcagggtggagaggacacccagtcaccaaaaatcatcagaccctcagcagggcctcactgaggcagagaccaaaccgctcgtagctccagtttcctacctctctgctcggttctcggctgccgcggagaacagcttgggacctcaatccccagctctttagctttactcctcgctttgccctcttaccctctaccccacaacacgcacacactcacaacacgctcacacacgctctcacattcacactcacaaacggtcactaacacactcacacatgcccacattcacacacatgctcacactcacacacgctcacattcacacacactcacgctctcacattcacattcacacatgctcacacactcgcacacacattcacacatgctcttattcacacacattcactcacattcacacattcacactcgctcacacacgctcacattaactcacattcacacacacgctcacactcattttcacactcatgttctcacattcacacatgctcatgttctcacattcaaacacacatattcacacacttgctctcacacgctctcacacactatcacaggctcacacatgctagcacacgctgtcatacatgctcacattcacacacaagctcacacactatcacacacgcactatcacacacacccacatacacactttcactcataacacgttcacaacgctctcacaacactttcaaatttgtgctcatgtacactcacaagctcacatgctctcacaacacacactccatacactatcacacacttgtcctctcataggtgcactcacgctttcacacacacacacaactacacactcacatacgctctaacgttcacatgctcataccacacatacatgttcatgctcacaccacatacatgctctaacacatgctcatatcacaggctcasaggctctaacatgcacatgcgtgttcacatgctctcacacatacatgttcacgccaccacacacatgctctcacacacatgttcacatgctcacaccacacacaatctcacatgctgtaacacgttcacagaacacacacgctctcgcacatgctcccatgcactcttatgctctcatacactttctcacacacacatatgctctcacactcttacacagccccacacatccctctggttgattaaagaagtgagttcaagaacaaataccccttcatgacatgagagttaaaaggagaaatctcaaaatcaatttgccctaatcagaaggaagataaaatgagtagagcaactccagtattatgggacaacaaagcatcccaagtaagtatatttaacagggacctggaatctaccgtaacccaagtg

SEQ ID NO: 713594 - DNA, 3065 bp, Homo sapiens
ccctggccctgcacctcacatcacgatgttcgcacgtcagcacagtgggcggttggagtactcctgcagccagcgataatcgccacatgccgcgtgactccaaaccacaccaacacataccactattcccacctaacccagcccaacacaaactccctcagctagaggccgaaaatgcccatggccactccagctgcacccagcataagaggaagcaggacaatgggaaagtctagtgaaaagaggtagtgatcttaactgacgtggttgtgatagctttctttcgcaaatctcataaagccatgtggccgcaatgcaagtgagaggccctgaggtttaagctctgctcggaacactctccctgcctgtactacagtcatccctcggtatccctagagaaatggttccatgacccccaccaaataccaaaatctgcagatgctcaagtcctttacttaaaatggcacagcatttacatgtaacatcctcccgtacactttaaatcatctctagattacttataatacataatacaatgtaaaggctacgcaaacagttgttacattgcatgttttaatttgtattgtttttatcattgcattgttatttttcattgggtttttttcccgaatattttcattccgcaacgtttcattctacattgcttgaatctgcagatgtagagcccacagtaggctaagtatcctagcaaacagctcaagcagggacttttgtagctccggggatcaaggctgtgttgtcacactgaactcaacaccagtgatgttatccacattaagtaggtgacgtaaattttgggcaaggatagtgcaagctttaccttgccgcacgggagaactggatctgatgtctatcacttgcgaaaggattaagttgtatgacagctcagctcccctttcactctctttcacttcgcgattgactgacaatcacaaggctaaatgcttgtgttgtttggaaaatctgtacaaaggctcctctctcctcccctgggcttttgtcagaaagaaagctcgaagtataacaatggaaacgatgcaagcagagatctctcacatccccgccggagttgaaattatttacctagaatcagcaatccagatcttatgctgattagaccttcctaggaagctattcagaagccacctcaacacagacttgctccgtgaacccctgtgtacgggaggaccggcacagaaacagcgggagcagggacactgctacggccaatgccaaaggaaggtggtctgtgcctagcagggcttacctcgtcatacatgaactgaagcgtcagggctgacttgccaacgcctccgctgccaaccatgatcaccttgtggagggccaaggagctctggcccttactcttgttggcagccatctcgctggtcttctgaggctgtgacacacagatgacccactgaagagctgctgatgacaaagacaaagacttagaggcgatttgctttcaacctagctaaaaccaaatgtcattcacatcctccattaaagcctaactaacccagacattccaacaggaaagtaatcctttcaggctcagggcagacatgcgagccctccaacaactctggaagtcacttaccccagcacagctgggtcgaagccaaggctagaggggagaaacaggagcgcacaccccacgcccgcctcactgggcagggtggagaggacacccagtcaccaaaaatcatcagaccctcagcagggcctcactgaggcagagaccaaaccgctcgtagctccagtttcctacctctctgctcggttctcggctgccgcggagaacagcttgggacctcaatccccagctctttagctttactcctcgctttgccctcttaccctctaccccacaacacgcacacactcacaacacgctcacacacgctctcacattcacactcacaaacggtcactaacacactcacacatgcccacattcacacacatgctcacactcacacacgctcacattcacacacactcacgctctcacattcacattcacacatgctcacacactcgcacacacattcacacatgctcttattcacacacattcactcacattcacacattcacactcgctcacacacgctcacattaactcacattcacacacacgctcacactcattttcacactcatgttctcacattcacacatgctcatgttctcacattcaaacacacatattcacacacttgctctcacacgctctcacacactatcacaggctcacacatgctagcacacgctgtcatacatgctcacattcacacacaagctcacacactatcacacacgcactatcacacacacccacatacacactttcactcataacacgttcacaacgctctcacaacactttcaaatttgtgctcatgtacactcacaagctcacatgctctcacaacacacactccatacactatcacacacttgtcctctcataggtgcactcacgctttcacacacacacacaactacacactcacatacgctctaacgttcacatgctcataccacacatacatgttcatgctcacaccacatacatgctctaacacatgctcatatcacaggctcagaggctctaacatgcacatgcgtgttcacatgctctcacacatacatgttcacgccaccacacacatgctcwcacacacatgttcacatgctcacaccacacacaatctcacatgctgtaacacgttcacagaacacacacgctctcgcacatgctcccatgcactcttatgctctcatacactttctcacacacacatatgctctcacactcttacacagccccacacatccctctggttgattaaagaagtgagttcaagaacaaataccccttcatgacatgagagttaaaaggagaaatctcaaaatcaatttgccctaatcagaaggaagataaaatgagtagagcaactccagtattatgggacaacaaagcatcccaagtaagtatatttaacagggacctggaatctaccgtaacccaagtg

SEQ ID NO: 713595 - DNA, 3065 bp, Homo sapiens
ccctggccctgcacctcacatcacgatgttcgcacgtcagcacagtgggcggttggagtactcctgcagccagcgataatcgccacatgccgcgtgactccaaaccacaccaacacataccactattcccacctaacccagcccaacacaaactccctcagctagaggccgaaaatgcccatggccactccagctgcacccagcataagaggaagcaggacaatgggaaagtctagtgaaaagaggtagtgatcttaactgacgtggttgtgatagctttctttcgcaaatctcataaagccatgtggccgcaatgcaagtgagaggccctgaggtttaagctctgctcggaacactctccctgcctgtactacagtcatccctcggtatccctagagaaatggttccatgacccccaccaaataccaaaatctgcagatgctcaagtcctttacttaaaatggcacagcatttacatgtaacatcctcccgtacactttaaatcatctctagattacttataatacataatacaatgtaaaggctacgcaaacagttgttacattgcatgttttaatttgtattgtttttatcattgcattgttatttttcattgggtttttttcccgaatattttcattccgcaacgtttcattctacattgcttgaatctgcagatgtagagcccacagtaggctaagtatcctagcaaacagctcaagcagggacttttgtagctccggggatcaaggctgtgttgtcacactgaactcaacaccagtgatgttatccacattaagtaggtgacgtaaattttgggcaaggatagtgcaagctttaccttgccgcacgggagaactggatctgatgtctatcacttgcgaaaggattaagttgtatgacagctcagctcccctttcactctctttcacttcgcgattgactgacaatcacaaggctaaatgcttgtgttgtttggaaaatctgtacaaaggctcctctctcctcccctgggcttttgtcagaaagaaagctcgaagtataacaatggaaacgatgcaagcagagatctctcacatccccgccggagttgaaattatttacctagaatcagcaatccagatcttatgctgattagaccttcctaggaagctattcagaagccacctcaacacagacttgctccgtgaacccctgtgtacgggaggaccggcacagaaacagcgggagcagggacactgctacggccaatgccaaaggaaggtggtctgtgcctagcagggcttacctcgtcatacatgaactgaagcgtcagggctgacttgccaacgcctccgctgccaaccatgatcaccttgtggagggccaaggagctctggcccttactcttgttggcagccatctcgctggtcttctgaggctgtgacacacagatgacccactgaagagctgctgatgacaaagacaaagacttagaggcgatttgctttcaacctagctaaaaccaaatgtcattcacatcctccattaaagcctaactaacccagacattccaacaggaaagtaatcctttcaggctcagggcagacatgcgagccctccaacaactctggaagtcacttaccccagcacagctgggtcgaagccaaggctagaggggagaaacaggagcgcacaccccacgcccgcctcactgggcagggtggagaggacacccagtcaccaaaaatcatcagaccctcagcagggcctcactgaggcagagaccaaaccgctcgtagctccagtttcctacctctctgctcggttctcggctgccgcggagaacagcttgggacctcaatccccagctctttagctttactcctcgctttgccctcttaccctctaccccacaacacgcacacactcacaacacgctcacacacgctctcacattcacactcacaaacggtcactaacacactcacacatgcccacattcacacacatgctcacactcacacacgctcacattcacacacactcacgctctcacattcacattcacacatgctcacacactcgcacacacattcacacatgctcttattcacacacattcactcacattcacacattcacactcgctcacacacgctcacattaactcacattcacacacacgctcacactcattttcacactcatgttctcacattcacacatgctcatgttctcacattcaaacacacatattcacacacttgctctcacacgctctcacacactatcacaggctcacacatgctagcacacgctgtcatacatgctcacattcacacacaagctcacacactatcacacacgcactatcacacacacccacatacacactttcactcataacacgttcacaacgctctcacaacactttcaaatttgtgctcatgtacactcacaagctcacatgctctcacaacacacactccatacactatcacacacttgtcctctcataggtgcactcacgctttcacacacacacacaactacacactcacatacgctctaacgttcacatgctcataccacacatacatgttcatgctcacaccacatacatgctctaacacatgctcatatcacaggctcagaggctctaacatgcacatgcgtgttcacatgctctcacacatacatgttcacgccaccacacacatgctctcacacacatgttcacatgctcacaccacacacaatctcacatgctgtaacacgttcacagaacacacacgctctcgcacatgctcccatgcactcttatgctctcatacactttctyacacacacatatgctctcacactcttacacagccccacacatccctctggttgattaaagaagtgagttcaagaacaaataccccttcatgacatgagagttaaaaggagaaatctcaaaatcaatttgccctaatcagaaggaagataaaatgagtagagcaactccagtattatgggacaacaaagcatcccaagtaagtatatttaacagggacctggaatctaccgtaacccaagtg

SEQ ID NO: 713596 - DNA, 803 bp, Homo sapiens
ttaaatgtttgctgtgtactagagatatctttaatctttataatagcttgtttgtttttctaattgtacaaatgaagacccatagtgtaagaagttataaattttgtacagtgtcacaaatatagaacacaagtgaaaaagtgaaaatccgaaaccagaacaatatgactaagaatctatggttttttccagtctactgtggtagatttagtaatccccccgcccaccaccctgttcttccaccccctgacccttgccagaaatgttatatcctagtctctgaaacctgtaaatgtattacatgataaggaagatgggatcttagatggaactaagattgctaattatcggccttaaaatgaagagattatctgggtggtcccaatgaaatcacaagggttcctaaatgaagaagagggaagcagaagaatcaaaagcagagagacgatgtcatgagaaagactcaaacaatcatcattgactttgaatataggaaaggaccatgagccaagaaatgtgggcagcctccagagctggaaaaggcaagaaaatggattttgtcttagagcctccagaaaaaaatgcagccttgcaaacaccttgattctagctcagtgagatcctctttagacttctgaccaccgcaactgtaagatgaaaygtgtgttgttttaagtcgccaagtttatggtaattggttggagcagcaataggaaactaatataagctcttcaatcctccaataaagcaagaaacattcttctgtgcttgttagaaagacatcatgtgcataggaatgtaat

SEQ ID NO: 713597 - DNA, 974 bp, Homo sapiens
  misc_feature 545: n = A,T,C or G
tactagacaatacatatatgaatggatgtgaatgtgtcccagtaaaacaagtagctaatctacaggctatcatttgccaacccgtgttataagccagtttaagtctgagttttcatgacttgttgccaaaactagcagatacgatacactggttcttgctcattttcggggtccggctgcatctagctcttagagtatatgaggaactccagtgttcacggctgctgggcaagatatttaacaaagagtagagcataaacaccaaccaaccataaacatgtaggataaccatgctggggtgaatcagctaaatatcactctgctgttatccctccaacaagtcctctttgttagttaaactagtcagagtttatttctgttatttttaaacaaaggcatccttccctgttctttttagattttctttttgggtactactttaatcatttcacttatttttttggttaaaatgctgatcagttttatatctttcttcttttgggttctccatttctttagttcagtaatttcaaggccaggatggnattactgattctttttaaaaacgggtatctgggccaggtgtggtggctcacacctatgatcccagaactctgggaggctgaggtggaaagatgacttaaggccaggagtttgagaccagcctgaacaacacagtgaaaccccatctctacaaaaaaaaaattttttttaattacctaggcatgatggtacacacctgtagtcccagcttttcaggaggctgacacacgaggatcacttgagcacaggagttggaggctacagtgagccatgattgtgtcactgcactccagcctgggcaacagagtgagaccctgtctcaacaacaacaataacaaaatgggtatgtgaaaacttttccygataatgaatctctgcagaccttatgatcaaaaacacaagctaccacttgacaggatgaggtgtgagca

SEQ ID NO: 713598 - DNA, 679 bp, Homo sapiens
gttaaatttgcctagttttatgatgctcagggttgttttgtctctatttggcttgcaaaattttcctcactgcttgatttttatttttttccatttaaaaatattatatagtggggtaagaatttgtatcccttgtatttctaccccttagggggttcttcctgagcaacggctggtgttgtcgcatacccagttgatgtataaggtggttcttgagaaaatcctttaggaggccaaccctggcttctgtttctctggcaatgtatggcttctaaattgcccacaattttccttgagaagttttraacaaaatttctcctctcctgagataagttttaaatgagaatttttttttcctggctgggtgcagtggctcatgcctgtaatcccagcactttgggaggccgaggtgggcagatcacctgaggtcaggagtttgagaccagcctggccaacatggcgaaacccatctccattaaaaatacaaaaaaattagctgggcatggtggtacgtgcctgtgatcccagctgctcaggaggccaaggcaggagaatcgcttgaacccagaaggcggaggttgcagtgagctgagatcatgccactgcactccagcctgggcaacagagcgagactttgtatcaaaaaaaaatgcttttttcctaataaatgtttgactgt

SEQ ID NO: 713599 - DNA, 624 bp, Homo sapiens
atgccttctcattagctcttagttcagcctgcatctgggagttgggagggtgttggtttgaaacagacctctctgtacaaatctgcaaagagagatgatctaaaaacccaccagaaggagaaagatgctatgagcttccaaataactacacggtcaagaactcataggacctgaaatttgacatgtgatcaaggccagcacaggcttttgagaaacacagacaaaagttattgtaaaggtgatacattaactggttcagtaagagacggagggcaataccatttaaaaaatgtattttggatttattaaatcataagggagtgargacttacttccttatgagatagctaacctgtttagggttaatcttaggtgtctccttgccagagtagtcaaaagagttggtacaaggtcattttagatataaaccagaaatagcatggaggcataattattatatcaaaaatacaaatcacagcaaacaaatttttctagagactcagttatggttttggtcaggaaaagaatcgttggcgtattttcactggagtctagcttcatagggtaacctaggggcaggactagtactgaagttactggaaagtcactgttatttggtgtttc

SEQ ID NO: 713600 - DNA, 597 bp, Homo sapiens
gaactttggggttctctcagtggttagagataggatatgaggaaaaacagtgcaggagactaaggaggagctctcattgagttaggaaaatcaagagggatgccctggaagccaaatgaaggcagtgttttgaggaagaggggtgatgggccatgtgaaagccaataggtcamatgctgctaatgggtcaactaaagtgaggactgagaagtattcaccaatttagcaatgtggagctcattggtgaccctcataagagctgttttggtggaatggaggaggtaaaatcctggagggggagaacataagaatgagagaacagttgacagtgcatgtaaacaactctttcacggaactttgtatttctgaatttttgtttatttggctattaataaaatcatatctgatatagctttattttagtaaggtttgtttttgtgggacttcagttgtgtatacacatatgtgtgtgtatgtatgtgcgtatggtgttttgatgtaaaatttattattgtgggtcatggttaaaaaaaaagcttgagaatgaggagttagatcaagaaatagaaggaatgttgacataagaagttgtggatg

SEQ ID NO: 713601 - DNA, 597 bp, Homo sapiens
gaactttggggttctctcagtggttagagataggatatgaggaaaaacagtgcaggagactaaggaggagctctcattgagttaggaaaatcaagagggatgccctggaagccaaatgaaggcagtgttttgaggaagaggggtgatgggccatgtgaaagccaataggtcaaatgctgctaatgggtcaactaaagtgaggactgagaagtattcaccaatttagcaatgtggagctcattggtgaccctcataagagctgtkttggtggaatggaggaggtaaaatcctggagggggagaacataagaatgagagaacagttgacagtgcatgtaaacaactctttcacggaactttgtatttctgaatttttgtttatttggctattaataaaatcatatctgatatagctttattttagtaaggtttgtttttgtgggacttcagttgtgtatacacatatgtgtgtgtatgtatgtgcgtatggtgttttgatgtaaaatttattattgtgggtcatggttaaaaaaaaagcttgagaatgaggagttagatcaagaaatagaaggaatgttgacataagaagttgtggatg

SEQ ID NO: 713602 - DNA, 597 bp, Homo sapiens
gaactttggggttctctcagtggttagagataggatatgaggaaaaacagtgcaggagactaaggaggagctctcattgagttaggaaaatcaagagggatgccctggaagccaaatgaaggcagtgttttgaggaagaggggtgatgggccatgtgaaagccaataggtcaaatgctgctaatgggtcaactaaagtgaggactgagaagtattcaccaatttagcaatgtggagctcattggtgaccctcataagagctgttttggtggaatggaggaggtaaaatcctggagggrgagaacataagaatgagagaacagttgacagtgcatgtaaacaactctttcacggaactttgtatttctgaatttttgtttatttggctattaataaaatcatatctgatatagctttattttagtaaggtttgtttttgtgggacttcagttgtgtatacacatatgtgtgtgtatgtatgtgcgtatggtgttttgatgtaaaatttattattgtgggtcatggttaaaaaaaaagcttgagaatgaggagttagatcaagaaatagaaggaatgttgacataagaagttgtggatg

SEQ ID NO: 713603 - DNA, 1420 bp, Homo sapiens
tcttgcagactggttaggtggaagtttgtcttctccctccacccactggcaacctcatggcaaaagtagggtactgagttacatatctttgtttcctccaagtgaaaaaataacctcacttccctgatrtggtccactgacaccagggagggggtgagtaggggccaactcataccacttggttgcttccaaggagtaggagtggggagaagctgtgtaagaacagaactgatcattaaagaccctattataaattcttgcttttatagtacttattctcgtggcttaaatattccacaccaattaatcaccacggaatatatgagacattatattaattattaaattttacatggcaacactaacaatattaactcccattttctatctctttaattgaggtcattctttagaagtttaagtataatccattcttctgtcctacacgactgagtgaaagagcatgtagcagcaacatatagtaccagtatgtaatcctaatgcaatggcacaccccagatgacccttttgtgtattgggattgaccatggtttttcagtttaatcaaagtttaattgattaaactcggggttcacattttctttctacacaccaatattgaagagaagtactacaaaatacataggagcactaaactggtagtaataagaaaaacataaaatatttaagataatgtgttgcttttatttctaatattagctactgatacaatcaaagcactgcggctcagttttctcttttgtaagaggacaagtttgtattagttaatctttaaatgtctctacaatctgattctgagattgtgaataaatagatctaaatactgttataggtatataaatacagatataaatgcaggtatgggtaaaattatggctatgggtcccagccttaaattcttatttttttataactaattgatgttcagggatagatttatgtgatctgctcatttgcaggggcccatcacttggctaattctttggtgtcattcgtgtcaagttttaaataatttttgaggaagatgtcctatattttaattttgcactgaacactgcaaattttgtagctgttcctgttaatttgttaatgaaatttctctttagaaactattaaattaataagacaataattaagcaaataattattaaattttacatggtaacactagcaatattaactcccattttctatcactttaattcaggccatcctttagaggtttaagtataatccattcttatgtcctacacaactgagtgtgtagtaccagtacgtaatcctaatgtaatggcacaccccagatgacctttttgtgtgttggcatggtttttcagtttaagcaaaagtttaattgattgaaacttgaagttcacatttttttttctacacaccaata

SEQ ID NO: 713604 - DNA, 1420 bp, Homo sapiens
tcttgcagactggttaggtggaagtttgtcttctccctccacccactggcaacctcatggcaaaagtagggtactgagttacatatctttgtttcctccaagtgaaaaaataacctcacttccctgatgtggtccactgacaccagggagggggtgagtaggggccaactcataccacttggttgcttccaaggagtaggagtkgggagaagctgtgtaagaacagaactgatcattaaagaccctattataaattcttgcttttatagtacttattctcgtggcttaaatattccacaccaattaatcaccacggaatatatgagacattatattaattattaaattttacatggcaacactaacaatattaactcccattttctatctctttaattgaggtcattctttagaagtttaagtataatccattcttctgtcctacacgactgagtgaaagagcatgtagcagcaacatatagtaccagtatgtaatcctaatgcaatggcacaccccagatgacccttttgtgtattgggattgaccatggtttttcagtttaatcaaagtttaattgattaaactcggggttcacattttctttctacacaccaatattgaagagaagtactacaaaatacataggagcactaaactggtagtaataagaaaaacataaaatatttaagataatgtgttgcttttatttctaatattagctactgatacaatcaaagcactgcggctcagttttctcttttgtaagaggacaagtttgtattagttaatctttaaatgtctctacaatctgattctgagattgtgaataaatagatctaaatactgttataggtatataaatacagatataaatgcaggtatgggtaaaattatggctatgggtcccagccttaaattcttatttttttataactaattgatgttcagggatagatttatgtgatctgctcatttgcaggggcccatcacttggctaattctttggtgtcattcgtgtcaagttttaaataatttttgaggaagatgtcctatattttaattttgcactgaacactgcaaattttgtagctgttcctgttaatttgttaatgaaatttctctttagaaactattaaattaataagacaataattaagcaaataattattaaattttacatggtaacactagcaatattaactcccattttctatcactttaattcaggccatcctttagaggtttaagtataatccattcttatgtcctacacaactgagtgtgtagtaccagtacgtaatcctaatgtaatggcacaccccagatgacctttttgtgtgttggcatggtttttcagtttaagcaaaagtttaattgattgaaacttgaagttcacatttttttttctacacaccaata

SEQ ID NO: 713605 - DNA, 1420 bp, Homo sapiens
tcttgcagactggttaggtggaagtttgtcttctccctccacccactggcaacctcatggcaaaagtagggtactgagttacatatctttgtttcctccaagtgaaaaaataacctcacttccctgatgtggtccactgacaccagggagggggtgagtaggggccaactcataccacttggttgcttccaaggagtaggagtgggragaagctgtgtaagaacagaactgatcattaaagaccctattataaattcttgcttttatagtacttattctcgtggcttaaatattccacaccaattaatcaccacggaatatatgagacattatattaattattaaattttacatggcaacactaacaatattaactcccattttctatctctttaattgaggtcattctttagaagtttaagtataatccattcttctgtcctacacgactgagtgaaagagcatgtagcagcaacatatagtaccagtatgtaatcctaatgcaatggcacaccccagatgacccttttgtgtattgggattgaccatggtttttcagtttaatcaaagtttaattgattaaactcggggttcacattttctttctacacaccaatattgaagagaagtactacaaaatacataggagcactaaactggtagtaataagaaaaacataaaatatttaagataatgtgttgcttttatttctaatattagctactgatacaatcaaagcactgcggctcagttttctcttttgtaagaggacaagtttgtattagttaatctttaaatgtctctacaatctgattctgagattgtgaataaatagatctaaatactgttataggtatataaatacagatataaatgcaggtatgggtaaaattatggctatgggtcccagccttaaattcttatttttttataactaattgatgttcagggatagatttatgtgatctgctcatttgcaggggcccatcacttggctaattctttggtgtcattcgtgtcaagttttaaataatttttgaggaagatgtcctatattttaattttgcactgaacactgcaaattttgtagctgttcctgttaatttgttaatgaaatttctctttagaaactattaaattaataagacaataattaagcaaataattattaaattttacatggtaacactagcaatattaactcccattttctatcactttaattcaggccatcctttagaggtttaagtataatccattcttatgtcctacacaactgagtgtgtagtaccagtacgtaatcctaatgtaatggcacaccccagatgacctttttgtgtgttggcatggtttttcagtttaagcaaaagtttaattgattgaaacttgaagttcacatttttttttctacacaccaata

SEQ ID NO: 713606 - DNA, 1420 bp, Homo sapiens
tcttgcagactggttaggtggaagtttgtcttctccctccacccactggcaacctcatggcaaaagtagggtactgagttacatatctttgtttcctccaagtgaaaaaataacctcacttccctgatgtggtccactgacaccagggagggggtgagtaggggccaactcataccacttggttgcttccaaggagtaggagtggggagaagctgtgtaagaacagaactgatcattaaagaccctattataaattmttgcttttatagtacttattctcgtggcttaaatattccacaccaattaatcaccacggaatatatgagacattatattaattattaaattttacatggcaacactaacaatattaactcccattttctatctctttaattgaggtcattctttagaagtttaagtataatccattcttctgtcctacacgactgagtgaaagagcatgtagcagcaacatatagtaccagtatgtaatcctaatgcaatggcacaccccagatgacccttttgtgtattgggattgaccatggtttttcagtttaatcaaagtttaattgattaaactcggggttcacattttctttctacacaccaatattgaagagaagtactacaaaatacataggagcactaaactggtagtaataagaaaaacataaaatatttaagataatgtgttgcttttatttctaatattagctactgatacaatcaaagcactgcggctcagttttctcttttgtaagaggacaagtttgtattagttaatctttaaatgtctctacaatctgattctgagattgtgaataaatagatctaaatactgttataggtatataaatacagatataaatgcaggtatgggtaaaattatggctatgggtcccagccttaaattcttatttttttataactaattgatgttcagggatagatttatgtgatctgctcatttgcaggggcccatcacttggctaattctttggtgtcattcgtgtcaagttttaaataatttttgaggaagatgtcctatattttaattttgcactgaacactgcaaattttgtagctgttcctgttaatttgttaatgaaatttctctttagaaactattaaattaataagacaataattaagcaaataattattaaattttacatggtaacactagcaatattaactcccattttctatcactttaattcaggccatcctttagaggtttaagtataatccattcttatgtcctacacaactgagtgtgtagtaccagtacgtaatcctaatgtaatggcacaccccagatgacctttttgtgtgttggcatggtttttcagtttaagcaaaagtttaattgattgaaacttgaagttcacatttttttttctacacaccaata

SEQ ID NO: 713607 - DNA, 1420 bp, Homo sapiens
tcttgcagactggttaggtggaagtttgtcttctccctccacccactggcaacctcatggcaaaagtagggtactgagttacatatctttgtttcctccaagtgaaaaaataacctcacttccctgatgtggtccactgacaccagggagggggtgagtaggggccaactcataccacttggttgcttccaaggagtaggagtggggagaagctgtgtaagaacagaactgatcattaaagaccctattataaattcttgcttttatagtacttattctcgtggcttaaatawtccacaccaattaatcaccacggaatatatgagacattatattaattattaaattttacatggcaacactaacaatattaactcccattttctatctctttaattgaggtcattctttagaagtttaagtataatccattcttctgtcctacacgactgagtgaaagagcatgtagcagcaacatatagtaccagtatgtaatcctaatgcaatggcacaccccagatgacccttttgtgtattgggattgaccatggtttttcagtttaatcaaagtttaattgattaaactcggggttcacattttctttctacacaccaatattgaagagaagtactacaaaatacataggagcactaaactggtagtaataagaaaaacataaaatatttaagataatgtgttgcttttatttctaatattagctactgatacaatcaaagcactgcggctcagttttctcttttgtaagaggacaagtttgtattagttaatctttaaatgtctctacaatctgattctgagattgtgaataaatagatctaaatactgttataggtatataaatacagatataaatgcaggtatgggtaaaattatggctatgggtcccagccttaaattcttatttttttataactaattgatgttcagggatagatttatgtgatctgctcatttgcaggggcccatcacttggctaattctttggtgtcattcgtgtcaagttttaaataatttttgaggaagatgtcctatattttaattttgcactgaacactgcaaattttgtagctgttcctgttaatttgttaatgaaatttctctttagaaactattaaattaataagacaataattaagcaaataattattaaattttacatggtaacactagcaatattaactcccattttctatcactttaattcaggccatcctttagaggtttaagtataatccattcttatgtcctacacaactgagtgtgtagtaccagtacgtaatcctaatgtaatggcacaccccagatgacctttttgtgtgttggcatggtttttcagtttaagcaaaagtttaattgattgaaacttgaagttcacatttttttttctacacaccaata

SEQ ID NO: 713608 - DNA, 1380 bp, Homo sapiens
ggcctcaagctatcatcctccaggcctgggtctccagtagtgtggggattttctgaggaataaatcaagattctaattctgcacagtcaactccatatttttaacatttaagggttctactcatgtatagtagaaccataccccctggtagaaacatacctccctttttaaggcaaacacaaagaaaatggatcaatactcactgtatcggtttaatttccacaactgttatttcagttaacatagatctaacattccaataataaccaactctgaatttgcactactcccattatctttgaggtgtatcacagaattctcaagcccaaatttatttaaatccattttaattcagtatgcccctcatgcttcacagcattttctgggaagataagtgaagtgagaaaaatgatggcaatgacagattgtcaccagttcagaagaataatgaacaagcatgattggcagaaaggctgcgagctctgagtcagaacgactgaggctggaccaccccaatggttcatagtggttagttaagagcacagagaccttcctgaaccaggctactggagtgctscattcccagctccttcagttactcacaggatgaccttgaggaaaggacttcacctctctgtgcctcacttctccctattataatagggataataataccaactacctcgcaggatttttaagaagactaaatgaataaagtgctttaaaaaaatgtttgctgtctcgggcaactaacttgaccttggctttctcatcagttaaatgggggtaataccttcttcacagggttatctgaaaatgaagctcagcctgaaagaaatctatctcagtgccctgcaaagagccacatagggcacctgttttatgcctagccctgtactataagctttacgtaggctgtctcatttaattctcacagcagctccacaaaataggtagtgtctattcccattttgtccactccatataaaactgacatgacatatgaaagtaaactgccttagatcataaagtgagcaaatggctaagccttaagccttaaatacacgttacaaacgcatttaactcggggtcttcgattggtctctggctgaataaccagttataaaagacatttttgcagacaattcaggcagagtgttaaagacaccagggaattattaattttgtaaaatgtgataatagtattgtggtttcacagaacagtatttttatctcttgagaagtaagctcaaatatttaggtacaacagtcccaatgtctgcaatgtctttgaaatggttcagcaaaaatacttacacctgttttattaatgggaaacatttcaacgttagggaaaatatgactgaaagggaagctgca

SEQ ID NO: 713609 - DNA, 1380 bp, Homo sapiens
ggcctcaagctatcatcctccaggcctgggtctccagtagtgtggggattttctgaggaataaatcaagattctaattctgcacagtcaactccatatttttaacatttaagggttctactcatgtatagtagaaccataccccctggtagaaacatacctccctttttaaggcaaacacaaagaaaatggatcaatactcactgtatcggtttaatttccacaactgttatttcagttaacatagatctaacattccaataataaccaactctgaatttgcactactcccattatctttgaggtgtatcacagaattctcaagcccaaatttatttaaatccattttaattcagtatgcccctcatgcttcacagcattttctgggaagataagtgaagtgagaaaaatgatggcaatgacagattgtcaccagttcagaagaataatgaacaagcatgattggcagaaaggctgcgagctctgagtcagaacgactgaggctggaccaccccaatggttcatagtggttagttaagagcacagagaccttcctgaaccaggctactggagtgctccattcccagctccttcagttactcacaggatgaccttgaggaaaggacttcacctctctgtgcctcacttctccctattataatagggataataataccaactacctcgcaggatttttaagaagactaaatgaataaagtgctttaaaaaaatgtttgctgtctcgggcaactaacttgaccttggctttctcatcagttaaatgggggtaataccttcttcacagggttatctgaaaatgaagctcagcctgaaagaaatctatctcagtgccctgcaaagagccacatagggcacctgttttatgcctagccctgtactataagctttacgtaggctgtctcatttaattctcacagcagctccacaaaataggtagtgtctattcccattttgtccactccatataaaactgacatgacatatgaaagtaaactgccttagatcataaagtgagcaaatggctaagccttaagccttaaatacacgttacaaacgcatttaactcggggtcttcgattggtctctggctgaataaccagttataaaagacatttttgcagacaattcaggcagagtgttaaagacaccagggaattwttaattttgtaaaatgtgataatagtattgtggtttcacagaacagtatttttatctcttgagaagtaagctcaaatatttaggtacaacagtcccaatgtctgcaatgtctttgaaatggttcagcaaaaatacttacacctgttttattaatgggaaacatttcaacgttagggaaaatatgactgaaagggaagctgca

SEQ ID NO: 713610 - DNA, 653 bp, Homo sapiens
caaccaatgtcaaatcagtcgcctagcttgcttccgatttcttcctacttccacctcttcagtcaagaaccaggccttgtcagttactccttcacagtctcacatatgtgtcctttcttcagcctttgtcacccaacgctagcccttatcactcctccactcacggggaccagggctgcccacgtggtcccgaggcctgaatccagagcgtccctcccactgccaccaagtacatcttcctactggcccacacaagtccttggtgtcaaaatatttagggcttccagtctccttaacctgatatcccacctgctttacagtgtggcatgaagaactatctcttgaacacaaaacaagtcaccttatcatttacattgtctaatatttaaaaaacaacttttaaaaaccagttttgtggccaggcatggtggctcacgcctgtaatcccagcactttgggaggccgaggcgcgtcatgaggtcaggagtttgagaccagcctggccaacacatcgaaaccgcgtttcttctaaaaatacaaaaattagctgggcatggtggyggatgcctataatcccagctgctagggaggctgaggcaggagaattgcttgaacccaggaggcagatgttgcagttagccaagattgcacca

SEQ ID NO: 713611 - DNA, 653 bp, Homo sapiens
caaccaatgtcaaatcagtcgcctagcttgcttccgatttcttcctacttccacctcttcagtcaagaaccaggccttgtcagttactccttcacagtctcacatatgtgtcctttcttcagcctttgtcacccaacgctagcccttatcactcctccactcacggggaccagggctgcccacgtggtcccgaggcctgaatccagagcgtccctcccactgccaccaagtacatcttcctactggcccacacaagtccttggtgtcaaaatatttagggcttccagtctccttaacctgatatcccacctgctttacagtgtggcatgaagaactatctcttgaacacaaaacaagtcaccttatcatttacattgtctaatatttaaaaaacaacttttaaaaaccagttttgtggccaggcatggtggctcacgcctgtaatcccagcactttgggaggccgaggcgcgtcatgaggtcaggagtttgagaccagcctggccaacacatcgaaaccgcgtttcttctaaaaatacaaaaattagctgggcatggtggcggatgcctrtaatcccagctgctagggaggctgaggcaggagaattgcttgaacccaggaggcagatgttgcagttagccaagattgcacca

SEQ ID NO: 713612 - DNA, 1540 bp, Homo sapiens
  misc_feature 1011, 1015: n = A,T,C or G
tatttcaggggttctttgaacatgctcaaatattatcttacacagtccatgagcctggcctgccatgagggcttgaaaagatgtcatctgaggctttcatttgccatttagtcatgaagagggaggacaggacctgggaacactgttttgggtaatagtattgaaagacttccattcatcttgtgtggatagaaacacattaggtaagttattaaactaagtaaacgtaagcaatgatacatccattcagtaagttaccatgcagctatagaaaatgatgttgtagaatatttaatgacatggaaaggtcatcccaatatttttaagtgaaataagctggtcacaaaacagaatatacattataatccttttgcaagccacatagatttacatggggaaggatatatcccaacctctttgcttttgctrtctctagtcaatagaactgtgagtgaatgttatttctttttgcttgttggtgctttttccaattttgtacaataaagatgtattgcctttttaataaaaatatttttaacataaataagttcaaagaagtccaaatcagctcattcactcctttctcatttccagagcattgtgctcagcccaattaccttctttcagtttatccactctctagcggcttcatggctgcatgtcttgtaaataaacagcattcttacccatgaattctaagagatccagccctatctcagcgtctgctgggaagtaaatcactcccctggaaatcactatctgcagaaagttcgcagataggcagcatcaacaattctacatagggctggttctgaaacctggtagaaattctcagccatatttataatgcacatatggatacatttccatgggagcaaaggcgattagtaaccattctttacaacgcacatatttgtgcatgcatatgtatttacacttggcaaattatgaattcacagtggctattaatatagatggaatctacatagagtgatggaagtggggtttagnaaanaaaggggccaaaaggttttggggggaaacctttgggtaaaatggggttaaaataaaaatacgtgctctggctatcctctgcaacttgttcaaggccggttagctgaatgtatctcagtttactcagccacgcgggagccatgcttggctcatcgatgccagcaaaaacctttaaatcagacagatactgagtttgaattccagctatgtgccttggtggttatgtgtccttaggtgacttacttaactctgtgaaccttggttttcctctctgtccaataccctctttaggtctaccttatgaggcgtttattcttgacatattctgagtcttcggctatagacatgaagattctcctgcgaattgcatctttcactgtattgtatgagaacttggttctttctcatgacctcattgatattctacagattgctgtacactctcattgttcaagtattagcaacatagtgcttcgtatcactctgtatgcactctctacgaaagaatctcagctgtgcgtcgtgg

SEQ ID NO: 713613 - DNA, 1256 bp, Homo sapiens
  misc_feature 561, 562, 563, 564, 565, 566, 567, 568, 569, 570, 571, 572,573, 574, 575, 576, 577, 578, 579, 580, 581, 582, 583, 584,585, 586, 587, 588, 589, 590, 591, 592, 593, 594, 595, 596,597, 598, 599, 600, 601, 602, 603, 604, 605, 606, 607: n = A,T,C or G
  misc_feature 608, 609, 610, 611, 612, 613, 614, 615, 616, 617, 618, 619,620, 621, 622, 623, 624, 625, 626, 627, 628, 629, 630, 631,632, 633, 634, 635, 636, 637, 638, 639, 640, 641, 642, 643,644, 645, 646, 647, 648, 649, 650, 651, 652, 653, 654: n = A,T,C or G
  misc_feature 655, 656, 657, 658, 659, 660: n = A,T,C or G
tctttaactggtaataaaatgcatatagtacatttacattgagataagatattaataaaataaacaatgtgggtcttacagcaacaaaaagtacctggagagtccactgtccaatttgaaacaatttgcatcattccccaaaaagggggcaccaggtgtggtacgatttttatctgtgtatttcacaggcaaggtctggttgagatgtggtggtagaagtaaaaagtattcagttactgctcaattaccaaatgtcctagccattttgtctcccaaatccttgcctttttgaaagtaaactttgaaattaatatgtcactcaaagtcaccgtgaggataacataagaagctaacatctttcatctgaagtgaacccagacagtctgatccaggctacagtaagtaagaagccaacttcttagggcttacattgtatttaaaggttattctcaagcgtagttaaagactgtggttttcccatagagctgataaagggtagttggtatttatttcctcgttgaagtggcgcaccatgtggcattagcgtcacacagtttacannnnnnnnnnnnnnnnnnnnnnnnnnnnnnnnnnnnnnnnnnnnnnnnnnnnnnnnnnnnnnnnnnnnnnnnnnnnnnnnnnnnnnnnnnnnnnnnnnnnttattgccttcaaagtgttttcattgacaagattagatagagaagcaaatgaagtatcgtcaaaagctcctgtcagtctcaggcgcaggctgggcactcacggttatcttcctcattatctggyttctccagattattttctgtttctttgggagtcttggcactttcttctttagattcccctttgttttcagtttttgcttttttttacatcaggcccagcatcattcaccatttttccctttttcttctttttcttttttgattctgaattgggagactgcattgctgtctctccgtttgttaatacaatggatttctgaggagatttttgaacttttacattttccactgtttcttgagacacatctccatcttgagcttctgataaccccacattcacagaacgttttgattttttaacctttccacctcccatcgtttcttcagacacacctccgttttgagtttctgatagggtcagatttgaggcccccggcaactttaggttccggtgtgcattttgaggttctgcttcttgatcttcttgctcaggagtttcatcagcaggtgagacatgctgtccaagaagtgcc

SEQ ID NO: 713614 - DNA, 1256 bp, Homo sapiens
  misc_feature 561, 562, 563, 564, 565, 566, 567, 568, 569, 570, 571, 572,573, 574, 575, 576, 577, 578, 579, 580, 581, 582, 583, 584,585, 586, 587, 588, 589, 590, 591, 592, 593, 594, 595, 596,597, 598, 599, 600, 601, 602, 603, 604, 605, 606, 607: n = A,T,C or G
  misc_feature 608, 609, 610, 611, 612, 613, 614, 615, 616, 617, 618, 619,620, 621, 622, 623, 624, 625, 626, 627, 628, 629, 630, 631,632, 633, 634, 635, 636, 637, 638, 639, 640, 641, 642, 643,644, 645, 646, 647, 648, 649, 650, 651, 652, 653, 654: n = A,T,C or G
  misc_feature 655, 656, 657, 658, 659, 660: n = A,T,C or G
tctttaactggtaataaaatgcatatagtacatttacattgagataagatattaataaaataaacaatgtgggtcttacagcaacaaaaagtacctggagagtccactgtccaatttgaaacaatttgcatcattccccaaaaagggggcaccaggtgtggtacgatttttatctgtgtatttcacaggcaaggtctggttgagatgtggtggtagaagtaaaaagtattcagttactgctcaattaccaaatgtcctagccattttgtctcccaaatccttgcctttttgaaagtaaactttgaaattaatatgtcactcaaagtcaccgtgaggataacataagaagctaacatctttcatctgaagtgaacccagacagtctgatccaggctacagtaagtaagaagccaacttcttagggcttacattgtatttaaaggttattctcaagcgtagttaaagactgtggttttcccatagagctgataaagggtagttggtatttatttcctcgttgaagtggcgcaccatgtggcattagcgtcacacagtttacannnnnnnnnnnnnnnnnnnnnnnnnnnnnnnnnnnnnnnnnnnnnnnnnnnnnnnnnnnnnnnnnnnnnnnnnnnnnnnnnnnnnnnnnnnnnnnnnnnnttattgccttcaaagtgttttcattgacaagattagatagagaagcaaatgaagtatcgtcaaaagctcctgtcagtctcaggcgcaggctgggcactcacggttatcttcctcattatctggcttctccagattattttctgtttctttgggagtcttggcactttcttctttagawtcccctttgttttcagtttttgcttttttttacatcaggcccagcatcattcaccatttttccctttttcttctttttcttttttgattctgaattgggagactgcattgctgtctctccgtttgttaatacaatggatttctgaggagatttttgaacttttacattttccactgtttcttgagacacatctccatcttgagcttctgataaccccacattcacagaacgttttgattttttaacctttccacctcccatcgtttcttcagacacacctccgttttgagtttctgatagggtcagatttgaggcccccggcaactttaggttccggtgtgcattttgaggttctgcttcttgatcttcttgctcaggagtttcatcagcaggtgagacatgctgtccaagaagtgcc

SEQ ID NO: 713615 - DNA, 503 bp, Homo sapiens
acacagtgaaattctgtctctactaaaaatacaaaaaaaaattagctgggcgtggtggcrggtgcttgtagtcccagctactagggaggctgaggcgggagaatggcatgaacctgggagacggagcttgcagtgagctgagatggcgccactgcactccagcctgggcaacagagcaagactccgtcttaaaataaataaataaataaataaataaataaataaataaataaaataaaatagttactattataattaaatggtataaatattgataaaataacaggtttgcaagtagaaagtgtttcaaatatagtgatcagaaataaaagatcactttataaacataatttgttttataaacaaactaatgatcttttaaaaagacctaaaattggctagggtggtggctcacgcctgtaatcccagaactttgagaggcaaaggtgggcaggtcatgtgaggtcaggagtttgaggctggcctggccaacatggtgaaac

SEQ ID NO: 713616 - DNA, 586 bp, Homo sapiens
tgtaagtgtacratgtttataaagtccacagtagtgtatagtaatgtcctaggccttcaccttcactcaccacccactcactgtctcatccagagcaacttccagtcctacaagttccattcatggtaagtgccccacacaggtgaaccattttttcctttaatactatatttttactgcaccttttctatgtttagatatgttagacacacaaatacttagcactgtgttacaattgcctacagttttcaatatagtaacatgctgtactggtttgtagcctaggagcaataggccataccatatagcctaggtgtgcaaacctgtaccatctgggtttgtgtaaatacggggtatgatgttctcactacaaactgcctaatcacacatttctcagaatgtatctcttcattaagcaatatgtgactgtatatttttattaatatataaaatacattaactcttggcaatatttttcccaggcctgtctgcccttttattttacctacttttttttgacataaagaagtagcaaatactaatgtaactgtaaccttttcaaagccaaacacatcttggttttcat

SEQ ID NO: 713617 - DNA, 755 bp, Homo sapiens
tcctcgacactcctgttgtttccttccagatggaggttgctaaactgaagtggcgattctgacctcttgctgcttactttcctctctcaaagcagatgagatgcagtgacttacatgattagcaaatgtgggcagcatgcccacttcagttctttcctcctcttaagagtgagctgcctgtagatatcattcattctgctactccttcagggatctgttatgaggtcttttgggtctcacacaagactagaaactcagatttagcctttattagaaatgaatgtgatgtcttggtttctcatctgccattcctttgttttatttctgtttgttcagccctaagggaaggaggaggaggcactgtttattsagacccccactactcctctaacactatttgtctgctagagccatgcctcttgttgttgttgttgttgtcactgtaaatggagtaacattttactcacagagaagacacagagcaagatcagctttaataagtgagcactggtcccccacagccagctcgtctcacccgacagccaatgcaggtagatagtctgcatgcaaccctctaagggttggccaggagccatgagatgaacacactcaagccaaacaaagcacacatcaagaaacaacagggaaagatacttccaaacaaggtgatgagtccagcacaagctgtgagggctccctgtctcccttgaaggaaatgctccaggcctgaggcacaattgtatcagacactgcaa

SEQ ID NO: 713618 - DNA, 1523 bp, Homo sapiens
ctttttctgaacattgaaaaaaaaaaaaccacctcgtcagtgaagtgagagtgtcaggaagttcagtgaaccaaataagctaaaatatgcatatctgaagaatttttaaaatcctgtctctcattttcataaatttagtgtgtgtctgtcccttggacacagaacaaatctttgtaagtgtggcttggccctactgcccattcacgactgagagtccagcagtcatgtcgggaattgacygaagccatacgcgacctgggtctttcgaccctgaagtccgctatccatcaccaaggattgtctgtggatataacagacaactctgctggctggcattaaggcattttcttgctgtacctagaaatgcagcctaattctgaaatataatttcagtctctgccatggctcaaaaaaatgttcagtaaatatgagacactttctgacttagtgaaaaccaccgaggaagcgttctcccttaaatgactaccacatgtgcgctaagagatgcttcatgttctcgccgggcacggtggctcacgcctgtaatcccagcactttgggaggccgaggcgggcagatcacgaggtcaggagattgagaccatcctggctaacatgatgaaatcccgtctctactaaaaatacaaaaaaattagccgggcatggtggtggatgccttgtaatcccagctattcaggaggctgaggcagaggatgcttcatgttctcttttgacttcgcttatgtaagattaatcattcttccacttttgcgcaacttccacagcattataatgacaactaattctgccaacattcattctgtttctgccttaatcataagattttttaaaattaactttggtataatttgttaattttctcagtaagagtttttgtttctttcttttttgagagaaagggtctcacttgtcttgccctgtcacctaggctggagtgcagtggcgtgatcatagctcactgtaacctcaaactcctggggctcaagaaatccttcctcctcagcctccttggcctcccaaagtgctgggattacaggtgtgggtcactgtgcctagctagtaataaagtaacttgaacaagtttttgctattactagtattcctttaaattatatttccttagtttaggttttctgtaagccttctgggcaaaaattaatgtattactttagaaaacctaaattcaattttagataaccaaaattttcagaaaatgagaatgatatgtttgttagatttatgccattttctaataaaatttgtaaaagataatatacagggaactaaggattttcagtattagaacgataatttttagatgattatgtttgttctttctagccaatgtctgctttttcagaacgtttgtgcaatcagaacatttcaatatttacttctcactgatattccaaatcacattccatgattcatgttcaccatttacatttatattatcagttgtttatttttatactttatatgttagtattatcttcattagta

SEQ ID NO: 713619 - DNA, 1167 bp, Homo sapiens
caagcaagtgtgctaggttttagtggagraagaataatttaaaatattgttaaaatagatgaaaaggaagagaaatacatataaatcaacatattttaaaatacaaacattaccagattaaaacaccaccaagacccctgcccacacacacacagagaacactgtatccaggaagtgcctctgtgggaaatagaaagagaagcactttcatctgtagacacagcttcatgttaggacacacagctcggtgtgagaggaccatagccggatttcatctcttactcaccactccccatgtaccttccttattcagggcacaatccaaataaataaatgtagtaaacttgctgaaagagatcttattggcaacaacaacaataatatacaataaaattaggaataacccaaataaaatacttgcagaatctataggaagaaaattgcaaacattttctgataaatacaaagtaataaattgaatgtcacagcttgtgcctgaattggataattaaatattttaagcccaccaactattcatgcaaatattaacagacttagaaactaccaagtaaactactgtgttctgcagcagaggatggagggattcaaagtgtgcttcttagatcagaaaactcatttattggccctttactgactacaacacaaccctacagaattaaatgtcctctttgactctttaaggttgtataagcaatactgctttccagatggagaaagcttatagacaatagggaaagggggaagaaaggtgaaaggctgactgtttatcactgtttagctgatgtgatggaactagtattagcagatgggtttaaatgtcattgttttcaccactgctattaccaccaccacccctcttcatctctgatttcccaaatcttctaatctcgtttctttcaggaccctgaccaaccagcctagccattcatcactatccaggagttcataaatatctgtgattcggcccacttctttcaccatacaaagtggcaaaccagtttactgctcttggctttacccattgggagaatttcccttttccactatatcaagggctgcccttaagtggggcaataatatggcagcagtccacttacagctacctcaacatggtgaaccaactcattaatgagccgtgggaaggtg

SEQ ID NO: 713620 - DNA, 556 bp, Homo sapiens
tgtaaaagagactattgaactaaatattcagcaacttttcccattaatccccctatattccaggtagccatygctttggattttttaaatttaattgcaattactggtttctaggatgattactttaactggacctaattcttttttagtccatctatccatagctctcattgacttcttgcatagcttcattcattaatttcttagagacagtttaagtcctcagaaggttcaggcagacattgtgttctcctgataagatttttagaaaatattctttaattattgtactgtctactttttctttctttatttctttttcttttcttgttcttaggttttttcccccttgatatttttttcaccatttaaatgttgttttaggattctttctaactattcattttaggactgtattagtttgttttcacatggctgataaagacatatccgaaactgggaacaaaaagaggtttaattggacttacagtttcacatggctagggaggcctcagaatcatggagggaggcaaaaggcacttctcacatggtggca

SEQ ID NO: 713621 - DNA, 556 bp, Homo sapiens
tgtaaaagagactattgaactaaatattcagcaacttttcccattaatccccctatattccaggtagccattgctttggattttttaaatttaattgcaattactggtttctaggatgattactttaactggacctaattcttttttagtccatctatccatagctctcattgacttcttgcatagcttcattcattaatttcttagagacagtttaagtcctcagaaggttcaggcagacattgtgttctcctgataagatttttagaaaatattctttaattattgtactgtctactttttctttctttatttctttttcttttcttgttcttaggttttttyccccttgatatttttttcaccatttaaatgttgttttaggattctttctaactattcattttaggactgtattagtttgttttcacatggctgataaagacatatccgaaactgggaacaaaaagaggtttaattggacttacagtttcacatggctagggaggcctcagaatcatggagggaggcaaaaggcacttctcacatggtggca

SEQ ID NO: 713622 - DNA, 1314 bp, Homo sapiens
cagtgatattttaagtagttgtcctagaaaaattttattttttaaaaatgtatatttaaaaatacattaaatgtgtatatacatcaatcatatgtatcgatttttgtttttcttgaattgcaaatgaaatttttatttttgtgttcctggaataaaataaacttgaatggatcataatatgttattcatgctgcaattcaaggtatttcaatactttaaaaatgttacatttatagttaacagatactgacctataaattttctgtcatataatgatgctgtgagacaatctaagaagaattaaaatttaaattcatgtattcctacttttttctctgttctctaactgtaatatattttaattacagatggaggaacagatagatgttagataaatagatatacaatagatagatcatccaaaattcttattcttgtggttttatgtagtcagtatttacctctatttttctacatgtttatccttccaatttagttcattacttcctgcacctttgatgtcatatatataaacaggaaataacacatggtggccgggatgtagagagagccacaggacttgtgaataaaatccacaggcaaggatgtggcgattccttttgcaatattggagggaatgccaaaccctatgtttgctgtggaaaagattatggtagttcctcaaaacatcaaaatggtattgccttatgattcagcagccccacatctcaagatagcataagaattgaaagcagagtcttgaaaaaatatttgcacatccatgtttgcagcagcattattggcaatagctaaaacgtagaagcaattgaagtgcccaacaacagatgaatggataagcaaaacatgaagtatacatacaatggaaaattattcagccttaaacatgagggaaatattctgacatatgttgcaacttggatgaaacttgaggatattatgtcaagtgaaataagttartcagtgaaggacaaatacagtataattccatttgtataagagacttaaagtggacagaatcacagagatagtacaatgatgactgccagaagctggggggaggaagacatggggaagtactgtttaatgggcatagagtttcagtttcacaagatgaaacgagttatggagatggatggtagggatggctgcacaatgttatgactctatttagtatcactgaactgtacacttaaaatggttaacagagtacattttatgttatgtgtattttaccacaataaaaagttaaaataccttaggaacattttcctgaaagagtccacataatattca

SEQ ID NO: 713623 - DNA, 1314 bp, Homo sapiens
cagtgatattttaagtagttgtcctagaaaaattttattttttaaaaatgtatatttaaaaatacattaaatgtgtatatacatcaatcatatgtatcgatttttgtttttcttgaattgcaaatgaaatttttatttttgtgttcctggaataaaataaacttgaatggatcataatatgttattcatgctgcaattcaaggtatttcaatactttaaaaatgttacatttatagttaacagatactgacctataaattttctgtcatataatgatgctgtgagacaatctaagaagaattaaaatttaaattcatgtattcctacttttttctctgttctctaactgtaatatattttaattacagatggaggaacagatagatgttagataaatagatatacaatagatagatcatccaaaattcttattcttgtggttttatgtagtcagtatttacctctatttttctacatgtttatccttccaatttagttcattacttcctgcacctttgatgtcatatatataaacaggaaataacacatggtggccgggatgtagagagagccacaggacttgtgaataaaatccacaggcaaggatgtggcgattccttttgcaatattggagggaatgccaaaccctatgtttgctgtggaaaagattatggtagttcctcaaaacatcaaaatggtattgccttatgattcagcagccccacatctcaagatagcataagaattgaaagcagagtcttgaaaaaatatttgcacatccatgtttgcagcagcattattggcaatagctaaaacgtagaagcaattgaagtgcccaacaacagatgaatggataagcaaaacatgaagtatacatacaatggaaaattattcagccttaaacatgagggaaatattctgacatatgttgcaacttggatgaaacttgaggatattatgtcaagtgaaataagttaatcagtgaaggacaaatacagtataattccatttgtataagagacttaaagtggacagaatcacagagatagtacaatgatgactgccagaagctggggggaggaagacatggggaagtactgtttaatgggcatagagtttcagtttcacaagatgaaacgagttatggagatggatggtagggatggctgcacaatgttatgactctatttagtatcactgaactgtacacttaaaatggttaacagagtacattttatgttatgtgtattttaccacaataaaaagwtaaaataccttaggaacattttcctgaaagagtccacataatattca

SEQ ID NO: 713624 - DNA, 2776 bp, Homo sapiens
atttttagaaatgaaaactcagaacttttgaagatttatgtttatttaacatactatttaaggaaaacaacaattttaacattaatgataagatgcatgggaaaactgagagaataactagaaatcaagtatgtamctcattcttagatcttctgaaaatataaatggcaaagatctgtgggcctaatgaggtagagtagtgtagttgtatatacatacacaataagggaagagtaatgcaaggctattttgttcttccactcagtgcctcccttttaccaagtgcaaagacacaggcgtacactggaagcatatacagacaagcaggccagataggcagtaatagcattctcttaagggacaataaatactacgagagtagaaggcatttattcaataagtgccaaatatgaatctgaatgttgtaatggaaaaagagccttggttactaactagaaagacccaggtttcactcctgtcttaaaatgagttagttactgtcataagaaaaataatttagctccatctgtgttttctgatttttaaagctaaggagttgagctagattattttgaggtttcatctaggtttaatgttctctgactttataattttctgtcatagtcttctgacatagggaaatgaaaaaagatcagatcacagattataatacaaaaatcataatttttatacacagattctattacaataatgctgcctcatgttttgaaaggccttatattctttaaaatatgtacatctaacagaattatttaacttgataattgtgttttaaataataaagatataattatatatcccttttcaatatatgaatttttatacaaaagatttctaaattaaatgttagtgttgtctttaattaaagcagtctttccataaatctcaaagtaatatttgcaagactaaaaaaagatagcatcagaatatttcattaatgcataaaaatgtttaaattgcaatttttaattctgtgatgacttattgcaataaaattgaattatggcttctcagggaatgagagcagaataagaatatgcatatattttatgaacaccatttatacaaaatattgtaagcttttttttagtgaatggacttttctaaagtaaactaaaaactgcatgtatttatttgctgatccataacaagtattttgtttattttattttattttttattttttattttttttagagacggagtcttgctctgtcgcctaggctggagtgcagtggtgcgatttcggctcactgcaacctccgctccctggttcaagctattctcctgcttcagcctcctagtagctgggactataggtgcatgccaccacgccaagctaattgcttttgtattttggtagagacggggtttcaccgtgttgcccaggctggtcttgaactcctgagctcaggcaatccgcccaccttggcctcccaaagtgctaggattacaggcacgagccaccgcgccatctccgtaacaagtattttctatttgttaaatcaacatatatttaaatgcaatatttactgagtggtatttagatatttataaatttggtgtcttggggagtagctcgttgtttccttacactgaagcatattttcagcacaccctcgaaatttaattaaaattctatcaatgggttcattttctgcaatatagtaggacagatgttcagaggaaccccacccaatacaatgcatttaaaactttttcatgcattgttgagctactagtaaggtaagacaaatgcatagaggccagaaagtaggcaagtcatagagtcggtgtttttcctgggattcagctgatcctggtggctcagaggcttggttttaatatgccaagcatgtcaggtttaggagatgaggcctagggttctctagttagtggaaatattttttagtgtctccttcaccaacttaggactcctgaaagtcaatatatcagtggtaaattggggaaaaaatcatgctccacaaagaaatataaaagttagtgtaaagaggtcttcgtttggtagtgtctttaggaaactggcagaagcaatcagaaattttttttttttaagaacaatagactttcaagccaacacacacacacacacacacacacacacacacacacacacaaccctgttgctatcataaagtaccaaggaccttctagaagatcaccaatagatacatacatacatatatacatacatacatatatacatatacaaataaatgaagaagctaattaggaaacaatgaagaattattatggtcacaaaccgtaagattagatgcagagagatatgttaaaggacacaaattatagctaggtagaataaatatcttcttgttatataccagtatatgataattatagttaacaacaatatatagtttcaaataactacaaagaggatattgaatgttcccaacacgaagaaatgataaatgtctgtcataataaatatgctagttaccctgatcactatacagggtaatatagtatttgaaccatcactatgtaccccatagaatgtacaatttttatgtgacaatttaaaaaaaataaagtagaataaagtatataaaaagaaactgcaagttcagatctcaaaatactgctgatgttaaaattatcagacacagaatacaaatgttaaaattatcagacacagaatataaagtaaatatacttaagggacttgaagaaataagaatgggaattgatagtatgaaaaaggagaaagata

SEQ ID NO: 713625 - DNA, 940 bp, Homo sapiens
atatgcttgtactatttgatgtatgcagytcctaattttacttcttttagtaaaaccctaataaagtaacagggagtaatgcttccagtctttaacagtgaactataatgatagtatttaggttctataaccaaacttttcagacatattagttgagtaactgtaataagtaacagttttcaacagtgcctttgaaaaacattgggaatcatttgtagaattttccatcaaaaagtatctgtttagtcaatttttttttctgtcagaagagactgttatttttctaagctaaagaagagtatacctacaagaacatctaccttgatccctaaatgtaaatattgaaataattaatcgtaaatgaccaaggaaagaaaacacgattttccttatttggttgctatcacataattgtgttttttttgtttttgtttttgttttttttttctctcttatcttctgtgtgtttgtcaaacacaagcacaaacagtttgtgctaactcaaacaaccaacattactgtgtccctggcacattgcccagggaggcaccttcacactaaggaggaaatgcccgacacagcacagaggagcatgtgtgcaaaacaggcaggctgactaagatgatctcagccatgaaggttagacccactcagggagacagagaatgaatcctcatgctctagacatcatgtagtatgtcaccattgcatttagaaatatctcataaataactatggcatcttcattcctttagtataactcaaacatagatacagatgggttatgggccctaccagtagttctgtcttaccctgtatccttccaccatatttcttcacccctgtctctcattcaggtaaagatcaagataaatactactacatggagaactgtattatctatatcactcctggtttgccatactgcctaatttacata

SEQ ID NO: 713626 - DNA, 589 bp, Homo sapiens
tagatcattttccattattatcatgcacataatagtctcacatgcccttcaaaagctgcttctatgatttatgttaaaatgtgttccgaacttttaaaaaaattattaacacaaaataaggtccattcagatttaatatttaccaatgggcatatgtgtatgtgtatatagcaagatttccttctaatccagtggtcagaaaacttattgtgcaaggaatccaatagtaaatatttgagactttgcagcccatacagtctcagccacaactcctgcccaaccctgtcattatagccaaaatttcaaatagccaagatttgaaaaaacctaagtgtctttcaacagaaaaacagataaagaaaatgtcacacatatacatatactcagccataagaaagaataaccactatggaaaacagtatggagattccttaaagaactaaaagtagaactacggtttgatccagcaatcccactactgaatatctacccagyggaaaagtagtcattatatgaaaaagatactcagataggcatgtttatagcaacacgatttgcagttgcaaaaatttggaattagcccaaatgc

SEQ ID NO: 713627 - DNA, 631 bp, Homo sapiens
tcaatttaaacatgtgaggcaaaaaatacatgatatttacaaattaatattcatatgacattttgcttatcctcttagccatttttatagaagtaatgtcaacttacaattattagtcctaagctttttcctaaatacacttagcattcatcattaaaatacatgtagattatccaggattgttatttgataaccttttaatttatgttayaatttaatttttttctaaaacaatgtttatctcacacataacattgtctttttaaactgttattaaattagttgagtctttcatatctaactactattaaacactaaatttctttttgagtgtttttttaaaaaacattataaaatattagacatccttaaaaacaaaaaagtactctaagaatcctaaatatccttaatccaatttttacataatgttgaaatcaccaatgttgccctcagaaatttcattcctctcttcctcccacaatattaaccacattattttctacaaagcttgtatatacaaaatttatattgtgttgtttatgcaaatactgtctataagatatatgctcatttatataacattatggaactttcattttgttaaatattacacttccaagattcacatgta

SEQ ID NO: 713628 - DNA, 631 bp, Homo sapiens
tcaatttaaacatgtgaggcaaaaaatacatgatatttacaaattaatattcatatgacattttgcttatcctcttagccatttttatagaagtaatgtcaacttacaattattagtcctaagctttttcctaaatacacttagcattcatcattaaaatacatgtagattatccaggattgttatttgataaccttttaatttatgttacaatttaatttttttctaaaacaatgtttatctcacacataacattgtctttttaaactgttattaaattagttgagtctttcatatctaactactattaaacactaaatttctttttgagtgttttttyaaaaaacattataaaatattagacatccttaaaaacaaaaaagtactctaagaatcctaaatatccttaatccaatttttacataatgttgaaatcaccaatgttgccctcagaaatttcattcctctcttcctcccacaatattaaccacattattttctacaaagcttgtatatacaaaatttatattgtgttgtttatgcaaatactgtctataagatatatgctcatttatataacattatggaactttcattttgttaaatattacacttccaagattcacatgta

SEQ ID NO: 713629 - DNA, 612 bp, Homo sapiens
gctattatctatcagagaagggaaatacattaggtggacatgacgttgtgtaagagttccacctggggaatctttctgaatgacaatagaaggaagaggagccccaaaagacataaacaatcacktgttgaagaggaaacagtaattgaaatatgaaacttctgaagcagctaaaatttacaaaacaggatatgagacttgattcaattgaaatgataggaaattttcccttagaaacaggactacactcatgctagagtaagtgctacttcagaacttccctaataaatcctaaaaccaagactaagaggaatggtaaattaactgcctgtaagatccaaaactcatcattaaaaatagtgatcccacagaatccagactttcaaccatgttacatccacagggccagcatgcaatcacaaatacccccacacagaagaagggaactgatctatagctaaaaggaaaaagaagtgaagaggcatgcagagatgtcactgaaattagcaaaccagaaagtgtaaagagctgttatatttaagttcagagactttaaaagtataggcatgattaagcaaaaggtgaaaaatcacaacacagaaatgaaagtta

SEQ ID NO: 713630 - DNA, 1088 bp, Homo sapiens
agaaagcagagtccacagcagcagaaacaaaatggtagcaatcagtgagcaagtggcaaagctgaagggctcaagggagaacatgacccgaatagggttcttaagagccragtgctgaactgagagctggagactgaatcaaccccaagagaagggagtccaggctgtaggcccctgcatgccaggaaccagaacagaaacaactgcataaagccagaggccatgagagactacatggcccgccataaactgggcctaaaaacactgcccaccagcccggcgaagctgcaaggaaccgtgccatctggcaggggactcatattgaggggctctcactaggcacagatgtaggcttcaaattcacactacccaaaccaatgcaacgagctaaacttgtgcagccccagcagagggaaaaacaaaactccccttaggaatgcttccaccatccaaggcacatgggattcctacagaaacaaatccccactcaaaatgaatttacactggaaaaaaaacaaaaacaaaccaagaggaaataaaccatcttaagggacagtaacatgacacaggaagaacttgcaccccaagaattagagataataatagactctaaaagcatctttaaaataagcatgtttaaaaagaatggcagactgttgatacttgttgaaagctgattaaagaacacagatggttcattactattcttttttttttgtatgtatgaaatttccataaatgagttttagcaattccaatataaagttttaaaaagtcaaagatgttcaaagagctgaaggaatagaaaccataaagtaaaaacaggcagatttttaaatgccaaaaaatttataaacaaacacaataattacgacaaaccattttttaaagagccataaagtagaacagatagagctgaagacagaattagaaattagaaaattaaatgtgaaaataatccagaatgcaggagaatgatataaatacataagattttaaaagaaaagacgcacaggagactgaatgaggaggttcaaatacttctattagaatactggttaagaaaaaatagtaaccaaaaaaaaaaa

SEQ ID NO: 713631 - DNA, 2143 bp, Homo sapiens
ctgccagggtttcttagctgaaaagtaatttggtgaaaacaaaacaaagcaaacaaacaactacaaaaatgccaggctgttttccaaagtaattgtttcttcctcttctagcagtggatgagaattaacagttgttgggtcagtctttaattttcaccattctagtgtgtgtgaagtttattgaattttaaatctaaactttttgatttggcgcatcacatgtgtttagtaacttattccttcaattctgtcattgtgtcactcaagggaaagtggaatcctggccccagggtagcagcagccttggctgtggggtgcatgaaacctgtgtgcccaggcctgggatacgtgggcatccctagagggccctgctcctctttactcagggctgctcggggcctgcaggggctgcaaagagttgggcttgggcaagccacgggccttggaaggagctttgctttctaggctctggagtgtggagggaggaggggacagaacaagatcccagacaggagggaccctccacacaggggagtgctcagcctggtctccctcagagctggcagcaggtctcacagatgtgtgctgaagaggctaaaggagaacagctacctagaaatgcacaagaatgccttttgcgtcagcaaatagaatgtgtccctttctaatacctggcttcaggaaataaaggggccatttaaagaatgtgattaggttggctgaattatgtttttccagcttctgatggacgttttttaatgtctttatcagtcatatttaaatagtactcattctaatcagattctttaaaacataatactcttggaatggatgactttttatgggatttcctcaaatataataatcaacagtcattgatttgaagattcatttcattccattcagtgggtaccttaaaatgacaaaatggacatggaacctttcaaatgtaaataaaagcagagaacatagtaaagaaatcgtatgggtccattaatgagctttggcagtttttaacatttggcaattctcccactttttttttttttttttgagtcaaagtctcattctgttgcccaggctggagtgcagtggcacaatctcggctcactacagcctccgcctcctgggttcaagagattctcctgctcagcctcccaaatagcgccctccaccacacccagccaattttgtgttttcartagagacagggtttcaccatgttggtcaggctggtccacagctcctgacctcaggtaatatacctgtttcagcctcccagcaatgctgggattacaggtgtgagccactgtgcctggccccacttcttatttttatttttggcttgaacgttttaaggcaaaagctccccattctatcttttcatttgtaaatacttctgtgctgattgtgcactgataaatcttacttttttttttgagacggagtctcgatttcttgccctggctggagtgcaatggcgtggtctcggctcactgcaacctccacttcctgggttcaagtgattccccttcctcagccacccgagtagctgggattacaggcatccaccaccacacccagctaatttttgtatttttagcagagagagggtttcaccatgttggccaagctggtcttgaactcctgatctcaggtgatccgcctgcctcagcctcccaaagtgttaggattacaggcatgagccaccatgcctggcttgataaagcttgcttttttatgactgtcacctcattaccctgcctgacagtaattccttaatgacagctaatttcctgtccatacttaaatttcccagattgtgttcaaggtaactttttacagttgtatatgatccttgtgctaggactcctggctaggactttggaagacacagaggttggcctcagcaatctcctttctggtgactctgtgaatgtgccctcacagttcatgtctgtatcttctggtcactcagacaccccttgtgtgtctgtgtgcctcagccttgcttgtggtccccgagatgcctgttccccgctgtgcccctcagtctttcttcgctgcctcgcgatggcttgctggctctaacagggatttctgctttccttgctctggcgctccatgcagctagccgttcatc

SEQ ID NO: 713632 - DNA, 2803 bp, Homo sapiens
gcgcggtggctcacgcctgtaatcccagcactttgggaggccgaggcgggtggatcacgaggtcaggagatcgagactatcctggctaacacggtgaaaccccgtctctactaaaagtacaaaaaaattagctgggcgtggtggtgggcacctgtagtcccagctactgggaggctgaggcaggagaatggcgtgaacccaggaggcagagcttgcagtgagccgaggtcgcgctactgcacttcagcctgggcgacagagcgagactccatctccaaaaaaaaaaatttgctgggtgtggtcacgggcgtctgtaatcccagctactygggagtctgaggtgggagaacgttttcaacccgggaggtagaggttgcagtgagccaggatcgcaccactgcactccagcctgggagacagactgagaccccgtctcaaataaaaaaaataaaaataaaataaaaaattaaactttaaattcagttcctgagtcacactgactacatttcaaatgctcagtagccacttgtggttggctagtgaccactggatgggacaatgcagatacggagttgaactttcagtgagttaaaaatttatttattttgttccttcaagttcaagtagcttttcagttctttcccttacgctttaaaataaatttgtttttaatatctatctacaatgtcgttatttccaccatttgttcacagactgggttttgtaggtgaatcttaacatggacttggcatgaacagttctgttctaaacagaagagggagcacagctcagggaaggccagtgcatgtctgtgggcaggttcctccctgtctctgattcctggggagtaagagcaggtttccagttaagacttgggggttttgtagtagcttgagctgttaaaaaaaaaaaaaagacttgggagttcgggcctgcatgttggctggtcctcactacctttatgatctcaggaagtttacttctccatgacccagttcctaatttgtgaaatgtgatgccagtgcctctagctccaggggtctgattgcagagtagatgcagagggaagcccctgtgtgctaagtgccttgcctgactttatcttctgtggtgttatggtatttggggagcaggaggtatatttcactatgaccactggtgtcctatgttccgttagaaaaataccttttttattctgtcaccaaagccagcctgagctaaaagcaagagctttaaaaagtctttagataattcagattcctacgtagccttttctcccatagagagttgggccaggatagtctttttgctacttaaattttcctctcttccccatttcatttttttagtatgggtatggttcaacaacatatttgttgaaaagatatcggctcaggattgtgtccggttaagtttcattagagatgcattttaaaaggagcataagtgttggacattaagccttttgaattaattggggtatgcctttcaggttgcatctaacagctgtgcgctccccaataacgcatttgagctttgtccagggagactaagagcaaatagagatgttagaagactgagtcatgctttgcctcccggaaagtctctgggggaaaggagtggcctttctgaagggagtgacaaagtgcactaagaagggaggctgatcctcttctgtcatctgccaggctaatcaagacaagccctgaactggctgagtcctgcacatggttccctgaatcttatgtgatttatccaaccaatctcaagactccagttgctccagcacagaatggaattcagccaccaatcagtaactcaaggacagatgaaagagaattctttctcgcctcttataacagaaagaaagaggatggagagggcaacgtttggattgcaaagtcatcagccggtgccaaaggtgagttggcactgctgtccccttctctattcctggtaagttgctattgtgatgtatttagatgaatgaccctattttaatctgaatcatcgaaggttgagaccgtgtctagttacatagttataaatacccatctatgtactgatgccttctaaatgtctatctccagtatggtcttttcctttaagctctagatccattgacaccctcaccatctctaaaaggcatttcaaactgaacacatctgatacagaacttttcatttccttcccaactttgcccacgccagcctgctcctccttcacgctttccacttagtatatgatcccactattcactcagtctctgaagcttaaaacctaggattcatccttgactactgtattctttacaatctactcctaatgcattagcaattcttgctagctctaccttcaaaatatattctgaatagactatttcttgccgtttcccctgcttcccctctaaatcaaaacccccattctttttactgtgtgtaactgccgagcctgctctcaaccagttctccttccagacaataatgttttcaaaacgtaaatctaatcatgttacttcctacttaagacttaccagctggcttcctaatgcaattagaatgaactccggattcctaatggtagcctgcaccatttgacatttgcccatatctctgatctcatctccttctatcctcagctttgctctctgcactgtagacacaaagactgcctagtatctctcgaatattccaaacttgtctctgtacctagaatgtgcttacatggattgttttgtttctcttacctcagttgctggctcctcagggaaggcttttctaatctaaaatagcctccgtgtcca

SEQ ID NO: 713633 - DNA, 1361 bp, Homo sapiens
gctgagcctgggaattcttttttttttttttttgagatgaggtctcactgtgttgcccaggctggagtgcagtggcacaatcttggcttactgcaacctctgcctcttgggtttaagtgatcctccctcctcagcctaccaagtagctgtgaccacaggtgtgcaccaccacacctggtaatttttgaatttttggtagaggtggagtttcaccttgttgctcaggctggtttcaaactcctgagctcaagtgatttgcccacttgggcctcccaaagtgctgatattacatgtgtgarccaccatgcctggcctggaaattctccatcacttaccttagatgtactggtagaaggttggaccaaatccttttccttaggcaacattaaatgagagtaaccatgatgatgactcccaggaggacaattaggcctgcttggaaaaagataggctgcaatcagacttcccatccagagccaagccagttaggtatgtcattaattcagatgtcctacttggctggctggcagaaaatccagggcaatgtgatcatccattaccgctcacacttgatagcccaaactaggtgcgtggtaggcaattatatgcctgatatccaccataagaagtgctattcatttggggcaaaactgtaagagtataagtctccggctatcgtagcccaacctagtctcaatgctacgtcctgctcagggcgaattagattctgctaataggtttgggtgaccacagcagcagcacagtgctgacgtgacgtcaaggtccaattctcacaagactggaggctgggattaacaatataaaggaaatttaagtatcagaaagagcctgaaagaaggaatagttcctggaagaatacttccaaagtactcaaaggaggagatttttttttttttttgagatgaagtcttgctctatcccccaggcggagtgctttggcacgaactaggctcactgcaacctccgcctcctgagttcaagcaattctcctgcctcagcctcctaagtagctgggattacaggcacatgtcaccatatctgattaatttttcatatttttggtagaggcggggtttcaccatgttggccaggctggtctcgaacccctgatctcaagtgatcgacctgcctcagcctcccaaagtgctagaattacaggcatgagccatcgagcccaggcaggaggagctattaaaagtttgtcagcagggtcaggaggggtaagacagattgagcaacacaaggaagttttgttattttttttaggtagtggaaggggaccagagataccagcaataataggataggagaaagcaggaaagaaacctaagtgtccagaa

SEQ ID NO: 713634 - DNA, 1361 bp, Homo sapiens
gctgagcctgggaattcttttttttttttttttgagatgaggtctcactgtgttgcccaggctggagtgcagtggcacaatcttggcttactgcaacctctgcctcttgggtttaagtgatcctccctcctcagcctaccaagtagctgtgaccacaggtgtgcaccaccacacctggtaatttttgaatttttggtagaggtggagtttcaccttgttgctcaggctggtttcaaactcctgagctcaagtgatttgcccacttgggcctcccaaagtgctgatattacatgtgtgaaccaccatgcctggcctggaaattctccatcacttaccttagatgtactggtagaaggttggaccaaatccttttycttaggcaacattaaatgagagtaaccatgatgatgactcccaggaggacaattaggcctgcttggaaaaagataggctgcaatcagacttcccatccagagccaagccagttaggtatgtcattaattcagatgtcctacttggctggctggcagaaaatccagggcaatgtgatcatccattaccgctcacacttgatagcccaaactaggtgcgtggtaggcaattatatgcctgatatccaccataagaagtgctattcatttggggcaaaactgtaagagtataagtctccggctatcgtagcccaacctagtctcaatgctacgtcctgctcagggcgaattagattctgctaataggtttgggtgaccacagcagcagcacagtgctgacgtgacgtcaaggtccaattctcacaagactggaggctgggattaacaatataaaggaaatttaagtatcagaaagagcctgaaagaaggaatagttcctggaagaatacttccaaagtactcaaaggaggagatttttttttttttttgagatgaagtcttgctctatcccccaggcggagtgctttggcacgaactaggctcactgcaacctccgcctcctgagttcaagcaattctcctgcctcagcctcctaagtagctgggattacaggcacatgtcaccatatctgattaatttttcatatttttggtagaggcggggtttcaccatgttggccaggctggtctcgaacccctgatctcaagtgatcgacctgcctcagcctcccaaagtgctagaattacaggcatgagccatcgagcccaggcaggaggagctattaaaagtttgtcagcagggtcaggaggggtaagacagattgagcaacacaaggaagttttgttattttttttaggtagtggaaggggaccagagataccagcaataataggataggagaaagcaggaaagaaacctaagtgtccagaa

SEQ ID NO: 713635 - DNA, 618 bp, Homo sapiens
tggggaaggtagccagccctgaaagactgatctcattctttcctaaagcagctgggggtgtcaggactagatcaaatcccagggaggatcttgtagctttgaaaaagatgttaactgcatgaaattaaatcaggggtaaaacatgtcacactttagctgaccttttaggaggtaggcagcaggctgttaccttttactcagaaaattgtctttgaggccctttcactcaaagtcaggaagtggtgatgggggcatggataaggactctgaagtgaagtaagaggagccaatgagtattctttatccctgcattaaaacgtatgcatattagcatgttaagcgaattgtarctctggctgtacttggctatttcctaccttaaaaaaatttagtttttcttctgtaggtcacttgcctcttgtccaattggtggctgaactttccaagtgagatggaggtgcctgccagtagttgacacaagggcaggcactgagtgcattctgaatggtctgcactctacagaggctgcatctggaaaatcaaccagaagaaacgacaatggctgtttctcttagctcctaaattagtgtgttcttatgggccactgagaatatgtac

SEQ ID NO: 713636 - DNA, 1344 bp, Homo sapiens
tgaccttatttggaagtagggtgggccctaatcgatgtctggtgtctgataagaaggaagaggacagcatgaaaacacaaaaacacaggagatggccacgtgaccacagaggccgagatgggagagaggcgtccacaagccaaggaatgcaaggatcagagcaacaccagaagctggcacacggcgcggctctgccaacccctggtcccctgtgcctgtgaggccaggcatccttgctgtttgaaggcacccagctggtggtattttgctactgcagccccaggacacaaatccactctccttttagagaatccacctcaactccctaccacattcccactcacatcaaagtcaagctccacgtgctctgtctccaaagctgtgtctctgtctgctctgtccccaccttcctcagcagcacccactgtctaggcccctctggcccaatcatgagccacatcctcctacacctgcccgttctccaacatttcttacgcacagaccccatctctctagccccattcctcaaggcagggaccacgagtttcattcatcattctccctcatcttgcctggagcttacgcatccagtaaataacaaacacttgtttaacatcttatttcgaatcaagaagtggaagtaattgacaaagctgcttctctggtggagaagtttgtctgcttgtgtctttgtttccctctccattcaccgagacaaggcaataaaaaggccccagccactgatcatgcagagtacagcacaaatatgctgtcactaagcgtggaccattaaatactacgtaacgtatggtgaaaattatagcctccccttccattcctgatcatggaatagtctatttatttataaaatrgttgacataatgaatagttattttgccttttattaaggtgtggttaatatttatcacttaattttcctgtcctaagcaaaggagaaaatagacatttgtgtgacttcaaaaattacaagggcaattcacattcaataacaaactgaaatagtcgtttacaacaaatggtgcaaaatccacgcagcaccagccctaagtccgatctcagttataaataattgtggaagacttctgcggtgtgaataactgaagtcaacaaaatattccaaattggcggcatcattattcctggggaacatgttgctctgtctctcctcagacacaattgtcaccaaatcatgttttatgataatattataaagctacctatgatcaaaaaacaacacaaaaaaaacgagagccaaaataggaataattcatttataacagttaatagaagaacaggattgcattttaaataataaaatgtttg

SEQ ID NO: 713637 - DNA, 1045 bp, Homo sapiens
caccccctcctcctttccctcctatcctagggacaagaaagttcaaacctagaagtccaagactgcttgccgccaaggtttggacgcagtttcatttctgccaatgagactcacttggacgaagctagaacatagaaggcaggctgaggacacccctcctgtggctgagtgctggggtcgggcagcatctggacccccttgttttgcttttcaccatcagcttcttgagtggcaggtgctgcgacagccactgcttcctgactgccagtgcttccgtgcaaggcggaccacagagacctggtgattacacaaagctcagttcatctatcgccactgaggaagagtttcggtagcatctcagaaggggaaaatgaggtgagggggcttatagggcgtgcagggctggactagggtagtgttaggcagaagtcaattcagtatggtctgaggtgatcgaggttattgtagcatttggaacacatgaagccacgctctgttgctgtgaaatgtttgcttgctgtctcatcttggaaaatacagaccctcaagcagcctgtgtgaaaacaatttgaactcagagagtttgtcttgcacatcacgcttttgtacagtttgtgcattctttgagtcatacttcattttgccaattatttctgtgttgtttctctggcccttgggattatagttctactaagttttatcctgaagctaaaagtctagtgccaactccctgasttgttctctcatcagtcaaacaattttccaagcatctaattttctaaatagcagtggttaacagatgtgtgtcccctagtaaggtcttctctcattttataataaattattccaattaagataagatgacttttaaaaaaattaaatgtctttcaaatattaggaaaatatgtctttgccagcaggtggcaacctctctgaattgtaaattcaaaaccccagaaaaataaccatccctcagagagccaattcttccctctgtctgccctcaaaactacctacagaacgttttaaaagtaaagatgcctga

SEQ ID NO: 713638 - DNA, 1299 bp, Homo sapiens
ttctgtcgtgacgctctgattgccgattcagggtacagattactgacccaaagacagacgtgcatctggtttgagggttgctgaacaagtatctggaaatgggcatccatacacttaaaaataattgaagaggagattaatatacatgcccccctctgtgctgtcctcaaaacacagcactcatggcaatcggcgatacaaacaacccctcgtcttacatttacaaacacttctgctaagtttatccctctggtttttaccatgtccttgtacctggtgtgaggcagataaaattatgcccattttacaagtgagagaaactgaggctctaagagattaaaaggcagtctgagagtcagaatcaacacaggaagataagttggaagagctaatttgcatcagaaatttaatttaaatctagaacttctagccttaactctggtactttttccagtggtaatttccagaagttttcttatttttctgtccccctaaacacagtctttgattctaagagaaactggcaatagccaactagacgcctggaggcatctgattccagagtcacattccactacccttagttatccatggaactaccttccacctccaggaaccatggctgccagtgtctctaaacagctcctttgcttttctgacaacagccctggtgtcagatgactgacaggagatgtctgccactgcctgtcatgggtgcacattactggagaggagagatgatgacagactgagctctgtgctcctcccaagctcctcactgggctgtgcacctaaagcctgtcaatcagagttcacttgaataaactgcactggaaccagagaatgaatgtgccaagtatgcactgaggagccacttgcttaataaccaatctgaaacatgggacagagaggagactgtcatagaatttcctcgctaaagtctcatcccactgcaaccacctccagtggacttctcactggtaaaaggccgtggttctttggaacaggttcctgctgccttgcagattaggaatttaaaatttatctgtaacattcatatttatatataatatataccatatatcacatayttataattatatgcaagtatacaattatataacatacaacataattataatcatagataacactacatatatatatacagattcctgggtgctacctcatcatgatctctgggcagctatacgttttaagagccggtccagtggtgatgtggtttggaagtcaatgatttagtgaactcttggtattgtacatcaagaatgacacagc

SEQ ID NO: 713639 - DNA, 1299 bp, Homo sapiens
ttctgtcgtgacgctctgattgccgattcagggtacagattactgacccaaagacagacgtgcatctggtttgagggttgctgaacaagtatctggaaatgggcatccatacacttaaaaataattgaagaggagattaatatacatgcccccctctgtgctgtcctcaaaacacagcactcatggcaatcggcgatacaaacaacccctcgtcttacatttacaaacacttctgctaagtttatccctctggtttttaccatgtccttgtacctggtgtgaggcagataaaattatgcccattttacaagtgagagaaactgaggctctaagagattaaaaggcagtctgagagtcagaatcaacacaggaagataagttggaagagctaatttgcatcagaaatttaatttaaatctagaacttctagccttaactctggtactttttccagtggtaatttccagaagttttcttatttttctgtccccctaaacacagtctttgattctaagagaaactggcaatagccaactagacgcctggaggcatctgattccagagtcacattccactacccttagttatccatggaactaccttccacctccaggaaccatggctgccagtgtctctaaacagctcctttgcttttctgacaacagccctggtgtcagatgactgacaggagatgtctgccactgcctgtcatgggtgcacattactggagaggagagatgatgacagactgagctctgtgctcctcccaagctcctcactgggctgtgcacctaaagcctgtcaatcagagttcacttgaataaactgcactggaaccagagaatgaatgtgccaagtatgcactgaggagccacttgcttaataaccaatctgaaacatgggacagagaggagactgtcatagaatttcctcgctaaagtctcatcccactgcaaccacctccagtggacttctcactggtaaaaggccgtggttctttggaacaggttcctgctgccttgcagattaggaatttaaaatttatctgtaacattcatatttatatataatatataccatatatcacatatttataattatatgcaagtatacaattatataacatacaacataattataatcatagataacactacatatatatatacagattcctgggtgctacctcatcatgatctctgggcagctatacgttttaagagccggtccagtggtgatgtggtttggaagtcaatgatttagtgaactcttggtattgtacatcaagaaygacacagc

SEQ ID NO: 713640 - DNA, 1768 bp, Homo sapiens
tgtaaataattacatgtggactacttcattatctcacagagtgcatatgtgtgtggaacccaatgtaaagaaagtcttaagtaggtgaaaaacgttctcttcttttcttctatagatgaatgcatgcatggattctcaatgtatttattcaacaaatatttagtgagtatctgcagttttctaagcactaagcacagttatattcactctcatggaagaaacaaaaaatggcggggaacacagtcattcatcaaataatcacggtagtggaggcataattacaaaacaagttgaatattccaaaagaaagggaacccaggtctccaggagtgcataggagaggaagcaggctgaggccgggaagtaagggaaggtgtcccagagaagggcacccttgagctgagctctgatggatgagtagggtgactgaactgtgctcgctgaagatggaacaaccagggattcagtgaggggaagggagggcagccaggcacagggaacaaaatgagttaatgcatccatccaagctggagggagtaggaccttgccaaggaactggataggggaatatgcacaacagaggagagaatgggtagagagtggtaggaatggaagatggacaaggaggcagagacccagttcgccctggctcagggcttggaaagggttttgatcttcatctggcagcaacaggatgcagtgagagtccacgtcaaatgcactaactacctttaaacttgcactcaatgagtgcaaatcatcattatttattcatattgctcagaatcatatatatggaaaagatgtaacaaaacattcagtgcaaataactcactgtacagatgaggtaattaagcaatgaaccacattatctcagctgctggcagaatccaggctttctgggttccggccaaatgctctgacttgtagacaccttcttctcttacaatttcatatgacattatggggattaaacyttatttatatgacaaacctcatttttaattcaattattcatttatttaataaatatttattgagcatgtatgtgccagtctctgtgcttaataaattattacattttaattatggtgtgaatggacaagtgccatggatatgaaagagcctaatactcccacttattctctcatttatgactggaattgatagtagactgtcagaaaattactgattatggcccagttcttccaatttattgcagggccattgaattatctctatagaagaaacatattttataaaatccaggcctaaagaatacttaaacatcttttgaaaaggaatttcccttacctcattataaaaatacttgttcattataaaaaatattaatataaaaatacaaagaataaaaaaccctcaattccaccatcgaaaaggtaagcattaactatatattagtatattattccagtttttgtctcctatgggtcagtttcttcagatgataccttgaggtttctctggcttttcaaatttaatatttttacaatagcatttcctaatatcattaaaaattcacggtaaacatcaattgatttcccaaatataaatcaaataaaatgatcaaatttctctagttttttttttaccttttttgccattataaattgtacagcaaaaagtgctttgttgataaaatgttttgccaaacgtaacagccactcgcatttattttgtgttcactacatgctttgcacacataatcttaattcatctccacagtgatccttttagttaaaagctg

SEQ ID NO: 713641 - DNA, 1303 bp, Homo sapiens
gtttctgattgttctgacagactctctaaaaaagagctctccagagtcctctctcgcttctttggaggtggctgtgtttggagtaaagtatcagcgtggctctccaagcccccctgattttaggatccttaggaaaaccaagtgtcatcagtttgtgcatacctaaacaatttagtggctttgcagtgaggttgtgtaagttggtgggatgaggttattttccaggttcaggtgtccttgtggccatgggccatcctgtarcttctctggtaagaagccacctctgacataatctgaagcacaggagacaagcatgagccatcgtgctcactaaattagtttttgagaggggatgttgccttaaccatccttggaagaaaaatactgtttcgtcatacttttctttaaaacgttttagtactgaaatgactttgaatacaattactaagaagttcaaaatgtttaatggggtccgtggctgtcaaactcaaatgcctgtcacgttgtctttctaatgtgtaccgaacattcctgcctggagtgagaaccatgagtgttatttttttggcttggatcttggcaggtgtgtaatgtgactcctgatagcaggacagcagattacattctgctataaaaccatttctaaggcttttggcacccaaactgttattgcatgtctgcaggtgtttagtaattggattaatgcagagccggaggaatgtctgctccccggctctgagaaacattgaggaaagacaaattcatttcggagagtgacctggaatgcatgatgacaggcctgcgctcacacatgaagtcagatctaagcctgcacatttcaaatgaactgctgtgagcagtcaccttccataggaaagtttatccaaagctaaatacaataacaatggccttgtgagtcaggcgggaaggggcttcagcatgggtttgatcctcttccaaaagcaactcagacaactggagcttaagccttcctatcatgcaactcatgaaccctacaatcctaggtgtttaataataataatttcttaaaggccttggtaaacagaggaggatgctaagcctctcagtggaagtgcagagaccacactagtatcctggatcatcgtgccctcaccccttaattcccaccttgactgtaaagttacagatttcactgtgacaagacccccgaaaacaggcttggtaaaatggcaagcagtgttcacacctcaaggcaaccaggtccagcgccaagaagaagtggctgctctcagggtaattttgtcattctggctaattgaag

SEQ ID NO: 713642 - DNA, 1055 bp, Homo sapiens
ctggtccccccaggtgcttacattagaatgcaatctcttccactgttgtgtatagagcatgggccttgaaaattattcactgtgatatacattgattccctattcggtgcccaaacaatgagataatccttgtttaaatgttttttagaactttcatttgaaagtgctttttcatataacatttctgtatgtggagagcttagttttatgaggagtggggatttttcttatgcagatttcctttgtaaatttggagtcactgatgaggtggcaagggtgggagatttagtggatgatgggagatatatacaacttctttggaagttgccaaaatcaatacaaacaagatgtttgctatcacagctttcagaatttggatccataaaagtattgtggttttgtctaggaccaagaggcactgatttttattttactataatattgcagattgcgccattggcaacagaacttatcatacaattcttttggcaagataaagtctggttctacttcattctgaagttgggttgtctatggatttggggtggattagctccattggtgggagtctaggaacattgagacttagctaaaactctgattcccaattagacatcaatcactgccacacaaaagaaaaggagtttcttcttcgccagtggatgacacataacatgggccaccatagataaatcatagctaaacctcatcaaggttataaggaggatgtgattatttggtttctccaatcacctctcccaaagggataattcaacatattttacacgttgacttcggcagtatggttttcaaagtttttgtgaagcaaaccttgaaagcatactagagaaatacctagcaaaatccagatccactggcaacttctgtcagagagggtgattaagtttgaccccaggggctaactctgccttggttcttcctgagaaaaggaaacggcattcttacagtgccagaactagcatacttatcatcaggatatgatgatggtcagtatttggctctcccatcctggatatcttwtgtgaatcaaacct

SEQ ID NO: 713643 - DNA, 589 bp, Homo sapiens
gggagctggagggataggcttgggactcaaaaataagtggctctgtcactgactcattcattcatttaagaaactgttgtatactgctgtacaccaggctctgcagagacaaacctgcatagmacttcagccctgaccttcagggcctcagagtctagtggaagagacaaacttgtaatctcataactgcagcccagtgtgataggaacccttaaatcagtgcacataaaggattttgcaggcatgaaagagaaagcaacagacttcatctggaagagcttgggaagattttacagaaaacactgtatctgatgtgggcattgacaaagacataggagtttgctggctagagaagtggagaaagctataaagtcacaagtaagaaaccacaatgctggtttagaaatggcagatcggggaataagaggcaaaagcaaatgattttacaattgaattaacttaaaaatcaacaactagaagacctcaggaaaattcccaaatatttggaaactaaataatatatttataaataacttgtgagtcaaagatgcaatccaaagagaaaaggaagcattttgaactgaattga

SEQ ID NO: 713644 - DNA, 2504 bp, Homo sapiens
aaaagtgttaatttgtaatactttgaatttagctaggaagctttgtagaaaaatactttctatgcaactgagtgatgacaatgtagtgtgtgagaattcattgtatgtgttatgattcaacatcaagcattagttattagataattagttacttaatgtcaacatctaaaaattatggagagatgaaaacaaaaaagcatgccttggaaaacgcaagttgccttctttcttagtgaaatgattgttttattttctcttcatgaaaaggtttgagttctctctggtggcttctgcagaattgatatcatgtgtgatctctgagagaagagaacactttaaaccacctatagtgggatgttccatgtttcgctttaagctggatttgaaaattgatacccatggcacaaagaaatgcacatgatgatacaactgtggaacatcattaaaattaccccaggcagcaacagctgtagccctatatgctgcaccacagctggatatcctttgtgttatatagagagacaggtatgcagagagtaaatggaacaagaagaagggttacctaactcccatgaggtgatcagagactgcatcttggaagaggtgaattttaaaggatcagtaagagttagcttgatgaggtggaggacagtacacatggggcaactaccctacataaatcctattgagctttaaagatggcttatttccttttgtggcttggaagacattgatatcattccccaattaaaatctgtggtatggcagtatgtggatcctgccaccattaccaacaccactggaaaccaccctggtggttagcatatgtaaatatatctcatatacattcattcaaaacgacattcatatcagaatagatcattgcacacaagggacaaagggcaaactctagccacagattgtgtgccaagagggtggttttccaaatgatcccccaaggtctctttccttaccaagggcaaagtgttcccatgcagggttatgccacacgtttccattcgagcagatggcagaaaggtttgtctgcaatgtggaacttgttaagggggaaggccttcctgatagagatcaagaaggccgctttaatttacttagtggtgggatggtttgtaagtcattcatgcttgtgaggataatgcctttataatgacttgtaagtagattgagagcctccagagttaactcacgggaaaaggctgtttatctgctgcttaggtttctgctgaacactgcagacaatatattcacttcttttccatgccatttaatgacatttcacatatatatcattttttggtactttgtaaaaatattattttgcctgtctggggaaggggtcaaacatcgtaagaaggttagctttgagagatgacttgatggtctatgcacaatatcatcaagactaaccaccaccaaaatgatcacaatcaccaccaccccaggggcgatgttgtacaagtgaggaygctttcactaggttatgctgtggtaacaaacaactcccaaatgtcaatcatttaagacaagaaaattttatttttctctcatacaaagttcactctgcaaaactctccagagtagctttcctccataggtgggttcagcattccaggccatttgagtcttatggaatctctatattatcacacatttccataatctcccaggcaggaaaacagagcactggatagttctgtgctgaaaattaaatgctcaatcctggatgtggcacacatgtgttctgtccaaaccctgctggccagaactagtcatagagctccacccaactgcaagcttagctgtgaagtttaatcctatcatacactgaaaagaggaagaaactggataaaggcaagtattacagtccactttaatacgaattattttaaattttcaaagtaactttatccagcaaaggttatgtgttcatattaaagatgagatgcaatgtggattaggtgctgagagcataggttttgagtcagtcttgaacccccaatatataatctgtggggctcaggcaagacaaaattcctaaacttgtttcactttttgttaaattgggataaggttatacaccttatagagatggtttgaggcatacatgcaatagattaaatgggtagcatagtttctgacacgttaagtgctctaaaaactttagctcatattattaaaaggcaactaattatcagatgttaagaaatatatgtctaatgagtgagggaataattcatctcacatatttcaattgaacaaatcaactcagaaggcacaaatttttacactgggttcaaaactctcatttctctaatttcaaggctctcctttttcccattgtatcacagtgcctcttgtgatatagaatgaattagcaggttgggcccaatttttatgaacagtccctctccctaacccagcctctccatttcagtctgactctatgcatgaaaaggactttggtttaatcacaattgctcaaa

SEQ ID NO: 713645 - DNA, 2504 bp, Homo sapiens
aaaagtgttaatttgtaatactttgaatttagctaggaagctttgtagaaaaatactttctatgcaactgagtgatgacaatgtagtgtgtgagaattcattgtatgtgttatgattcaacatcaagcattagttattagataattagttacttaatgtcaacatctaaaaattatggagagatgaaaacaaaaaagcatgccttggaaaacgcaagttgccttctttcttagtgaaatgattgttttattttctcttcatgaaaaggtttgagttctctctggtggcttctgcagaattgatatcatgtgtgatctctgagagaagagaacactttaaaccacctatagtgggatgttccatgtttcgctttaagctggatttgaaaattgatacccatggcacaaagaaatgcacatgatgatacaactgtggaacatcattaaaattaccccaggcagcaacagctgtagccctatatgctgcaccacagctggatatcctttgtgttatatagagagacaggtatgcagagagtaaatggaacaagaagaagggttacctaactcccatgaggtgatcagagactgcatcttggaagaggtgaattttaaaggatcagtaagagttagcttgatgaggtggaggacagtacacatggggcaactaccctacataaatcctattgagctttaaagatggcttatttccttttgtggcttggaagacattgatatcattccccaattaaaatctgtggtatggcagtatgtggatcctgccaccattaccaacaccactggaaaccaccctggtggttagcatatgtaaatatatctcatatacattcattcaaaacgacattcatatcagaatagatcattgcacacaagggacaaagggcaaactctagccacagattgtgtgccaagagggtggttttccaaatgatcccccaaggtctctttccttaccaagggcaaagtgttcccatgcagggttatgccacacgtttccattcgagcagatggcagaaaggtttgtctgcaatgtggaacttgttaagggggaaggccttcctgatagagatcaagaaggccgctttaatttacttagtggtgggatggtttgtaagtcattcatgcttgtgaggataatgcctttataatgacttgtaagtagattgagagcctccagagttaactcacgggaaaaggctgtttatctgctgcttaggtttctgctgaacactgcagacaatatattcacttcttttccatgccatttaatgacatttcacatatatatcattttttggtactttgtaaaaatattattttgcctgtctggggaaggggtcaaacatcgtaagaaggttagctttgagagatgacttgatggtctatgcacaatatcatcaagactaaccaccaccaaaatgatcacaatcaccaccaccccaggggcgatgttgtacaagtgaggacgctttcactaggttatgctgtggtaacaaacaactcccaaatgtcaatcatttaagacaagaaaattttatttttctctcatacaaagttcactctgcaaaactctccagagtagctttcctccataggtgggttcagcattccaggccatttgagtcttatggaatctctatattatcacacatttccataatctcccaggcaggaaaacagagcactggatagttctgtgctgaaaattaaatgctcaatcctggatgtggcacacatgtgttctgtccaaaccctgctggccagaactagtcatagagctccacccaactgcaagcttagctgtgaagtttaatcctatcatacactgaaaagaggaagaaactggataaaggcaagtattacagtccactttaataygaattattttaaattttcaaagtaactttatccagcaaaggttatgtgttcatattaaagatgagatgcaatgtggattaggtgctgagagcataggttttgagtcagtcttgaacccccaatatataatctgtggggctcaggcaagacaaaattcctaaacttgtttcactttttgttaaattgggataaggttatacaccttatagagatggtttgaggcatacatgcaatagattaaatgggtagcatagtttctgacacgttaagtgctctaaaaactttagctcatattattaaaaggcaactaattatcagatgttaagaaatatatgtctaatgagtgagggaataattcatctcacatatttcaattgaacaaatcaactcagaaggcacaaatttttacactgggttcaaaactctcatttctctaatttcaaggctctcctttttcccattgtatcacagtgcctcttgtgatatagaatgaattagcaggttgggcccaatttttatgaacagtccctctccctaacccagcctctccatttcagtctgactctatgcatgaaaaggactttggtttaatcacaattgctcaaa

SEQ ID NO: 713646 - DNA, 1345 bp, Homo sapiens
gttaaatacactgtcttcatgaagcaccaaaatgaatgctgaatatatttagaagtaagagagacttattattgtgtcttgtctatgtcaaagcctgtctgtttgatagggaaacatttcatactacttcaatcccggacttgactcctcaaggagcaacctcagacaacctagttagagacatggcaaatttgggctagccctatgtgctctagagtttggactggacttgctgtctgtggagactgtaatctgaatcagataaattgcttgacatcagtttctttattatttctctgtttaaagtgtgtgctaaaatggatgtaatgttatacctaaatagaatgaataccaaaggagggacctccattgctaataaaaagagtacaatccacaagcaactaagattctgctctcaaacatttccctacaatttcctcagaggcttaaactgagattctgtcagacttggagaaaggaggaattccaagaatgagggggctctccactaaaaataaatgttcttaccaggtcttgagagagttcagattcaagctcgagctggtctgtaaaactcaagggtcagaggttcaagaggagaggagtgattgtcatgttcaggccatatatagcttgtcaccattgtcctgtttaagaaatttcaagcatttcctcttcctaacggagagagcgcctaaagaaccaaacttgtgtttaaactatttactatttcagcaaaaataaatgagcttcagagttaaaaataataataaagaaaggtggaaatcatctaggaggggaaaaggagtctgttgaaatgtctattatcttgtggtatatcagcacattaaacatactcctatgcattataagataattaaaatcaagaaaggatctagcttcattttcaagtacagaagatgattgctcagagcagagcaggtctaaatagttttgaagcaacatatcagaaataacaatattcttgttcataccagctgtatggtataatattattaccctgggatttttcattcttttaggtcatgtgtgtgtggggggagttgtgtgrcttacatacataaataatgtttcatactcaatatcctgttggctattatatagtgttatatgagaatgagatatgagtttctgttttctactatttaaaggaatacaccaatttattttattttattgattcttgtcaatgcaatgttaatgctcttaaggtgagaaataatgttttcattatttgtgaataggtaagaaaatttgtgtctggcaatgagcaaggagtcttcagcatgtttgaattaggattgactgtataaacatctagcaa

SEQ ID NO: 713647 - DNA, 888 bp, Homo sapiens
tgggaatacaagtgcaggccaccatgcccagctaaatttattatttattattttattatttttgtatggataaagtcttgctatgttgcccaggctggtctcaaactccttggctcaagcaattctcccacctcagcctcccaaagtgttgtaattacaggtgtgagacactgctcctggcccatgagtttctcttaaggtggagaggacgcccccacagaacctgattgtagatgcttccatagctccaggtcaattgggcaggagcagatggggacagataacactaaagacatggccatgataacatctatgacagcagttcttaaccttgtctataattacaatctcctgggatttttttattattattatttgctagtacccaagcaacaccccagactaattaattcaaaatctttgagggtggcccccaagcatcaatactttttaaagctcccagaacaattytaataagcagctagtactgaaaaccaccagtgacagacttagcctgtttctctcagcatttgaatattttatcccataatgtagaaaatggaatttaatgaaaattatacctgtaaagacatattaagtagttaagtatgtatttgctttgaagaccagaatgtatgcatacgcatcattatcttacttcaaaatcaaaatatatttccagtgtcacaattcaaaaatgttaaaagatcttccatgtcatctaaaaagaaattcattgacattcaagaacttaactgatcatatgcatatgatcttggttcctgggcaaaccgtgaccttgattggtcctgcaatatcatccattacaaaggtagctattatccaactgtcacctaaatataaagcatctcctattaaggtgataca

SEQ ID NO: 713648 - DNA, 1593 bp, Homo sapiens
acagcaggctgccacagctgtggggctggctgcccctccccttgggagctcggtaggcttaagcagattccaactgaaaggctgttgagaatctgcacagctcctgggttgggatgctaggccctggtggcgtggtttcacaagtgggatcttctgctctgtgggttgcacagttccatggaaaaagcatggtttccctagctgggtagcacgctcactcaccacctccctagctggggtgagaagactcccttgccccatgtggttctcaggtgggccactgcaccacactgtccttttttcctctccaaggatcacaccagcctcctagtcagttctgatgagagaatctggataccttagttgctggtgaaggattcacatgcttattattattcacatgcttattgttattattcacaagcttattattatggttcttttcaatgagagcctccaaacactgctctttctagatggctatcttggccccaccccaccaaacataggtctttaatacctaattaaggtccaggagaaaatcattatctccttgggtaaataataatacagtctattttaaaattaaataaaaatattcagtagcctgtgcccagagtgaatggaataactgctatgggaagatggataagggtgagtcaggtcagtttcaaggtcttcattgaagaagaatagcagcaactgagcattggcatctcagcctccctgagcacaggaaaggaaatagctgtactgctgggtttgttcaaaaattataagatattgaaattagtatctcctgttttgacaaattctaaaagacagcaatcatttctcttgctctcaacattttctgtaagttgtccaatgtgattcacctgaggcccagcatatgtcattccacaagacagattgcagacgcagtggccacaggcactgggcattgatgcaccaagtcagttccacatgagaagatgccagctctctttccagtgagccagtcttggaatcagaggctgaaattagagtttgaagttgatcttggagtcattaaaccttctacttacactggtgggagttaaaggatttctattaaactgattttacagacattttattaaatcatttgaccagtttaagaagtatgttctgcattacacaattcctactctagtggaaaacctgccttcaaaagactgacaaaggaaactaaccccttgtcacaagacatgtcaccaattgaaaacatactgctgctgggatttgctggctgttgggatagtttattgtggaataaaatgagattaagatatacatttcacatatgacaataataaagcttaccrgttggctttgcatgaatagaataagtgcctgtctggtttgcatgatgtgaattgtacttgttgacttacttttccaaatcctcattaccccttccccagtggtattgtctgaaagcctaaaatgatcatcatgcacattattgtttaatagtttcataatttacttgatcatatcttactgtgcatggcatatctttgccataattgggcatgaacagcctacctatgttagcatgaaaatcaaaaa

SEQ ID NO: 713649 - DNA, 1593 bp, Homo sapiens
acagcaggctgccacagctgtggggctggctgcccctccccttgggagctcggtaggcttaagcagattccaactgaaaggctgttgagaatctgcacagctcctgggttgggatgctaggccctggtggcgtggtttcacaagtgggatcttctgctctgtgggttgcacagttccatggaaaaagcatggtttccctagctgggtagcacgctcactcaccacctccctagctggggtgagaagactcccttgccccatgtggttctcaggtgggccactgcaccacactgtccttttttcctctccaaggatcacaccagcctcctagtcagttctgatgagagaatctggataccttagttgctggtgaaggattcacatgcttattattattcacatgcttattgttattattcacaagcttattattatggttcttttcaatgagagcctccaaacactgctctttctagatggctatcttggccccaccccaccaaacataggtctttaatacctaattaaggtccaggagaaaatcattatctccttgggtaaataataatacagtctattttaaaattaaataaaaatattcagtagcctgtgcccagagtgaatggaataactgctatgggaagatggataagggtgagtcaggtcagtttcaaggtcttcattgaagaagaatagcagcaactgagcattggcatctcagcctccctgagcacaggaaaggaaatagctgtactgctgggtttgttcaaaaattataagatattgaaattagtatctcctgttttgacaaattctaaaagacagcaatcatttctcttgctctcaacattttctgtaagttgtccaatgtgattcacctgaggcccagcatatgtcattccacaagacagattgcagacgcagtggccacaggcactgggcattgatgcaccaagtcagttccacatgagaagatgccagctctctttccagtgagccagtcttggaatcagaggctgaaattagagtttgaagttgatcttggagtcattaaaccttctacttacactggtgggagttaaaggatttctattaaactgattttacagacattttattaaatcatttgaccagtttaagaagtatgttctgcattacacaattcctactctagtggaaaacctgccttcaaaagactgacaaaggaaactaaccccttgtcacaagacatgtcaccaattgaaaacatactgctgctgggatttgctggctgttgggatagtttattgtggaataaaatgagattaagatatacatttcacatatgacaataataaagcttaccagttggctttgcatgaatagaataagtgcctgtctggtttgcatgatgtgaattgtacttgttgacttacttttccaaatcctcattaccccttccccagtggtattgtctgaaagcctaaaatgatcatcatgcacattattgtttaatagtttcataatttacttgatcatatcttactgtgcatggcatatctttgccataattgggcatgaacagcctacctatrttagcatgaaaatcaaaaa

SEQ ID NO: 713650 - DNA, 1829 bp, Homo sapiens
gactatccatggcacacatctatcagattacaatcatggaggccaattattgtgcataactaaagctgatgctagaagacagtttagccttggtaaatcacacatcagttcatgaagactcagacttggatttctatgacaatgttatcttagatctgaacaaacttgtgaagcgtagaacagagggcatttgttcagcaaaatctgtggttttgacactcccatttttagtgcttggtgaatgtcttccaaactcaaatgtccaaaagtgagagtgggaggcgagtgttgattaggtggagccagtgcaggtctatgtatgatccttacaaagctgagacaggtgacctatggccaaaggctgccattgatgggacttgtcagaatccccccattcttgctgcaatggagtcagtggacctgggccagtaagggatgatacattacaaatacatcaactaagtaagagaacagacataagatcacttaaagggcatgaagaagcttgttctgctgcaaagcatttcaggtcagtttaactataataacggaaacctccactgtcctaagtaaattattttattgtaaagacatcacaacactaatggctcctgttaaaagtcagttatcttcttaaatggaaaaaaaaaaaaaacatcattcattacaattcaggaagtatttggagtacctgctgtaggtatagtttgtactaagctctatgggtgatactcaataactgacaatgtagctgggaaggtaggcacataaacctgtgtcctgaaggatcagtttttatttttagttttttttttttcacttcatcacagactgataggaggtatttacatgtggttcatcaagtgagctcaaaagcacttaggctagtctgtaacttgtttaatgagagttgtttactagtcacttgtttggatgtcatggcaaagtcaaatttctatataaacatttttaaatggtcactctcaattgcagaactcatctcactactaatttctgaataaatctcactgtggactgtaaggaacagtttgagatcaacaccgcactttgagcagctcttgtctatcccccaaattattaactctggttgcatgttaaacacatctgggagctttaaaaatttcctactcttagtccccactttaaactcattacctctctggggagtaagcatggcatcaatattttcagagcatcagagtaaggttcttcaagcctaagaacttcaaggacaattcacaatgcctctattattagatacttaccttttcatactacacagtttatgtcaaaagccaacgtaagctactgactcctataagctttgttagatcgttactcacaagtgagtgaatttccttgtgttgaccaagtcaggcattagtatttagacaatagccagctagcaactggtttagatatctataaaaatatccttaagttgttctttaaaaatctttactatcttttttgttgttgtttttagggttaaaaagcaatataaaatgatktaagtagaaagaaaaagattatccgtaatccaactatttatacccaaaagatagccacagccaatatagtggtatagtatttttcatatatatacttttgcacaaaacatgcaaattttaaagttataattgtgtatgtacaatactatatccttttatacgtatcattatggtgaaacttatattaaaaactacacatcttatggttgcataattaaccaatcttttactgttaaaaacttggattatgtccattttccccatagtaacgcaggaatgttcattctatatttgtaa

SEQ ID NO: 713651 - DNA, 1829 bp, Homo sapiens
gactatccatggcacacatctatcagattacaatcatggaggccaattattgtgcataactaaagctgatgctagaagacagtttagccttggtaaatcacacatcagttcatgaagactcagacttggatttctatgacaatgttatcttagatctgaacaaacttgtgaagcgtagaacagagggcatttgttcagcaaaatctgtggttttgacactcccatttttagtgcttggtgaatgtcttccaaactcaaatgtccaaaagtgagagtgggaggcgagtgttgattaggtggagccagtgcaggtctatgtatgatccttacaaagctgagacaggtgacctatggccaaaggctgccattgatgggacttgtcagaatccccccattcttgctgcaatggagtcagtggacctgggccagtaagggatgatacattacaaatacatcaactaagtaagagaacagacataagatcacttaaagggcatgaagaagcttgttctgctgcaaagcatttcaggtcagtttaactataataacggaaacctccactgtcctaagtaaattattttattgtaaagacatcacaacactaatggctcctgttaaaagtcagttatcttcttaaatggaaaaaaaaaaaaaacatcattcattacaattcaggaagtatttggagtacctgctgtaggtatagtttgtactaagctctatgggtgatactcaataactgacaatgtagctgggaaggtaggcacataaacctgtgtcctgaaggatcagtttttatttttagttttttttttttcacttcatcacagactgataggaggtatttacatgtggttcatcaagtgagctcaaaagcacttaggctagtctgtaacttgtttaatgagagttgtttactagtcacttgtttggatgtcatggcaaagtcaaatttctatataaacatttttaaatggtcactctcaattgcagaactcatctcactactaatttctgaataaatctcactgtggactgtaaggaacagtttgagatcaacaccgcactttgagcagctcttgtctatcccccaaattattaactctggttgcatgttaaacacatctgggagctttaaaaatttcctactcttagtccccactttaaactcattacctctctggggagtaagcatggcatcaatattttcagagcatcagagtaaggttcttcaagcctaagaacttcaaggacaattcacaatgcctctattattagatacttaccttttcatactacacagtttatgtcaaaagccaacgtaagctactgactcctataagctttgttagatcgttactcacaagtgagtgaatttccttgtgttgaccaagtcaggcattagtatttagacaatagccagctagcaactggtttagatatctataaaaatatccttaagttgttctttaaaaatctttactatcttttttgttgttgtttttagggttaaaaagcaatataaaatgatttaagtagaaakaaaaagattatccgtaatccaactatttatacccaaaagatagccacagccaatatagtggtatagtatttttcatatatatacttttgcacaaaacatgcaaattttaaagttataattgtgtatgtacaatactatatccttttatacgtatcattatggtgaaacttatattaaaaactacacatcttatggttgcataattaaccaatcttttactgttaaaaacttggattatgtccattttccccatagtaacgcaggaatgttcattctatatttgtaa

SEQ ID NO: 713652 - DNA, 647 bp, Homo sapiens
tctttacaagaggcaacacacttgtcagtgtcagggtggtactgcccgctgccccatcctagatggcctggcccagttcatagttgggcagtttccaaggactgacctagktttcttgagtttgtttggtgagagtttttgtggtaacactgggcagcacttgatccgacagctaactaactgctaaaaaagaaaaaaaaaagtgtgagccactccacaagcactggatgaacactcaatgctactagaactatctaacctcagggatttttggttttgttttgttaacgtaattactaattgccttttctaacctgaatccatcatattctggctgattcacaaaaaagagtgcagcttttgattattattcattaccttaaaaaaaaaaccaagaaaactctaaaactatttgaagatatacaatgcaaaacaaaacaaaacaaacaatgaaaagaacagcagcaatgaaggcccacgattttggcttttatttcctattctaccaggggaataaacattttattcaccctgggatttagtgtaaagtgagctagttaacatttaacacaagccagatgctgtggaccttgtgctaattccaattcttctgctgcaggtgaacaacagtctcctcagcttattca

SEQ ID NO: 713653 - DNA, 647 bp, Homo sapiens
tctttacaagaggcaacacacttgtcagtgtcagggtggtactgcccgctgccccatcctagatggcctggcccagttcatagttgggcagtttccaaggactgacctagttttcttgagtttgtttggtgagagtttttgtggtaacactgggcagcacttgatccgacagctaactaactgctaaaaaagaaaaaaaaaagtgtgagccactccacargcactggatgaacactcaatgctactagaactatctaacctcagggatttttggttttgttttgttaacgtaattactaattgccttttctaacctgaatccatcatattctggctgattcacaaaaaagagtgcagcttttgattattattcattaccttaaaaaaaaaaccaagaaaactctaaaactatttgaagatatacaatgcaaaacaaaacaaaacaaacaatgaaaagaacagcagcaatgaaggcccacgattttggcttttatttcctattctaccaggggaataaacattttattcaccctgggatttagtgtaaagtgagctagttaacatttaacacaagccagatgctgtggaccttgtgctaattccaattcttctgctgcaggtgaacaacagtctcctcagcttattca

SEQ ID NO: 713654 - DNA, 647 bp, Homo sapiens
tctttacaagaggcaacacacttgtcagtgtcagggtggtactgcccgctgccccatcctagatggcctggcccagttcatagttgggcagtttccaaggactgacctagttttcttgagtttgtttggtgagagtttttgtggtaacactgggcagcacttgatccgacagctaactaactgctaaaaaagaaaaaaaaaagtgtgagccactccacaagcactggatgaacactcaatgctactagaactatctaacctcagggatttttggttttgttttgttaacgtaattactaattgccttttctaacctgaatccatcatattctggctgattcacaaaaaagagtgcagcttttgattattattcattaccttaaaaaaaaaamcaagaaaactctaaaactatttgaagatatacaatgcaaaacaaaacaaaacaaacaatgaaaagaacagcagcaatgaaggcccacgattttggcttttatttcctattctaccaggggaataaacattttattcaccctgggatttagtgtaaagtgagctagttaacatttaacacaagccagatgctgtggaccttgtgctaattccaattcttctgctgcaggtgaacaacagtctcctcagcttattca

SEQ ID NO: 713655 - DNA, 647 bp, Homo sapiens
tctttacaagaggcaacacacttgtcagtgtcagggtggtactgcccgctgccccatcctagatggcctggcccagttcatagttgggcagtttccaaggactgacctagttttcttgagtttgtttggtgagagtttttgtggtaacactgggcagcacttgatccgacagctaactaactgctaaaaaagaaaaaaaaaagtgtgagccactccacaagcactggatgaacactcaatgctactagaactatctaacctcagggatttttggttttgttttgttaacgtaattactaattgccttttctaacctgaatccatcatattctggctgattcacaaaaaagagtgcagcttttgattattattcattaccttaaaaaaaaaaccaagaaaactctaaaastatttgaagatatacaatgcaaaacaaaacaaaacaaacaatgaaaagaacagcagcaatgaaggcccacgattttggcttttatttcctattctaccaggggaataaacattttattcaccctgggatttagtgtaaagtgagctagttaacatttaacacaagccagatgctgtggaccttgtgctaattccaattcttctgctgcaggtgaacaacagtctcctcagcttattca

SEQ ID NO: 713656 - DNA, 1054 bp, Homo sapiens
tgtccttcaggctagaggataggcatagggtgggagacaagaagggaaataagtaggataaattgctggaaataatcagacttttcatggaagttagtacaaggtgcaaattcacatcaatatcccttttagttgggtgccagtgtcagaatagagagtatacaaaatgttgtggggataccatgagaagaactcactaggagagattaagaaaggcttcagtgagaaaatgacatttcagtttcatcttgaagatttatgatacaggcagttggtgagaatgtttcaggcacaaaagacgccaaaaataaaatcagaaagacaggaaacaatgcatttagaagaaagttggagctattttccagattcctgaaaagcagtagctgttgacttgggcattctgaaaagcctggacctggaattccctccagaaatctctggtactcacagtcttttctcctgctgccactgcaaattagaggaagtgatgagttgctaagagtcgtactagggagtcagcagactgtggcccctaaagattcacatcttaattttgttataaaaaacctttgcttataagactgaaatcactttaccttaaaccagagattctttcttcttgctcttctgcctttttgtgggaaataaatctactgcatcttttaaattggattctcaccattgtttagaaaacattgcactttttaaattgactcttgtcaaggggatcattatatgcccttaccaaaaattgccactttggtatgsaaagtattttgaactgaaggcaattgagaagcagcaaacattggaggaaaccctgtgttcccccttcctgcctaaaatcccagcatgtatttcctttctgtaaggaaagaaatagcatttctattttaaaggaaattgtcatttgtaaaggtatactcctttcttgtaggaagaggagaattactgtagactacgtaacaaggcttactaaataatccttatttatcatatgatatggtttggctctgtgtccccacccaaatctcatgtcaaattgtaatctgca

SEQ ID NO: 713657 - DNA, 1054 bp, Homo sapiens
tgtccttcaggctagaggataggcatagggtgggagacaagaagggaaataagtaggataaattgctggaaataatcagacttttcatggaagttagtacaaggtgcaaattcacatcaatatcccttttagttgggtgccagtgtcagaatagagagtatacaaaatgttgtggggataccatgagaagaactcactaggagagattaagaaaggcttcagtgagaaaatgacatttcagtttcatcttgaagatttatgatacaggcagttggtgagaatgtttcaggcacaaaagacgccaaaaataaaatcagaaagacaggaaacaatgcatttagaagaaagttggagctattttccagattcctgaaaagcagtagctgttgacttgggcattctgaaaagcctggacctggaattccctccagaaatctctggtactcacagtcttttctcctgctgccactgcaaattagaggaagtgatgagttgctaagagtcgtactagggagtcagcagactgtggcccctaaagattcacatcttaattttgttataaaaaacctttgcttataagactgaaatcactttaccttaaaccagagattctttcttcttgctcttctgcctttttgtgggaaataaatctactgcatcttttaaattggattctcaccattgtttagaaaacattgcactttttaaattgactcttgtcaaggggatcattatatgcccttaccaaaaattgccactttggtatgcaaagtattttgaactgaaggcaattgagaagcagcaaacattggaggaaacccygtgttcccccttcctgcctaaaatcccagcatgtatttcctttctgtaaggaaagaaatagcatttctattttaaaggaaattgtcatttgtaaaggtatactcctttcttgtaggaagaggagaattactgtagactacgtaacaaggcttactaaataatccttatttatcatatgatatggtttggctctgtgtccccacccaaatctcatgtcaaattgtaatctgca

SEQ ID NO: 713658 - DNA, 590 bp, Homo sapiens
ggtctaaattctatggaaaataaaagctcaatcccacayctctgttgaagattggattctctaacctcagttgaaagagtagtgaaaataaaagcaatgccaagcaaaatctatccgtaagcccttcattctatgtgatatttccattgtccataaatgttttattcaatcttctttggaaacagtcctcatgatggtctcgtccaaccctctccttttacagataaggacacgagagtcctgaaaagtaacagggcctgtatgatgtctctcaggaaataaatgttattcttacaagtatatgtgtgaaaaatgttatgctggaaaaaaatcatgatttacacatttgtcattcatctgaatgaaaacacatgccaattatctctgctttaagattgatttgtcaaggacctcagtcaaccaatactttaaaattgtttatttctacccttcatcattccaaaacagaatttgaggcacagagtcaatcagttcattgcagtaacattggccactgcacagctctttttgtgatagtgaaaattaatttttgcagctaaagttataaaacttcagaaagcacttgaata

SEQ ID NO: 713659 - DNA, 590 bp, Homo sapiens
ggtctaaattctatggaaaataaaagctcaatcccacatctctgttgaagattggattctctaacctcagttgaaagagtagtgaaaataaaagcaatgccaagcaaaatctatccgtaagcccttcattctatgtgatatttccattgtccataaatgttttattcaatcttctttggaaacagtcctcatgatggtctcgtccaaccctctccttttacagataaggacacgagagtcctgaaaagtaacagggcctgtatgatgtctctcaggaaataaatgttattcttacaagtatatgtgtgaaaaatgtyatgctggaaaaaaatcatgatttacacatttgtcattcatctgaatgaaaacacatgccaattatctctgctttaagattgatttgtcaaggacctcagtcaaccaatactttaaaattgtttatttctacccttcatcattccaaaacagaatttgaggcacagagtcaatcagttcattgcagtaacattggccactgcacagctctttttgtgatagtgaaaattaatttttgcagctaaagttataaaacttcagaaagcacttgaata

SEQ ID NO: 713660 - DNA, 1177 bp, Homo sapiens
gaggcaatgcctcgccctgcttcagctcgcacatggtgcgtgcacccactgacctgcacccactgtctggcactccctagtgagatgaacccggtacctcagatggaaatgcagaaatcacccctcttctgcgtcgctcatgctgggagctgtagacctgagctgttcctattcggccatcttggctcctctgttttgtatttttttagtaaagatgggtttcactgtgttagccaggatggtctcgatctcctgacctcatgatccacccgyctcagcctcccaaagtgctgggattacaggtgtgagccaccgcacccagccaataacaggacaaattctaagtggatgagaaatttatgtgtaaaaggtagaacatctaaaatattggagggaaaaaaccctgggtgaattaatctataaccaggattggagatgactttctagagcacaccttaaaatccaaaagtaaaaagtaaaagaactgccacttgtgattacatgaaaacaaatgcttgacatttgatccacgtgagttatcttaagcccattttgcagatgagaaaactgagattcagcgagatttaagtatgttgcccaagtttatacagttagtaaatggcagagatggaatttgaacatgtggcaattgcaactcattgcacactgagccacctaaatttttgttcactttaagtacacagaaaaatcagaaaataaacattttccagactctactcacaattgggaaatataatcatttgttgttgtcattgttgtagtttgtttgagtcttgctgggtcacccaggctggagacaagtgctgtgatcatagttcactgtaacctcaaacatctgggctcatgcaatcttcctgcctcagcctctggaatagctgagaccacaggcatgggtcagcacacctcgctgattttaaaagttttagtagagatggggtttcactatattgctcaggctggtctcgaactcctgacctcaagagatgccttgcctccacctcccaaagtgctgggattataggcatgagccactggacccaggctaaaatcttaatattgctaggcaaggtcccatccattcgatttagacttaatgtaaaggaagaattacagaagagctttaaaaggcatgagactctggggagaaagaaagact

SEQ ID NO: 713661 - DNA, 627 bp, Homo sapiens
gggcctctgcctggtgtagtgcacagcatggcagctggcctcattaaagcaagggaggaagggagagagggagggtgctgggacaagacagtgagagcagaacagaagccactgtctttttatgtcccatcccattacttctgcaatgttctgtgtagtcccctccatactcaaggagaggggtcccacagggtgtgaatgccaggaagtggggattgctgggtatctcagaggctgcctctcacaggcataaaggcaggcctgtgccttgttcacctgtcctggggtggcacacttcacttttgctatctgtctcatcaggtgaccacractgaccacggggacgctgggaaggcagtctagtggaggttcaggagccacaggatatggtgagaagagtgaccacagtcaggctctgcctcaccaggtggaagctcccttcctccaggacctgcaaggctccctgccctcatcagccccccagcctatgagatgctctgtctcacctgctggaaggtattttccccttcatgcttctggctaagatagtttgtacttcggattctcgctcttccactcaaacctagggcttgggtttttggaaacaaaatccataaattcttgcgg

SEQ ID NO: 713662 - DNA, 627 bp, Homo sapiens
gggcctctgcctggtgtagtgcacagcatggcagctggcctcattaaagcaagggaggaagggagagagggagggtgctgggacaagacagtgagagcagaacagaagccactgtctttttatgtcccatcccattacttctgcaatgttctgtgtagtcccctccatactcaaggagaggggtcccacagggtgtgaatgccaggaagtggggattgctgggtatctcagaggctgcctctcacaggcataaaggcaggcctgtgccttgttcacctgtcctggggtggcacacttcacttttgctatctgtctcatcaggtgaccacgactgaccacggggaygctgggaaggcagtctagtggaggttcaggagccacaggatatggtgagaagagtgaccacagtcaggctctgcctcaccaggtggaagctcccttcctccaggacctgcaaggctccctgccctcatcagccccccagcctatgagatgctctgtctcacctgctggaaggtattttccccttcatgcttctggctaagatagtttgtacttcggattctcgctcttccactcaaacctagggcttgggtttttggaaacaaaatccataaattcttgcgg

SEQ ID NO: 713663 - DNA, 627 bp, Homo sapiens
gggcctctgcctggtgtagtgcacagcatggcagctggcctcattaaagcaagggaggaagggagagagggagggtgctgggacaagacagtgagagcagaacagaagccactgtctttttatgtcccatcccattacttctgcaatgttctgtgtagtcccctccatactcaaggagaggggtcccacagggtgtgaatgccaggaagtggggattgctgggtatctcagaggctgcctctcacaggcataaaggcaggcctgtgccttgttcacctgtcctggggtggcacacttcacttttgctatctgtctcatcaggtgaccacgactgaccacggggacgctgggaaggcagtctagtggaggttcaggagccacaggatatggtgagaagagtgaccacagtcaggctctgcctcaccakgtggaagctcccttcctccaggacctgcaaggctccctgccctcatcagccccccagcctatgagatgctctgtctcacctgctggaaggtattttccccttcatgcttctggctaagatagtttgtacttcggattctcgctcttccactcaaacctagggcttgggtttttggaaacaaaatccataaattcttgcgg

SEQ ID NO: 713664 - DNA, 639 bp, Homo sapiens
tggtgggtggtgattccctcgctggcaccatagggatagccaaacaccagcactcgaccccgggcagatgagatcaatggcagtttaatagtcatgggtgctcataacccagtgtggaggaccctttctggggagaggtcacaggcctggccttgcttctttgggaaaggggcactgagaggttggctgtgactctctataagcctcagagaccgcttttgtcctcagctcctgttttcagaagatacggtcaaagtcatgtcaggaaaagtccattttcatgtagaaatatgtgcacccrtcggtcctaagggcactatgaggacctacccaggatacagtgaggacccggaatgctggatccagacgcttcaccagctcaccccgggaccccaggccggtcagtggctggccctggccctgaaagatacctgtggcaccccgtgattcctccctaactgcgctttgcctctgtgtgagtttcctggagctacagtgacgacatgttctgtttggaccgcaaatccagtggcttaaaacagcccaaattcattatcttacagttctggagctcagaccaccaaactcagcctcactagcctaaagtcaaggtattgtcggcagggctggctccttctg

SEQ ID NO: 713665 - DNA, 1216 bp, Homo sapiens
ccacgggtatgttcaggcacagaatgatccagaaatgtgtggcgtcagcagagccccagtcctgttttattgcaatttttcgttctcccgacctctgtatattgaaattgtcttcaggttcgcttctctcttggcagcagaaatggcttcatcaggtccacacttcacctctttacagtgcctccatcagagggagagagagctcccttggaaagaaataggaagcttctttcccagaaggcctatcagctatctcctcagttctcattggccagttctcacaggtcatttgcccaccctcagaccaatcactgtgtcctggagaataatggggtacactgattggcttaagctaagcagggcacacccctggagctgaggtggggtccatctcaacccaatcacttggttgacaataaacatgaaaatctgggctactgttggtgggaagagggaaaaatggatgctggccacccaaggagtatggtgtgttattctgggttcaatcaaagaagctgttcaaggggactaccgatggccaaatctggggctatttgagcctcagaatagatgatgacaagaacagatcgtaatccattgaataaagcagaatccatgaattcatacaaatacaaataatacatgaataaataaacaagggaaaaggaaacgtgctaccttacaatacaattacagttaataaatgtagacatagttgcaaagtatatcctactaacatatttggtatagtgagtatatcatatactaacttgattttttaaaagtgtttatttatttatttatttattctttagagacagagtctcactttgtttcccaggctggagtgcagtggcccttctcaggcatgatcttagctcactgtagcctcaaactcctggcctcaagggatacttccacctrggcctccagagtagctgggactacaggtgtgcagaactgcgcctggctcactaatttgatattaattaatacattccattattagttaacctgacagtggagaagcctgtcagctgatgaaagttactcccacctcccatggggcaagtcaatatcatgggcctcataatataatgctctgagagaaatataatactacttttccattgttcctgccgaaatgcaaaaatcatgaggaaacatcagagcaactcaaactgacattttacaaaatacttagcatatccttttt

SEQ ID NO: 713666 - DNA, 1216 bp, Homo sapiens
ccacgggtatgttcaggcacagaatgatccagaaatgtgtggcgtcagcagagccccagtcctgttttattgcaatttttcgttctcccgacctctgtatattgaaattgtcttcaggttcgcttctctcttggcagcagaaatggcttcatcaggtccacacttcacctctttacagtgcctccatcagagggagagagagctcccttggaaagaaataggaagcttctttcccagaaggcctatcagctatctcctcagttctcattggccagttctcacaggtcatttgcccaccctcagaccaatcactgtgtcctggagaataatggggtacactgattggcttaagctaagcagggcacacccctggagctgaggtggggtccatctcaacccaatcacttggttgacaataaacatgaaaatctgggctactgttggtgggaagagggaaaaatggatgctggccacccaaggagtatggtgtgttattctgggttcaatcaaagaagctgttcaaggggactaccgatggccaaatctggggctatttgagcctcagaatagatgatgacaagaacagatcgtaatccattgaataaagcagaatccatgaattcatacaaatacaaataatacatgaataaataaacaagggaaaaggaaacgtgctaccttacaatacaattacagttaataaatgtagacatagttgcaaagtatatcctactaacatatttggtatagtgagtatatcatatactaacttgattttttaaaagtgtttatttatttatttatttattctttagagacagagtctcactttgtttcccaggctggagtgcagtggcccttctcaggcatgatcttagctcactgtagcctcaaactcctggcctcaagggatacttccacctaggcctccagagtagctgggactacaggtgtgcagaactgcgcctggctcactaatttgatattaattaatacattccattattagttaacctgacagtggagaagcctgtcagctgatgaaagttactcccacctcccatggggcaagtcaatatcatgggcctcataatataatgctctgagagaaatataatactacttttccattgttcctgccgaaatgcaaaaatcatgaggaaacatcagagcaactcaaactgacattttacaaaatacttagcmtatccttttt

SEQ ID NO: 713667 - DNA, 2256 bp, Homo sapiens
  misc_feature 1507, 1508, 1509, 1510, 1511, 1512, 1513, 1514, 1515, 1516,1517, 1518, 1519, 1520, 1521, 1522, 1523, 1524, 1525, 1526,1527, 1528, 1529, 1530, 1531, 1532, 1533, 1534, 1535, 1536,1537, 1538, 1539, 1540, 1541, 1542, 1543, 1544, 1545: n = A,T,C or G
  misc_feature 1546, 1547, 1548, 1549, 1550, 1551, 1552, 1553, 1554, 1555,1556, 1557, 1558, 1559, 1560, 1561, 1562, 1563, 1564, 1565,1566, 1567, 1568, 1569, 1570, 1571, 1572, 1573, 1574, 1575,1576, 1577, 1578, 1579, 1580, 1581, 1582, 1583, 1584: n = A,T,C or G
  misc_feature 1585, 1586, 1587, 1588, 1589, 1590, 1591, 1592, 1593, 1594,1595, 1596, 1597, 1598, 1599, 1600, 1601, 1602, 1603, 1604,1605, 1606: n = A,T,C or G
attggtgcaagattttggttctctttcaggagcaagcttcatcgaaaaataaagttttactactttgcaagtagtgttacaggagtcactacaaagcaggtgccacacgaagatagccttgatcactcactacaaagtagctccttgtcacccgacagcctcatagccactgggattctaattcacaacttggaaagacacagaccactatgggtcatgggcctttggggttcctggtgacgactcaaatcagattgtaaaatacagaaagaagagtctccacccacctcagggtctggatgacaggaggaaaggtccactaagaagaaaagccatgggtacgaaagtggcgcagtttccttgatgcgcttagagctaaactccaaggctccacaggcccatgctgatcagcctcgtgcccagtaaacaggatcctgaaggcatttacccaggcccagctgggagaaaacatcacaatagagaatcagctccacctgtcaactctggtttcaaagacagcctttccaaaccttgttctcagtggcagagccattatgttttacattatttaagagatgggtcaagaatgaaattgtaagcataaaagtaatgaatgttacaaaacaaaaaattaaaaaatacatttgacaatagaaaatgctaaattcctatgtgtcgaaaaaaatccccaaacaaaattataaggccaatgacaacctaaaggggaaaacatttctaatgtataggataacatgtcaatgacttcaacacagggtcatcatacaaatcaacttaaaatatatgtcctttgtctgaggaagagaacatttgcagaaggataaacggtcaagaagtatttctaaaatgtttatccttactggcaaccagaaacacaaattaaataaaggtactgctttttacctaattgatctttatttttttaagataatacttagtgcccttgagagtaccataatgtaggccctttccctcggtgctgtgggagagtaaattccaggaaagcaatttagcaatacatatcaaaagccctactaatgttatctcctttgatcctgtaattgacttctgggaatctgtcctaggaaaatcatcagaaatgtggagaaaaatttttattccggaatattcactataatgttatttgttataatcgaaagaaagaaagaaaaagaaagaaagagaaagaaagaaaaatgaaaccaacctaaatggcaaaaatataagtaaaaaggcagggtagggttaaaataaaatatggggggggagaaatgattgagtattaaaaagtaccatatttttcaagaattattttgaatgaacatgtggaaatgtttcaaaatattagtcaaatcaaaaaaggacaggactcttaataaccacctgttttaaaaagaaaatttttactggaaacatattttacacaccagtcatacacttcacttaaaatgctcataaaaaagaataaggaaattaagctaataaacgnnnnnnnnnnnnnnnnnnnnnnnnnnnnnnnnnnnnnnnnnnnnnnnnnnnnnnnnnnnnnnnnnnnnnnnnnnnnnnnnnnnnnnnnnnnnnnnnnnnnatatatacattttcatgttaatatttatggagctacctctctaccattttattatcagcctcataatattccattttacaatgtggatggcccataatttattaagccagagtcatacagatattaagttatttctrattttccctattacaattaatgctacagttactgtttttgtacacggatcttactgtatttgtacaatcagttcccagcggtatagttgctagggtttgccaataggtgccccaaaagatgggcattgccacattgcttaccccatttatgaccctgttagtagtgagtgacgatgtctgattctcctacttttcatgggccctggggttttaatgaaatgctttgattttggaccatctgaaaggcctctttcgattcctgtatctttaattatgaatggggttgaatatctctctcatatattattggccaaatgtgaactgtctatatgttttgtccattttttcttttgagctgttccaaggccattttttttttttttttgagacggagtctcgctctgtcgcccaggctggagtgcagtggcgggatctcggctcactgcaagctccgcctcccgggttcacgccattctcctgcctcagcctcccaagtagctgggactacaggcg

SEQ ID NO: 713668 - DNA, 619 bp, Homo sapiens
attttagcggtagttaggatttcttgaaagtgctcacgattcttgaatgcccacataaaggggaagatactgggctatttctcattcagacacaatgaagaggaggcacttccctgtttcaggttcatgtgtcctacagagggagtacggagatgttactggaaaggaatcccaatccggaccccaaaagagggtccttggatttcacgcaaaaaagaattctgggcaagtccatagattaaagtgaaagcaagtttatttattaggaaagtaaaggaatgaaagaatggctactccataggcagagcgacctggagggctgctggttaamtttttttttttttttctgagacagagtcttactctgttgcccaggctggagtgcagtggcgtgatctcagctcactgcaacctccgtctcccaggctcaagcaattctctacctcagcctcccaagtagctgggattacaggcgtctgccaccacgcccggctaatttttgtatttttagtagagacagagtttcaccatcttggacaggctggtcttgaactcctgacctcgtgatccacctgccacgacctcccaaagtgctgggattacaggcttgagccaccac

SEQ ID NO: 713669 - DNA, 619 bp, Homo sapiens
attttagcggtagttaggatttcttgaaagtgctcacgattcttgaatgcccacataaaggggaagatactgggctatttctcattcagacacaatgaagaggaggcacttccctgtttcaggttcatgtgtcctacagagggagtacggagatgttactggaaaggaatcccaatccggaccccaaaagagggtccttggatttcacgcaaaaaagaattctgggcaagtccatagattaaagtgaaagcaagtttatttattaggaaagtaaaggaatgaaagaatggctactccataggcagagcgacctggagggctgctggttaactttttttttttttttctgagacagagtcttactctgttgcccaggctggagtgcagtggcgtgatctcagctcactgcaacctccgtctcccaggctcaagcaattctctrcctcagcctcccaagtagctgggattacaggcgtctgccaccacgcccggctaatttttgtatttttagtagagacagagtttcaccatcttggacaggctggtcttgaactcctgacctcgtgatccacctgccacgacctcccaaagtgctgggattacaggcttgagccaccac

SEQ ID NO: 713670 - DNA, 1938 bp, Homo sapiens
caaaaatgatttccaaccacatcactattggattctgaataattttcatactttcaaatagaagccagtatactttcctctctcctcccgcatgcgtgtgcgtggtgtgtgtgtgtgtgtgtgtgtgtgtgtgtgtgtgtgtgttgcagggctctttggcccttccccttgttctttgtttaataagatactgccctggtccctctaagtatgacatcttcatgaatcttgggtgaaaaatattttaggtcagtgccacctactactttcagatgaaatgaattgttgccattgaagtaaactttctgagaagcctgagtcctgtgtttaggagctcctgcctggggaagtctggaaactaatgtgggtttaatgttgttatgagccaggcggctgaactgagtaacaatacaagtctgttggacatgtcttctgggttgtcacgttcaatttgcacatgaccttctggccaaaaaatgggaaagaaatggtagaatgtgggactgaaagctcatattattgctttgacagcttcactcatctagaagtaatgcaaaatgcaatttatatttatacactctgacctcctgtgcagagagggaaagtatctaatgatgggccgaggtagtaaaggaagaaacagatctcaatacagctggaatttgtctacatttttgcttttcaaccattcaattacagtcaaaagataaatgaaacacagacagtacagtggtgaggtagtgacacaattattttatagtgactgggttctggctttgagtcttggcaaaggtggctgcatcacgccttatttcactggagacagataatctgcctgctcccaccggacaaagkcccctctgcttgtaggtgcgtcattatacccatcagagaggaaaaaagacaccagcgagtcagtgacactctggatctgcatttagaaattcttgagagaggctgacacgttaatcctattaaccaagataaatcaagtcaggcctggtggtaactggggcattattcactttcgagtggaaataggcggtgggcaaaaagcaccattttcttttgtgcaccaggaaatttactggtttttacatgtccctaaatagcttctctttgaatagaacctataagccaactggagagaatggatcctcaaatatatcctgagtaattctgaccagtattttaaaagaataccattttcagtaactgcagcttcatagtttctccaaaagtaggtctcacaggggaaagggattctggctttttccagagattaaagaggacagaaataatcatctttataaagtcagcagcacctgctaaactgatggtgaaataccactttaagatgtgcacattaagagcccagcttgagacctggaggtcaaccttcagaaataagataaaaagagaaatgagagatcacaataaacaatgaagtatagtatttctgaactgattgctccaacacaaatgcatttttttctatattctaattttttcttttttgggggatacaaaaacctctactacctatttttccaaatattaaacttctccttactatatctcaccattgcctgcagatgcagaaaacagaaatgttttttctttttaactgaacagaattgacttctttgtggaggaatgtcaaataaccacaactctcaaattgaatctttctatgttccctctcttatcacagtttatgacacagacttcccaccgtctccagttcccactctacccctcaatggaagtcatctgcggaattcagctggccaatttctccaggtttcctttagagaatagaatgtgttttgggttttgaaagtattgtttttaaggttttgctagcttcccagcacagaaagaaattaggagaaagtctgtgaattgggcgagaggagtgggcaaggaggtatgaga

SEQ ID NO: 713671 - DNA, 1405 bp, Homo sapiens
ttcttctgcctcagcctcccaagtagctgggattacaggcgtgcaccaccatgcctggctaatttttgcattttgagtagagacagggtttcactatgttgttcaggctggcctcaaactcctgccctcaggtgatttgcctgccttggcctcccaaagtgctgggattacaggtgtgagccactgtgcctggccctgtttcttgactttttaataatcaccaatctgattggtgtgagatggtttcttattgtggctttgatttgcatttctctaatgaccagtgatgttgagctttttctcatttgtttgttggtcatgtgaatgtcttcttttgagaagtgtctgttcatattctttgcccacttttaaatgaggttgtttgtttttttcttgtaaatttgtttaagtctcttgtagattctggatattgggcctttgtcagatggatagtttgtaaatattttcccccattctgtaggttgtgtgttcattctgatgatagtttcttttgctgtgcagaagctctttaatttaattagataccatttgtcaatttttccttttgttgcaaatgcttttggtgygaaacagttttttttataagaggattttctctctcagtttttaaaccaatctgtcttagtctgtttctgctgctataacaataccacagaatgggtaattcatgaataacagaaatcaatttctcacagttctggaggctggaaagttcacaatcaaggcattgactgattcagtatctactaaggggtcgctttctgcttccaagatggttcctcgttgctgtgtactccagagaggacaaacgctgtgtcctcacatgacagaaggggaaaagggatggagagctctctgaagcctcttttctaagggcactgatcacattcacaagtgcagagccctcatgacttaatcatttccccaaaggccccacctcttaatactgttgcattggggattaagtcttaacatgagttttgaagggacacagacattcaaatgatagcaattcccaaacatcatttttttcattttaaattagatcctcatttttatgaaattagaaatgaacattttcccaaagccattatgtttctgactgtttccatgaactttttttggtgacatccattctgttaagtcattcttgatttcttaaaataagagccagtgaaacccaagtctgaaacatcttatgggatcagatcacaaacttcattttcttctttgggtggcagtcttcttttttgaccactttactgcaaagaccaagagttgttacttctgatcacacatgggtgctgagaaggctgctaggatcatttgactatggaagacaacagaatggtaaagctgggatgatcatgtggatcattctgga

SEQ ID NO: 713672 - DNA, 1163 bp, Homo sapiens
atcactgcacttcagcctgggtgacaaagtgagaccttgtctcaaaaaaaaaaaaaagtttatttgaaaaaaaattgaggaagtagcatagcaaaatcttcagaggaaaggtagaactttgaaatggggcctccaacaatggcattatttggagaggccaatagaaagcatctgggattctaggaagggctactggcataagccaagtggctgagatgcagatgatatgcaaggtatatggctcagtcatgtttcactctaaaatccagcaaatcatttattcaccattttcgcatttcctcttcagtggcaggccatgtcctggatttaaagtggaagtcacaggctgggcgtggtggctcatgcgcttaatcccagcactctgggaggctgaggctagtggatgacctgaggtcaggagttcaagaccagcctgaccaacaaggtaaaaccccatctctactaaaaaaaaaatacaaaaattagccaggcatggtggtgcacacctgtaatcctagctacttgggatgctgaggcaggagaatcacttgaaccctaaaaaaagcagaggttgcagtgagtcaagatggcaccattgcactccagcctaggcaacagagcgggcactccatctcaaaaataaataaataaataaataaataaataaataataaataaataataaagtggaagtcacaccctcaagctgctatcagcttgttgtggaggccaatgagtatgtcacagtgttgggtgcagttttgtgatatgggttatttaaatgtaacacatgtctgggaaatagcaagattcattaagcctctgaggctcttgcataggtcataataatgtcctaaatgcataaggtgcaggctgaaattatgtgcctccaggacacccagcactctcctttttgtcaggcaaaaggaacagctccatgtggtcaccaaggtacatcatgttcccttaatttccatttccttttctttttcccccaggaaacccagggaagtaatcagagtcagtggcttcctcccacaactaccacaaaaccaaaacaggatttgctccaaccaggtcttctctgagcttatctaaagcctccacctycacttccccagcagaattttcaatggagtggaaaagagcctttgcaacaggac

SEQ ID NO: 713673 - DNA, 666 bp, Homo sapiens
taattctggtgaatttagtggtttgaaagcagaacattttttggtctttaaaaatcaataggctttatttctagaaaacacagttgcaacattaaccaaataaaaattgtaatgcgctgcccaaacataaccagttttacatagtaaaacccaaacacggtcaaagggcacatgcagtttagtagggattagttttactttatattacggacacattttgacagcatccctctttgtttctccacacccttaaatatatctgcataggagcccaatcatggctgtggatgcaacaacacctagtgttttgctgagaatcttctatgttctgkacctgtactaagaattccacactctttgctcgtttaatgccatggtgaacttaatcaattccctttggctggacactttcttttcttcttttctacgggtaggggcactattataaataatcatggatgtgcacgaaaatttaactatgtttattacaattttgttttattttactcagtttttaaaggtggattttcttgctggagagggaggtaattttgcaaatcagaattgacacagaggtcctcaaggcagctgctgctgcttcttaaccataaagctgtgctgtggccagttggaggttcgggacactcctggtccctcactttgagg

SEQ ID NO: 713674 - DNA, 3505 bp, Homo sapiens
agaggagtaaagcagttacagtaactaggacagtgtaatggtggtgtgagaactggcagctagatcggtggaatagaatacagtccagaaatagtcacgcatatagtcagttaatgtttatcagaggtaccaagacaattcaatgggaaagttcaattcagatttactctggtatcctcttccattattttttcacattttacatactagttattaaggtcagtctatttctcatttattgcctattaataaaccagagctgatacactgtgcactctccatatgtgtctgttgaatccttgaatcagaaaccaacgtgatactcaggacattatataccatttgtgtgtatatacaaaattgggatttggtaagtgttttcaataaaaggaatgctcacgtaatagttaaattcaaagacacaaacttctaggagccatttttagatacatggacaaggattaaattaaaatgtatacaatttttattgaaatctaggcagatggtgtgtttccagagataacttttctttccaagatacggctactgtggaatctaatatttgatgaatattagataaagacacagccagagactcatatcaaacgaggctccctacaactggaagggccgtaggcatgcatagcactgaagtaacactgattcattcattcagtatttattatgtatctacgagataccaagcacatacagtaatgatgaacaagacatacatcaccctgtcaccacttttctcatgtagaaattgcagaggatattttaaggcttcactaaaacaaatacccttttctagaatataaattagtagtgattacacactgaagatcaaaactctcacactccttgtgtatcctattagtgttatccaacagaaatttaacacatagtatgtatataattttatattttctggtagccacatttaaaaagtgtaaacaggtgaattaaattgggtaatatattttatttaacttaatgtatcaaaaatatcatttcaacatgtagtcaatcttttttaaattattaaagtaatattttaaattttttattttgtactaaaccttcacatttcagcatatacattacacttatagcacatctcaatttggacaagccacatttccagtgttcaacagccacatgtggccagtggctaccttactggacactggaggcttatgtgtgaatcagcccccattgagctacaacctgttgaagtttacaagtggactcccgataaatggagagctgatggtatttctggactataatgttagaggaaagtcactggatacagtgactttctgttatagctctataacgctccaccagttttcatctgcaagagtcccagagttttactatatttgaagacagatctatactaaagtaacactgatacattcattatttattatgtatctgcaagatatcaaacacatgcagtaatgatgaacaagacatacatgcatgtcagacatacatgcatatatgcaaatatgtacaagtggtcttgaagattttaatgttcagtgatttcactagtaatgagacagcttttgaggacctaaaaaaaatctctactcacatttctcaattgatatctgatggggaatgttgaaacgaaccagtagaccatatatcagttctctgatacacaaataaaatgttttcagctctaggttaatgagcctatgctcatttgcatgcttggcttccatttaaaattcttttgcatttcattacaataattttttccctctgctctaaggtcattgtttccattaagttatagtataaatccccttattttcaagaatatgatctctttacgacactatacacgaagatctgtgttttaaatttgatatggtttgaatgtttgtcccctccagatctcatgttgaaatgtgattcccaatgtcaaaggtaaggcccagtgggaggtgattggatcatgggggcagatccctcatgaatggtttaacaccatccccttggtgataagcgagttcttgctcagttacttcatgtgagatctgcttgtttaaaagtatgtggcacctctcccctcactctcttgctcccattctcaccatgtggtatgctggctcccagtcatcttctgccatgattgtaagcttcctgaggccctcaccagaagctgagcagatgttggcatcatgcttcttgtacagcgtacagaaccatgaaccaaataaacttcttttctttaaaaattacccaggctcaagtattcccttacagcaatgcaaaaacagcctaacccagaattctcaatttatagtatctcatccagactgcctctcaactggaatttagagaggtagtgacttggaaccagtttggacgtgtcattgttttaacacaaatgtttatagactcaacataaaattagttttttaatcttttacagtagggtttctctgggtggctggtaccacccatctccactccaacagaatcacctggggaggagaagcctgggcccacagctgaactggaatctctagaaatggtgttcgggaagttgcatgtgtaataagtaccaagggaaactcatttcacactgaagtttgacagccagtgccttatagtgaagttctaccttaatatcactaaggataaaattgcatactaccatttgaatctgttttattactggaggaaatgctgttttcagtacttatgtactttgtttactacctttgctgaacattttgtgtactgtgagtaaatttttaagggtattcattcagctcatagaaagtatgttgtgctttcttgatatgtaagttatgaatgatggattcaactgaagtctaattatattgatcatgaatggactaatgtctaaaatcaaattgactaggacctagatcatattcctttgtattttttcaagtgtagtctctgactgtgtcaggtaagatattcattgttttttatttttttctatgaaattgtttcaaatgtactttaattagatcataattctacagaaagccatcgagccagacacaagtactagggcttcaaaacagaattgaactcagtgtttgcccttgggaagattgcagcctctgcaaggcaggggtgaggggcagatatggaagccttgtgttaaaatataaaaccgtggtaccatggttttaagtaaagcaaggtaccatgggagtagagagaagcagggcaagggtgactatctgaaaaggctgggttttacaaagatgactgtgttctgtttgagtgcaagccagtcagccagacaagtgaagacattcccacaaggtcacccaggacataaggaataccagaacttggttctcctagatcaaaactkcactcatcaagctttctacaagaacctggccttcaagagcacactggcttcccttttctcacacccaaaactttctctggtagtaagatgttaagagtgatacatttccgtttcaggcca

SEQ ID NO: 713675 - DNA, 1552 bp, Homo sapiens
gtaaaccctcttccctcctgttgctagcccagaaggtctgaactaaccattgtatataaatgcccagctttgtttaatatgtgttagacccggggacaagtattgtaccccaaatgtccatcttgtaaattctctgggcacaaaattatgttaacaaatttgatcaacaaaagtgttacgatggtcttgtagctgataaagaaattagcaaaggcccttgcacacaccaccattccaccaaccccacacacaagtgggaggattcccaagcctccaggacctctgctttgcctgcagtctgctcctctcccctccactgggcatctgaggacatgccagtcttgtgtcacatgcagcagtatttcccttagtgtgtgctgggcatgctctctaaacccagggactctatttataaagccttctagttgattcagggaagggaatcctaattgcttcttcttgccatcgtcattttctttcctctctatctgcttttcactatttccccaatgagtcctggcaggtcctctcacatccttctcagctctcccacaaagaatgtcgtcgtgctgagttttctgtcttctctcttccctttctgtaagggataaaaattcaaaacatgtcctcaagcagagtagcttaaccatatatttgtagtttgggcttctggctccacatctgtagattctccccatatctccccaacagcttgtctcgaacagtctttgtttccctaaagtaaggtagcagtgcccctctctaagaaggttgtaaataatgaaaacatacatacacacacacacacacacacacacacacacacacacagatgcctctgtcatggctatgtttgtgaacttggcagagaagctcataatcacaggagcacaaagcctattgactcaacccggcatttcatacaattactgaatatatgctggttgattacatagacagtctctggaaatgcaagaacttgtcacattggagacctccaaggaggggaactgagtaagttggggcagagatgggataaagagttccttctcactgtacacctttctgtatcatgcatttcctatatttaaaacacactgacatacctatgtaatgtcaataggtaagggacaggcgtcctgatatgttggttacaccaaagtgatcatatccagtgaccgtaagccatgtgtgtcatggggctggctgatgttgtctgcagttgagggactaggcttagagcccagttctggagaacatgccatgcactgtgcaattagtcctttccactaggatttcctggttgggaagagctgagttcctcagcacacagtcctttactcttcaagtatttaggttgcacagtctacttgaggagccccyaaactgctatggatatattccagaagtcacttcttactttgacaaatactgcaaaatttttcagaggaagtaaattttcaacacactttaaattgcaaaagtacatctgatggagaagaaaaagtccatgtgatggaacaatctgagagtaataaagatgataacagtg

SEQ ID NO: 713676 - DNA, 539 bp, Homo sapiens
caaatatcaatttcctgaagtcacgtaactccaaatctaaggatctcaagtcttctagtgagaattccagaatatgtttcttatagatttgaggaagtaaatcatcttagaataactgtctcccttcctccctctctccctggtaccacatagtcttttctccattgcaaatagaggaaatgacaaaatgtgctatgttctaatttttatgaaatctgccatgatgtattttatttattatgaccctgagtcccaggttgggtttatggtattctactttctgcctatgcaattgacgagtattatgtttcctctctcttttggaaagtgatatgttttggctgtgtccccacccaaatctcatcttgaattgtagttcctacaatccccacgtgttgtggaagggacctggtgggaggtaattgaatcatgggggcaggtttttcccatgctgttctcrtggtagtgaataagtctcaaaagatctgatggttttataaatgggagttcctctgaacaagttctcttgcctgatgcca

SEQ ID NO: 713677 - DNA, 2893 bp, Homo sapiens
taaaaaaaaatggaacaagatactcagggatgtatatttaattttttaaaaaatattctgctctcattttaatatggcagaaccgattgctttctaagtgtggcttttttccagtaaaggttaattattaagaccactagtcctggcctgggtcaatcccagtatgatcctgggcaagtaaattaaagaagataacttctctgtgcctcagtttttttttgttttgttttttgttttttcatttacaaaatggagataattgtagtaaatcaaatttttagaggtgataggtttgttcatttcttgaatgcggtgatggtctcccaagtcacacatatgtaaaaacccatcactttaaagatatgcagtacgttgtatgacaagaaattgcttttaaaaggagcaaactaccttccagggttgttgtgaggcataaatggcaatccacagcaccacagcaaggattatcatgtgccctccagagacatactctcaggtggatgcgagaaatatccagctgttgcagcaacttcatcccactcgaaatccagctgagtcacactcacaggtggaatggagggcttcgagaggccatggggcaaggtgacccttccttatcatctaattacagaccttctcaaggtctgttcactgaacacttcgctgtagtgttcacttaggtgtaagtaggctataggactggacatttggatatttcatcagttcaaatagtcctgggcgtgctttagtttctcatgcttttgagcagagttttaaaataagccccatttgcccctacagatctcctgcctggtacagaatatgtagtgagtgtctccagtgtctacgaacaacatgagagcacacctcttagaggaagacagaaaacaggtgagtggtgttggcagtatgactatccagtagcttttgcctatcaattctgtataacaaatgaaatgctacttctaaaaatacatctccattttttgttgtcatggtgtgtgtacctttgtcatcacagtatgattttatcgctggtctcaaaaactaaaagataccttactcaacaatcacctagactttcagtcactaacaaattaagaaatttgttgtctgtccttttaaaaaacattttctaagaagatctttgttatttagatttagcagacattccttttcattaggcagctctgtctaatggctgacccaacactcattgtcatctatttgtcttcctttactaagccagcaagtttacattttctttttacttaataaaatatgcatttactagaaggaagttgaattgaatctcataaatattacatacttaaatatgaatgcttttaattttttctttcaaaaggtacactttagtgtattcattaactttatttatagtccacttgcttccaaaaaggacttatgatatcttagtttggtttcttattgaaaagaactagtaaatgctgtaactgaaacagaaatttgctggaagtcccagagactaagtgatttgaatttgcaacaaactctgaatttttgtgcatttttgaaaaatgcatttttcaaaactgtcaattcacgaggaattatcagcattgtaatttgtctgggataatgtctttagtttcagaaagttttgtgtttggcatcattaccactctgttgacatataaatttcctcttgagcttaggaggcttctctgagagtcaaacatttactttgagagtgggcagatcttgctttacttggaaggatacacttacaggatagaaacacagaatacttgaacactgaagaatttgaaaatgtcaattctcagaagatcttgaacacttatctccaaatgtgacacagaaacttactgtaataacccctaaaatctgcttgaattacttagcacaagaaaaaaatgaatgcttgagctggctattttgaattgagtcaatttaagattttaaaattcatatgtagcttagaatcagtacatcttactctttggtttatggcaaatcatggtattgatgagacaggaacgaaatgttggatgtacgttaatttcccctacaccttcctcacttcctaaactggtggtgtcttttcttttttttttctcttcctcccccgggtgggaaaaacaggtcttgattccccaactggcattgacttttctgatattactgccaactcttttactgtgcactggattgctcctcgagccaccatcactggctacaggatccgccatcatcccgagcacttcagtgggagacctcgagaagatcgggtgccccactctcggaattccatcaccctcaccaacctcactccaggcacagagtatgtggtcagcatcgttgctcttaatggcagagaggaaagtcccttattgattggccaacaatcaacaggtaacttttcttgtctgcaaagaaactcagaagactttcctacccagttggtagattctgtaaagtagcttgctgttgtctgtcatcagctctcaaaaaaaaaaaaaaaaaaaaaaaaaatagatcattgtcatggtacatggagagggaagtgagaaaatgtggagaaacatcttccttagaatatggtaaagaagcccgggcgtggtggcagtaaagaagataatttttttcctctcaagaaatttctcacctgatttgggtatttatgcatttctaataacacaagttttgttgaaaatgtaraaaattggccggacggggtggctcacgtcagtaatctcagcactttgggaggccgaaatgggcagatcacttgaggtcagaagttcaagaccagcctggccaacatagtgaaaccccatctctactaaatatacaaaaattagcaaggtgtggtggcatgcacctgtaatcc

SEQ ID NO: 713678 - DNA, 645 bp, Homo sapiens
ccaagtgaccctcacttttatccttgactttggatccagcaaagagaattgactcaggtcaagaatgctgtcattgtcattgggatagactactttaaayaaaataaatgatgtttatgggacattaaacatgtgacctttgcccttatatggctcatgctaaggagtctatgtggtgtacttgcacagacattcctggttcagaagagaaaatgtgtgtggggctaatattcccatcaaaatccaacaggagcttgggcacggtggctcatgtctgtaatcccagcacttcaggaggctgaggatggaggatcccttaaggccaggagttcaagatcagcctaagcagtatagtgaaatctcatctctacaaaaaatataaaaatgagccaggcgtggtgacacacacctgtaatccttgacacttgggaggtgaagtgggaggattgcttgagcctgggacttcgaggctatagtaagctatgactgtgcctgcctggggaacagagcaacaccttgtctctatataacagtaaataaatacataaataaaatctaactgggcatgtggccatagctgcagtgtttcccgacttcatgtgtgtatcattaattaagaatagtttgtattaggtgttaggcatt

SEQ ID NO: 713679 - DNA, 1179 bp, Homo sapiens
aggttgtctgtatactattaaaaattttggaccaaaattgctacctatcatctatctttttgattgcagggaatccctgccaaggtaacytgacagtcggcctaattctgttgacagaaaatgaagccttgacggttctaattatccaaaagtgggttttcatcaggacgtacagtcagagtgtgagtgcattctaatgaaaacttcagccctcattcaattgcatataaaagccctcaaagagaacatacagtacagcagttttgtaaaaggcaacaatacgatttgtacagaccccgacactccaatcctatagatcaccacgttgctcctctgtccccagcaccccttatttcttaagcagcaccaccagtccccagaggacaagagcagctatatctcatccacctatgcatttctgcaccagcgatgcaaaaaacaccctgggtgggccacagagaaaaccgtaactatggatacccaaggggcagagcagccagctggacctgctctgtaattcacttacttacttaccagagggtggttcaagtcaaacaaacaaaaccaaagacagttgcaacccatggtggatccaaaggtacagtatcaaaatcatggaactcttgcccaaagaaaagactgcaaatagtcatctggtatatcttgtggaaagatgataggtttatagtgactcaaaatattttagaaaaatttctgtagtgtcaagttctttcaaacttaaaattttaaccccagaggattttcgctgaataaatgagaattggctctatttcttctacttctggatagcccgagtaaaaatactaataatttctagattttagtggggaactacaattattaggacccatggatattgctgcagttcaaatacaatacagtaattacaaaatatagaccatctctttacaaatacaaattatagtatattacaagtcatgtacagtaaatctataattttaaacaaactagtgtatctaagtttacctggttgcgagtgcattattattccagtttacagttgcccttagcgtgacagtcagaaaccgaccatcggagtgatattctcttatgtaaactggcgtcacatcacagaaaaccttatttatgaggtcccattgccctcgcaataatcactggtagctgggttctgactta

SEQ ID NO: 713680 - DNA, 1824 bp, Homo sapiens
tatgtaatatatggagagagttcaccatacactggtatagtatggtctaatattttaccgtagtattgctgcagtatacatattttaaatgacagatttgacagaaataccttttatataaagagcactgctcctttaaagatataacttaatttggggcactcactgaggagctaaactactctacaaacaccaaattttgttaacatgtgaatgcataaaccctttgaagaaaaggggattatgcaattatcccagttaactgaatgtcttttatgcatcacagttgaattcatgatttaggccttgtagagtttcccaactacatcaggagaaggggaagactctagggacacctatagatcagaacctgaaagctaggcgtggtggcgcatgtcaatagtctcagctactcaggaggctaaggtgggaggatggctggagcccaggagttctaggctgtagtgagctatgatcaggccaccacactccagcctgggcaacagagcaaaacccatctctttaaacaaaacaaaacaaaaacaggaaaagaacctgagatgcatcccaaactgtgccaactccaagtaggagcatcgctcactctggaacatctttttccccctctgtcttctgcttcatgcttccctccgtggatgggtcttcaccacttattcacagcttctccctctcctaaccccagctttcccatgatcaacagcaccactcctggcctctccctcactccatgctacctcatgaccctccccattctcttctcattcccactcttgatcttagcttcctaactcaatagagatgagtctggctcagctgagttcacagagcatgccacataggtcacgtacactgtatagagaaggtttgttgctgcatgtggcacccacatcctggcccaagcagctgtggctggaagagcagggaagcagagtcgagtggtgcaaaataaggccttctcctctcctttttcatgcagcaaggtaggagctataatcatgtaaactacaaagcctagaaatttaaaagggctatttagaaaggaaagcaagttgaattgaataacagtgcctaaaggttaaagaattgaattggccaaaaaacaaattttaacgcaacatactttgccaagataaaatgcaaaaacatcaaatacatcaagccaaagatcattgttaagaaaccagaaagattcccaaactcaaatttagaaacgattcatgagatgacaacaaatcattactgtaaatctcctagatgaaatttaaaaagtaaggtaccaaaggtacaaacttcaaaatgataaaccttagtgtgattctgaatctatttaaacaaaatacaaagtactacaaaatccatacatttatttagtatattaatttgcccccagccttttggttgtccctctaatatgccacaatgaccctaattcagagccctacttagcaaaacttacagttttaggcagaacctctctcactatagatgcatagcccattaatgtgggcatgataattgccgatttaaataaaaacatttatcttgtattaatagtagccaagcataaagtcagaatatcgctaagttctggctgccaccaacaacctgtataaacttgaaaaaaaaaaatcaatctacgactatttagaccacgatatccccgactagaagaaaaagacaataccacatccagctttaaactgcatygattcttctgtgaagtcattttaaatcagtaaagcttaaagttctttactacatgttactttagccagattaaaaggcactacacccagcccatca

SEQ ID NO: 713681 - DNA, 904 bp, Homo sapiens
cagtatctttggggagagaatttggctgttctttacttcctgctgtggatttttctgtaatttttttctttctataagtatataccatttttacttaaaaacagaaaggaaagaaagagagaaagaaggaaaaaggctatgtttccaaatagaatattaacctacgaaaagaaataccttctgttgtatttaaaactagcatgtcaaccccctaaaattgactgtagtatttaatttaaaaaaaatcaggaacaggcaagaaagaaagaacatatatctcccaactacagcactacctacttgttaacatttttcacaagaatctccatggcctaaaataaaattgtttctcccgtcatttcggctatgagtttcctaagaagttctatacaggaggcacagagatatcatgctagtctcaatcaaaatgttccagacacatgagactaaatataaagggttaatagtaataagaggttatacatgcagaaggaaatccataccctcatttttaggtaatgaatatccaaatacaatgcagacagcctgcaagaccctaaaaccttttttaaagaatatatgatagtcataacttactagaaaatatggtaaaactgttactatattatggagacttttagcccaaacaaataggtcatttactaccactacaagtcaggataaatattttgcaatcttatcccagctgtgcatgcttactctatgtggaaggaaaattatatttattagcactttgccccaatatgatcaacrcatttaaaagatgctgacttttaaactgttagccttcaaaattagtctgcatttcccatctattagtaaatggcataatactattcttaggaaaagctggcctggacaagtagtggaaaacaaaaacgaa

SEQ ID NO: 713682 - DNA, 904 bp, Homo sapiens
cagtatctttggggagagaatttggctgttctttacttcctgctgtggatttttctgtaatttttttctttctataagtatataccatttttacttaaaaacagaaaggaaagaaagagagaaagaaggaaaaaggctatgtttccaaatagaatattaacctacgaaaagaaataccttctgttgtatttaaaactagcatgtcaaccccctaaaattgactgtagtatttaatttaaaaaaaatcaggaacaggcaagaaagaaagaacatatatctcccaactacagcactacctacttgttaacatttttcacaagaatctccatggcctaaaataaaattgtttctcccgtcatttcggctatgagtttcctaagaagttctatacaggaggcacagagatatcatgctagtctcaatcaaaatgttccagacacatgagactaaatataaagggttaatagtaataagaggttatacatgcagaaggaaatccataccctcatttttaggtaatgaatatccaaatacaatgcagacagcctgcaagaccctaaaaccttttttaaagaatatatgatagtcataacttactagaaaatatggtaaaactgttactatattatggagacttttagcccaaacaaataggtcatttactaccactacaagtcaggataaatattttgcaatcttatcccagctgtgcatgcttactctatgtggaaggaaaattatatttattagcactttgccccaatatgatcaacgcatttaaaagatgctgacttttaaactgttagccttcaaaattagtctgcayttcccatctattagtaaatggcataatactattcttaggaaaagctggcctggacaagtagtggaaaacaaaaacgaa

SEQ ID NO: 713683 - DNA, 672 bp, Homo sapiens
tatgaagttagatatcaggatagtgggaattgttggaagctggggagtcagtggctagttggggactttagggagacatctggtgtgctggtaatattctagcaatattctgattcttgatctgaataatagttacatgaatacattcactttgtgataattcaccaaacaaggaatgcatgattwgtacacttttatgtctgtatttattccttaataaaaagtttacttttaaaacctctcctgaggtaccacattcaatttaaattctgttactgattttagcttgattaatgcaacagatgtggccttataattaattaaatcatagttgtaatcaaagtcatttgcttattgatttatgtgatcattttgaaggtattttatcttcatttgcctttgacgtacagttgtcagagacctcatctacttcagctgaggtgactattcttccccatttctgtgtcaaagactcccaatgaatgtataatgcattagcagtaattttttttttacaaaagaatcttcaaaaaacatttaaaataaccaaatttatctgttgggtaaaggtgagtttctatatatctatttttttttctaagtaagatctatagtatcataaaatcaaatgctggtggttagaatagacaacagaaattatataatttaacc

SEQ ID NO: 713684 - DNA, 1318 bp, Homo sapiens
gtctcactctgttgcccaggctggattgcagtagcttgatgacagctcactgcagccttgacctccctgggctcaggtgatcctcccacctcagcctcctaagtagcttggactataggcatgcgccatcatgcccagctaatttttgtatattttgtagagatagggtttcaccacattgtctaggctgagcatgaatgtttactgtgctagttttttgttttattgagaataattcatatatcatrtagtttacccatttaaagtgtacagttcaatggtttgaaggtatattcagagttgctgcaccattttttcaaggtttttgggtatactggtcttgcatgcaaactgcacttaaagttacaacacagaaaaaattttatgcaaattaatgactaaacatgagagtgtttcaaaaacaacagctcatgcacaaaacagatctaagagtcctaaaaagtgctgcttctggcttcattcaaatatgtggcacgattccactttgtctcatgtgatgctctctaactagaaatgtgttgagtaaatcagacggctcatctctgcctgaaatggatgctgaatttagtgtgtttaggttaacatattgctacgctaaacaaattgttgacaaatgtgtaatagcttttcaagagcatagtgaaaagttgactgaatatttgctatttacgctaggtgtgtaattttaacaatttctatataaattcacattttggtgttttctgtgtttctaaaaaatgtgacagtaaattgtgagaacagaatgcccataatttaaaatggcagttggtaaaagagggagagtgagatttgttaaatttcaaatctaatgttaagggacttcaaatgacaccatttcactctacagaaaggaaagaaggatgagtatagtctaatttctgtttttgaaaaaacaaagcaattgatacaattaaaacacatagtttatcctttttaaaatcacaagaaggtaaaagaacacgtcatgtagcaagacaaattataaaacaagcaacctgtaaggaagccccgaaactgaaattatgaatgtggatataaaagtaaaataggaacacaacagtgtaatcccaggtttatatgtgtcatcacaaaatcataaatatagcagtttagtgaaggtcttattctgcatagaggatgaagctaagaaattgagtaacttgtgcaaggttgtgtccaaaatccatataaatatttgaaactgcaatgagtatcaatgtttttgctgttggcatcaactcacagcagatatgtggacttttttttttttttttgg

SEQ ID NO: 713685 - DNA, 1261 bp, Homo sapiens
gcactccagcctgggcaacagagagaaaccctgctgaaaaaaaaacaatagatatctttcttcacaygtgtggaaaaggaaaaaatattatctggtggtactgtattcaagttaaacgggcaatgaaataagttcattagttttacaagtcatataccttaaacaaggacaagaaaagtgctatccatatacagaagagtcagatagtcaaatctggaggttacataatcctaggtaataacagcccagactccatttttgatggttggctgctgacagcttttaaacctcacctctccctcttcccctctgcctcacatggggcaagctaatgagaaagcccagatgcttcttcctttggggcaccagtgagtttcaaaccacataagcccctatccattaaaagcctcaccccagacccactccctaactactaaacaacaaaacaacaacaaaaacaccctcaagccagtctcctttccctgtgctgtccagccatttctgacagcttgggaagcctgcccttctctcccctaaaagtttcattatggaagatacattcctggtgtccctatggtatcatcaatctttacatccaaaccaaattttgggtgggggcccatcccattgctgcatggtggttatgatatagaaaatgaaactggctcacaataaaatagccataatttacatatcaaacccaaatatgatttacatatcaaacccaaacctgttccaaattgccactaacttctggaaattttaaatctactatctcaattcaaaaactatatatatattacatagaaaaagttaatgctttggctaaaatgaaggtaaaacttctctcagtatattcttagagaaaaaaaattctcaaaggatggtcaatgtaggccaatgcaggggttcaaaatcatgtcttgaatttaaaaagagaaaaaaggattattttacaaaacctggaaaaaatggaaagatagatctctaaaaaaaagttactcaagtatcttagaactagaaaaaggctaaactcttaaatatttcttcagtacctcgttattactacaaaaacaatgacaacaattagcactcattttttttagctctcacttggccgtagcattgtgctaattgcttttcacacattatcttatataataacaatcctataagtagtattattatctgtattttataaaggcaataactgagacttatacatttttatcatcattttacaggaaagtaaagtgaagct

SEQ ID NO: 713686 - DNA, 1398 bp, Homo sapiens
atttatgtgagggtacaggagaaaagctggttgatgatgaatcaatttcccaaaagttccctgttaaagcgactgtttcttattcaccagtagattcccagcacctactccaatgtctcacacttaatagacattcaaaaaatacttaattgaaaaaaatggatggatatgtagatgactagatgaactcttgcatattctagtagatacatcactagatctgctgtcaaaaaattaagcttgcacccttgctttgttacttaatcattttatgatcctgagtaaatcagtgaacttctctaacagttttctaacctgtaagaggagatgacatgctgattgacttacagagttttgagcatcagataagaaatgagacaacagttttataaacaataggcactactttaaatactctgagaaaatcatttcaaaaactatttactgaaatagcaaattatattagtttgtaaacagaagcatattttcataaagaaacagttaactatattatctgcaaaatayatgcactcactaatacgccagggatgacagaccaatccatggtcaactgatagacagataaagagatagacagatgggaaggtgtgaggaggagaggaggagttatgttttccaacatttttagataatacgcttttctaagtagtatattagctacttatcaccatctaccatctttattttagttcaagaatttttaagatctaggaaaaagtttacagaagaggatttttttaaagaattgctaaaataatatcctattcactggaaacaaattatttttcaggtttcaaaataaaattataatatttcaaatctacagatattaacattttctggaaaaattaaaatcacctacttgaatggttttactataatcaagcacaccatccattgatccagaaggggtatcatcaacatgataaattctgcaaaaaagatcagaatttcaaagaaagtttaagtatagtttatactatttcataatctctagaataaacgattggacaacatcaattaatactgttatttaatataaaaattctgattattttagagagttctcaacacagttaaatcttaatgaagataaaaattatctaccaggtgtttactagttatataaatgatacgttcctgaaagctgtaccaaaaacatatctgaacatttcatcatatattcccgatgaatttcattaagcccagagagacattttaccttaccctccacttgaacatcagtaaagagtaacatctaattcactaactttctctgttgtttctccataatttctcttctatcaatgtgtttaataaaagtaaaatttaagtggatttaggaggttctaattaatgcaacttctgcgctgaagt

SEQ ID NO: 713687 - DNA, 1999 bp, Homo sapiens
aaaacaagctacttgggaatttataatgcttccttgttttttcatttgtacttttaagtatcaaagacacagttatatttttcagaaagttattttatagctttgaatattgcagtaatagaggctcccagagtatacaagaacaatttatgcagatgtaaaagaaccaactaacaatggatatgagaaaaatcaacggaatatgataaactactgcctgaggaaacaagaaagcatgaatactaaaggaaaaaagaataagttcatttccaaaatgaaaatttttatgacagatactcagttttctcacgtaaaacagaattgtaattatggattgccatgagaatcaagtagataatatacaaaacgctttctaaatgtcaaagtcctttgtagaaagtcttcaatataaaaatactttgtcactgcttttgcctaagccagtcaaataaggcttggaaatttggaaattgttaaagccccttggaagattcttataactaatcaggtttgggaacatattccagcagatatgcaatcaaagaagccattatctttattatatgtgtgcaatctcaggcttatatccaagtggttaacatcatagaacgactctttagagacacaagtcaaatgtgtgacttgactcataagtctgaaataggacccaagaatctgtattttaaaaagcctccaggtgatggttattgggaaactttaatttttttcactgtgtctgtcacttaatggacacttaagtgtgtatgtagctctagtatgagatccctaaaaagacacttaaaaatatgtctggttccaggtttcagtcagtcaccataagacattccttctagtgtatgtccttcctttagattgctatgccaatggcaaaatccatgttggggcttacaaggtgacttataagagagaatcaccatcaatgggaaccaataaaactcatgcaaatctgaaaaccaactgcagctcatttctgcagttgttcaaaaccatttccgatagtctccctgggcttggatgagagatatgcctcattctctgcatcccattaccagaatggtacagtcaacctgggaatcattkagacagatgcatccaaactaaataatgagtttaattcacaaggggaagtggaaaatatatggaattagtctctaaataaatgctgaggaatgggactctaaaccctccctagttggcatggttaattaatattgtagggtaaaatgcaactaaagcgggtaacagaataggacagataaaaggaaaccatcagagaaataacatgaagagcttcctctaggagtgatttcttaaactggggacaggcttcataggaaatggcacagtaatgtctgtgacatctgcaatttgactgggtcaatttttagttccgcttaaattaaggcttttcatttagataggccagaactgaagagatgctcttactgatgaaataaaataaataagaataaagaggttaacagataaacaagttaaacaaatgtaacaagtttttgttttcttcctcctgtctggcaccatggacagcaacaccctacaattcccatgaagtaggcagacttacttgccagtgaggaaagaggagatttattggatgtgatggaaatgaaataaatagaaagactatagataaatgcagaacagtttgaaaagcaagggccgttacattcttttgacacctacaggtttccactatctgctccctcccacagaagtcaattttattggcaatcatagccgtttatacttatattttaaaaactttaaatcaagattgtgtaatcaaaacacatatttccaataagaataatattaccaaggagagtggcagtcttaactaagagctcagtggccacattctcttgttttttgccatataatgaatacaactatatctaaattaaactaagaatctcatagccaatcacacaacaatttcatactatttagcaagcta

SEQ ID NO: 713688 - DNA, 545 bp, Homo sapiens
gggaaagatcaacaagtatcctactctgaaaactacaataatcatartgtgtcctattacgtgtgctatcacttgccaagtggtatcagatgctaagaacactggtccataaaactgcagagttctcaaactaaaattagtcctaaatgaatttaaatacatggcataaagcatttttagaagggactagaagtaaaaatcaataggattatagggcataacagtcaaaagtggttaagtggcctaaaatggtaaacacggttaaagtggttaaatggttaagttttaagtggcctaaaatttttacaaagaacaaagaaaaaaagtttgtcattttccagtatagtaagtccttacttaatgtcatctataggttcttgcaaagtgtgactttaattgatacgatgaataatgaaaccaattttacccaaggctaattcatataaataagagttaagttaccaggacatatttttcgtcacagacacatcacaaaacttctaactaaatgtcaaaacacttctaatattgaacattgaaataaa

SEQ ID NO: 713689 - DNA, 429 bp, Homo sapiens
tatayacacacacacacacacacacacacacacacatatatgtatatcattgctggttcacatccttggagattataagacattcatttttattggtcattacacatacatattacacacgttatatgataatgctcatgaaaataagggtatctggtagacatgcctaacagaatgagaatgacttctataacagtgcatgttcaaagtcttggacagaataactacatagttcaaggatatctaatgactttttcagaactaatcttttgttaagatggaaaactaccaactattatgattgcttaagagtcttacatttagctgaatatgttgctaaaatattgaactcttacaactggcatacagagaaaaaaacaaaagcaaactatgaaagatgtttcaccagctgtagtagttttgacatta

SEQ ID NO: 713690 - DNA, 722 bp, Homo sapiens
tttwaaaaatgttatttccgccaatatcaatttttcatcaggacacaccatctaaagcatgacttcccactgtgagagacttttctggcagctcaggttaaagaagtcattcagtaaaagagtgatttttgacagattcattcatttcctgtggtaacaccgtattgttaagttcacctccattttggtgtaaatatagaacgccgcaaaaatattcagcccagaatgatcaacgtgtggccccctttcaaactggctcttgcacagttttcggctgtgcaattagccagcaccttcttgtggagtcaggagacctgagctcctgttaggtactgttttgggaaaaagagtagggacattcagaggcaccatgcagcggtcacctgggatatgaaatgccagatcaagaggcctgggtatcagtaagcaaatcgtttaatggctcaaatccacatcactctataaaagagtgctatcacttttctggttagaataagaaaaggccttgaaagcaatgttcttttctgaatgacacatgtggctctgttagaggttagatttcagggtgcgtcatgtgtacttcaccctcatggcagactgtatcaccccccgctagaacacagaagcttccagaagagctgtcagctgaggctgggtccagctgtgcactgagaccttggcagaaagagctggcaacctggccctttgctgtcccagtcacg

SEQ ID NO: 713691 - DNA, 669 bp, Homo sapiens
atttaaagaaaaaggcccttttcccacttttattgctttcacttcctgttcctctttagtgtggaaaccaggagggtcaggagagaaagttcagagagagacagggacccgcagggaaagcacagacaggcccatcacagccttctcacatctcacagtgggcggaggagagacgaggccgacccacaagtgttgcctctaattcttactgagagctcaatgttgtcatttccattttagagagcagaaagttgttctaagagatcaaccactaatattamagctagtatttaaggaacgctgtgtaccaggaagctgttagacacacacaggtcattctcgctatgagaacagagactagtgttattcctgttttgcagatgatttaactgagacacagggagactctggagtcaggtctgtggcctcttaaccactgaatcatactctcttccaaaccaggctttgaaagcaaagggctactgatttcctgggcctgcccacccggtgctctctcctgggccgtctgccccagggccttcctggctcctgatgcagaggaaactttcaaggctggggcttcagggaccaacgccttcttcttcaaggactttgaagaaaaactggaaagtgtgacaaccctaaaaattcattcattcatccatttgt

SEQ ID NO: 713692 - DNA, 624 bp, Homo sapiens
tctttgtttagttagagaaacatgttgtttagcactaacatgtaagctgtgtagagcagaatcactaatgatttattggtacatrataatttacatataaataaaaatggaatacataataaaagagtgaaggagtgaacacgtggtcaagcaattaggtgagaattccttacttcacatatagccactatacatgtgagttttagaaaaaagaagcactctactctcgtaaagataaattttcttgttctatagtgaaaacatatgaaattattacctccatatcagtgccaggttacaacttctgtcttgaacatagtcttttgtcttcttgagaagcaattccacaaagtcaggattaccttttctggcaaaaacccagtacagaattgtattcacacatatttcagtgaagtcgaggttaaaacttacttcaaaacggtatcctgatttttccacaaatgcaatgtaatctgtgagtagtgcgtcaaaaccatccaagtccacatacctcagaatttttgccagtgatctgtaaatccttggttcgtaacagtgatatccccactgacccaaaaactgtagggagggtcttttaacaattttgtcaaggagattgcagaa

SEQ ID NO: 713693 - DNA, 1426 bp, Homo sapiens
tctattaaaaatacaaaaattagctgggcgtggtggtgcatgcctgtactcccagctactcgggaggctgagacaggagaatcgcttgaacccaggaggcggaggttgcagtgagccgagatagcaccactgcgctccagcctggcaacagagcaagactccatctcaaaaaaaaaaaaaaaagagaaagaaagaaattaatcaaatcatattttcaataaaaaatttaggaggttaatttataaatggtattttgaatgacaacagcacagataaaaatcaaaggaaacaagacaaattatggaaaagcaaccatcgaacaggtccttttcttactttccatttgctgttagaaggaatcaacctcacttcaaatgtagctacaagcagcaggggtatgattaaaagacatctgctctaaacttcctaatgttttgctagtcagtaaaacaaacagggtctctactaacaaatcttacggatgcaaagctatcaacggagcttctagaatacctcaacagcaaagcaagtacagagtaaaaacaaaaagccaagaaaaatcccaacaaccaaactacatggacacataccctaattacacaatgatctaagaactagacaaaacaaaaaaaatgtctgactttccatagcattgtcagaattcctggcaactctactgagcaatacctgacttctatatactcactcacttgcatatgtcctccatacactttatctcatttccttctacaattaatcttcaacattcacctttatgagtaagttcaccacaaaaatgtatttatttgtactacttaaaaacaagatagatacagtatgtgtgtcccgtcctctccactggtttaatccctggcaatatctgttttgtaatctataaaaattgacctactatttgtgcatcccatagggctgctgtagagattacatataagataggagaatgcctggtatgtaataaatattcaataaatgggagcatataatagctctaatgtttaggatcttagaaaacaaatgccctcaagtgaaaaaatgtgtattttattagtaagtactggcatatatcaagcatatatgtagtaggcactacactgaatgctctacacagatcacccagctctcacaaccacaggtagatatttctaagtacgttcttattacaaataagaaaagtgaggtttaataaaatgactaaataacttgcccaagatcasacacctaaattagaaatgaagtcagttatgtgatcgcaagtagtatgactccacagctctaagacttctctattaacatcaaagataaagactactttactgaatcttaaaattaattaaatattgtttatcatgttaagccaagaataattcaattagattagtttacaactaacaatatatgaacatgc

SEQ ID NO: 713694 - DNA, 662 bp, Homo sapiens
ttgtgtccactagggtggataactgcttgcaatttggaatgaaatccggaatccctcaaaaaacctgctgggtgaccttcrttagttcacttttcacaacttttctcatctataaaatggtggtattaacactatctacttaagattatgcacacttatactaatacctggcataaatgctaatcctttctatcattacatgcttttgtatttaaccccttggccttagcatctggatctacttcaagtggggtggtgacagcatccaaaaggttcacattgctgactccactacctgatttagtgtgtcagttttcttaggacccaaattgatgcggagccattgctctctctcaatgtttgcagacagattttacttgtttctctgagcatgatcaccctcataatggaatgactaagggcttcttccaaatgctccaggaatggtggaatccattaagaaaaattgtcagggagtggaaggatagaaggcatttgcaaatgcccttaactgaaaccacaaaggtgcagagcaggttagaggggagatgacttgctaattcagccccataatgagagaaggtggtttgcacaccagccaaactgatttataaagtggggtctaagagctcagtctttaatatcagagagaccttggatga

SEQ ID NO: 713695 - DNA, 662 bp, Homo sapiens
ttgtgtccactagggtggataactgcttgcaatttggaatgaaatccggaatccctcaaaaaacctgctgggtgaccttcattagttcacttttcacaacttttctcatctataaaatggtggtattaacactatctacttaagattatgcacacttatactaatacctggcataaatgctaatcctttctatcattacatgcttttgtatttaaccccttggccttagcatctggatctacttcaagtggggtggtgacagcatccaaaaggttcacattgctgactccactacctgatttagtgtgtcagttttcttargacccaaattgatgcggagccattgctctctctcaatgtttgcagacagattttacttgtttctctgagcatgatcaccctcataatggaatgactaagggcttcttccaaatgctccaggaatggtggaatccattaagaaaaattgtcagggagtggaaggatagaaggcatttgcaaatgcccttaactgaaaccacaaaggtgcagagcaggttagaggggagatgacttgctaattcagccccataatgagagaaggtggtttgcacaccagccaaactgatttataaagtggggtctaagagctcagtctttaatatcagagagaccttggatga

SEQ ID NO: 713696 - DNA, 662 bp, Homo sapiens
ttgtgtccactagggtggataactgcttgcaatttggaatgaaatccggaatccctcaaaaaacctgctgggtgaccttcattagttcacttttcacaacttttctcatctataaaatggtggtattaacactatctacttaagattatgcacacttatactaatacctggcataaatgctaatcctttctatcattacatgcttttgtatttaaccccttggccttagcatctggatctacttcaagtggggtggtgacagcatccaaaaggttcacattgctgactccactacctgatttagtgtgtcagttttcttaggacccaaattgatgcggagccattgctctctctcwatgtttgcagacagattttacttgtttctctgagcatgatcaccctcataatggaatgactaagggcttcttccaaatgctccaggaatggtggaatccattaagaaaaattgtcagggagtggaaggatagaaggcatttgcaaatgcccttaactgaaaccacaaaggtgcagagcaggttagaggggagatgacttgctaattcagccccataatgagagaaggtggtttgcacaccagccaaactgatttataaagtggggtctaagagctcagtctttaatatcagagagaccttggatga

SEQ ID NO: 713697 - DNA, 662 bp, Homo sapiens
ttgtgtccactagggtggataactgcttgcaatttggaatgaaatccggaatccctcaaaaaacctgctgggtgaccttcattagttcacttttcacaacttttctcatctataaaatggtggtattaacactatctacttaagattatgcacacttatactaatacctggcataaatgctaatcctttctatcattacatgcttttgtatttaaccccttggccttagcatctggatctacttcaagtggggtggtgacagcatccaaaaggttcacattgctgactccactacctgatttagtgtgtcagttttcttaggacccaaattgatgcggagccattgctctctctcaatgtttgcagacagattttacttgtttctctgagcatgatcaccctcataatggaatgactaagggcttcttccaaatgctccaggaatggtggaatccattaagaaaaattgtcagggagtggaaggatagaaggcatttgcaaatgcccttaactgaaaccacaaaggtgcagagcaggttasaggggagatgacttgctaattcagccccataatgagagaaggtggtttgcacaccagccaaactgatttataaagtggggtctaagagctcagtctttaatatcagagagaccttggatga

SEQ ID NO: 713698 - DNA, 689 bp, Homo sapiens
tccctaatgattagtgatgcagaacatctttttattttattctttattttgatttttaggtcattcatacgtctttagagaaatgttcagatcatttgcccattttttaattgtgttactgtttttttgttgttgagttgtaagagttctttatatgttctggatattatacccttatcatgtaaatggtttgcaaatattttctcccattctcttgtcttttcacttttgtgattgtgtctgttgacacacagaagtttttcattttgaagttcactttatctatttttttctttggttgctaatgcttaagtgtcatatcaaataaatcattccctaatccaaaatcacaaagatttacacctatgttttcttgtaaraagtttatagtttagctcttaacgtacttagatctttgatccagtttgaagtaatttttatatatgtgaggtacatgtaaggtaggagtccaaattcattctttgatatgagatattatcccagcactatatatagaaaagattattctttccccattgaattgtcttgaattgtcttggcaactttgttagaaatcaattgaccatagatgtatgggtttatttctagattcttggttctattccactcacctaaatttctgtccttatgccagacttggttagttttgaatccattttttagttaaa

SEQ ID NO: 713699 - DNA, 689 bp, Homo sapiens
tccctaatgattagtgatgcagaacatctttttattttattctttattttgatttttaggtcattcatacgtctttagagaaatgttcagatcatttgcccattttttaattgtgttactgtttttttgttgttgagttgtaagagttctttatatgttctggatattatacccttatcatgtaaatggtttgcaaatattttctcccattctcttgtcttttcacttttgtgattgtgtctgttgacacacagaagtttttcattttgaagttcactttatctatttttttctttggttgctaatgcttaagtgtcatatcaaataaatcattccctaatccaaaatcacaaagatttacacctatgttttcttgtaagaagtttatagtttagctcttaacgtacttagatctttgatccagtttgaagtaatttttatatatgtgaggtacatgtaaggtaggagtccaaattcattctttgatatgagatattatcccagcactatatatagaaaagattattctttccccattsaattgtcttgaattgtcttggcaactttgttagaaatcaattgaccatagatgtatgggtttatttctagattcttggttctattccactcacctaaatttctgtccttatgccagacttggttagttttgaatccattttttagttaaa

SEQ ID NO: 713700 - DNA, 689 bp, Homo sapiens
tccctaatgattagtgatgcagaacatctttttattttattctttattttgatttttaggtcattcatacgtctttagagaaatgttcagatcatttgcccattttttaattgtgttactgtttttttgttgttgagttgtaagagttctttatatgttctggatattatacccttatcatgtaaatggtttgcaaatattttctcccattctcttgtcttttcacttttgtgattgtgtctgttgacacacagaagtttttcattttgaagttcactttatctatttttttctttggttgctaatgcttaagtgtcatatcaaataaatcattccctaatccaaaatcacaaagatttacacctatgttttcttgtaagaagtttatagtttagctcttaacgtacttagatctttgatccagtttgaagtaatttttatatatgtgaggtacatgtaaggtaggagtccaaattcattctttgatatgagatattatcccagcactatatatagaaaagattattctttccccattgmattgtcttgaattgtcttggcaactttgttagaaatcaattgaccatagatgtatgggtttatttctagattcttggttctattccactcacctaaatttctgtccttatgccagacttggttagttttgaatccattttttagttaaa

SEQ ID NO: 713701 - DNA, 689 bp, Homo sapiens
tccctaatgattagtgatgcagaacatctttttattttattctttattttgatttttaggtcattcatacgtctttagagaaatgttcagatcatttgcccattttttaattgtgttactgtttttttgttgttgagttgtaagagttctttatatgttctggatattatacccttatcatgtaaatggtttgcaaatattttctcccattctcttgtcttttcacttttgtgattgtgtctgttgacacacagaagtttttcattttgaagttcactttatctatttttttctttggttgctaatgcttaagtgtcatatcaaataaatcattccctaatccaaaatcacaaagatttacacctatgttttcttgtaagaagtttatagtttagctcttaacgtacttagatctttgatccagtttgaagtaatttttatatatgtgaggtacatgtaaggtaggagtccaaattcattctttgatatgagatattatcccagcactatatatagaaaagattattctttccccattgaattgtmttgaattgtcttggcaactttgttagaaatcaattgaccatagatgtatgggtttatttctagattcttggttctattccactcacctaaatttctgtccttatgccagacttggttagttttgaatccattttttagttaaa

SEQ ID NO: 713702 - DNA, 584 bp, Homo sapiens
tcatgtgtttaatgggggaaaaaattaatgaagttgtcttaccaaaacagccagtgaaactcctctgaatggtacacattactaagtttttggttaatgcgatttttgttagattaatccttcaagaaggaaactattttaatgtaatttatatattttcctccccaagaattgaaaaagtatgggttcgagatggagctgcatatttttatggccccatcttcattcacccagaagaaacagagcatgagcccacaaaaatgttctacaaaaaagaagtatttctgagtaatctggaagaaacctgccccatgacatgtattctcggtaggtatttgtgcttttttatttaatcgtgtttattccatcaraattgatggaatactacttctgtggggcactgttctaggtgttaggtatagagcagtgcccaaatccaaatctctgttctcttatgttggggcagagattggggagtcagtcgataaattaaaaaataaatatatagaatatcaggtggtaattagggcacaaccaaacctttcacctcagccttccaagttgctgggactataggcatgcac

SEQ ID NO: 713703 - DNA, 594 bp, Homo sapiens
taagacagagagtattgggattttttttttcttttttagttctacatcctagggagaatttcaatcatacgtaagtgcagacagaattaggtactaatcatcctgtcccaacaaccatccaatccacaccccatctactcccacaacttttgtaagcaaataacagcccaacgttttatccacaaatgtttccgtatktatttctaaaagataaggcctttttcttaaactacccacatcgtcacactcgaaaaaaagtagtgactgcttgatattagatattcaattacgttaaaatttccaattatctcacaaatgccgcacatttaaaaattttttttattcaatcacaaatcatgtccatattatagaacattgggatttgaactcaggcctgcttccaaaacttgtatactgccaactttgtcatgctataagaatgcatgcatggagagagacaaggcagaaataaagcctttcttgtcctttaaatgtcctgctctacagtaggaattgttaaggtaggtaagtaaatagatgtcctgaaggctaacctctgaccttttaaaatctttgacatagatagttgagaag

SEQ ID NO: 713704 - DNA, 587 bp, Homo sapiens
ttccattcccaattgcgggcagccattaatctgtttctttcttcctagttttgcctttcttggaatgccaaataaatggaatcatacattattattattttgagagagagggtctcgctctgtcacccaagctagagtgcagtggtgtgattatagctcactgcaacctgaaactcctgggttcaaatggttttccccagtagctgggtctacaggtgcatgccgccatgcctggctaatttttatgtattttttttgtagaaatgggggtctggctctgttgcccaggctggttttgaactcctggcttcaagtgatactccatcttcggcctcctgaagtactggcattacaggcatgagctattgcrcctgggttatgtaaatttttcagtggcttttaaacctcatataatgtttgtttgttggtttgtttttgaggcggaggctcgctctgtcacccaggctggagtgcagtggtgcagtctcagctcactgcaacctccacctcctgggttcaagtgattctgctgtctcagcctcccaagtagctgggattatcggcatgaaccaccatgcctggctaat

SEQ ID NO: 713705 - DNA, 587 bp, Homo sapiens
ttccattcccaattgcgggcagccattaatctgtttctttcttcctagttttgcctttcttggaatgccaaataaatggaatcatacattattattattttgagagagagggtctcgctctgtcacccaagctagagtgcagtggtgtgattatagctcactgcaacctgaaactcctgggttcaaatggttttccccagtagctgggtctacaggtgcatgccgccatgcctggctaatttttatgtattttttttgtagaaatgggggtctggctctgttgcccaggctggttttgaactcctggcttcaagtgatactccatcttcggcctcctgaagtactggcattacaggcatgagctattgcacctgggttatgtaaatttttcagtggcttttaaacctcatataatgtttgttkgttggtttgtttttgaggcggaggctcgctctgtcacccaggctggagtgcagtggtgcagtctcagctcactgcaacctccacctcctgggttcaagtgattctgctgtctcagcctcccaagtagctgggattatcggcatgaaccaccatgcctggctaat

SEQ ID NO: 713706 - DNA, 587 bp, Homo sapiens
ttccattcccaattgcgggcagccattaatctgtttctttcttcctagttttgcctttcttggaatgccaaataaatggaatcatacattattattattttgagagagagggtctcgctctgtcacccaagctagagtgcagtggtgtgattatagctcactgcaacctgaaactcctgggttcaaatggttttccccagtagctgggtctacaggtgcatgccgccatgcctggctaatttttatgtattttttttgtagaaatgggggtctggctctgttgcccaggctggttttgaactcctggcttcaagtgatactccatcttcggcctcctgaagtactggcattacaggcatgagctattgcacctgggttatgtaaatttttcagtggcttttaaacctcatataatgtttgtttgttkgtttgtttttgaggcggaggctcgctctgtcacccaggctggagtgcagtggtgcagtctcagctcactgcaacctccacctcctgggttcaagtgattctgctgtctcagcctcccaagtagctgggattatcggcatgaaccaccatgcctggctaat

SEQ ID NO: 713707 - DNA, 626 bp, Homo sapiens
tgcatgtttatatttaagcttcttattaatgaaataaacattttctgtaagtgaaatgaacacccagaacatgtccttcatattttgcataaagctggtgtaaccattgtatcatcaaataagcatatctccaattcacaaaaacatgtatcgttcatttacwttcttctgaaaacactacttattctacccaatttatatggatttccaagtagcaaaagtgatcttctatgcaaaatttatgtattatctctgaaattattgctttgaagcacacaagatttaccccacccaattttagtatagaactcaaataagaggtaataattatcccataattgtttttacatagaatacttttaaaaatattaaagtcaaccatttccattattatattttttatcttaatttatttcactattttaagacatatagttgtattaattggaagtgacatacatttcaaatattacctagtttgttattattattattagtagtagtattatactttaagttttagggtacatgtgcacaacgtacaggtttgttacatatgtatacatgtgccaggttggtgtgctgcacccattaactcatcatttagcattaggtatatctcctaa

SEQ ID NO: 713708 - DNA, 626 bp, Homo sapiens
tgcatgtttatatttaagcttcttattaatgaaataaacattttctgtaagtgaaatgaacacccagaacatgtccttcatattttgcataaagctggtgtaaccattgtatcatcaaataagcatatctccaattcacaaaaacatgtatcgttcatttacattcttctgaaaacactacttattctacccaatttatatggatttccaagtagcaaaagtgatcttctatgcaaaatttatgtattatctctgaaattattgctttgaagcacacaagatttaccccacccaattttagtatagaactcaaataagaggtaataattatcccataattgtttttacatagaatacttttaaaaatattaaagtcaaccatttccattattatattttttatcttaatttatttcactattttaagacatatagttgtattaattggaagtgacatacatttcaaatattacctagtttgttattattattaktagtagtagtattatactttaagttttagggtacatgtgcacaacgtacaggtttgttacatatgtatacatgtgccaggttggtgtgctgcacccattaactcatcatttagcattaggtatatctcctaa

SEQ ID NO: 713709 - DNA, 612 bp, Homo sapiens
gatgaaaagaaaagaagtaaaaacacctttaacctagctatccggtccttctgtcatgaatggcatccaaatgctggctctttgaagtggagaagcagtgggaccttcagagacagccaaagggggacatttgtgctgcaccagcagtgacctctcatccaggctcaattcctgcccctggtgctactgcccttggtgaccacaacagttttgccctgcctgggtgacgggctgagttctttcaggacaaagatcttaggtgcgggctggatctccagggctgagttctttccagacagagatcttgggtgcctgtgggcattccagtgtccctgccccaccaagcatgggaagcgtagccactgcctctcccctcattggctatcccagatgtctcccctagcctcccagcttttacttcccaaggccagactcaggcactgatctgtataagaaacatcagttccttctaagaactctcactgtccccaccctacaccccagccctactccccaggactatgctgagatgggtgtcagaatctgcggctcagcttccrgacaggtagggaaagaacacaggccctggccctgacaatatgttgaatgaat

SEQ ID NO: 713710 - DNA, 1916 bp, Homo sapiens
ttcatagaggaggaagaaaactcagaaattctcagtaattccaagaaaaagcagaagaccagattgggaataatactgaaggctcaattattgatattgcaatgcataagataatataatatacctgaaactttaaaacaaacaaattctccctaattgggtttcccaggaagcagatcctgagatggagatggcatttagggagtttattagggagtggtcttggaactaatgcccgtggaacagaagcagcaagattgagcagagrgagaagtagagctccaatgcaatcttagtgaactgtgtcagccagcgctgctgaggaattctgaagacgtgaccaccctcagagctgtcctgaattgagcatgagagaccactgaatgggtgcaggctaccctggaaggggcatatttgtgagggatgaggccactttcctctgctgaggcagtccccaaagggactgacagttgaagaccagcttcagtggcactcccagtcgctggagtaataattcctttattcctgaaggggaatgaggggtgcatcatagcatctaacactcacataaatatgacgtcctaaatgttactgacacttgaggaaatggaactggtttcagtaatggaatggcgcatgtttttcaatataaagaagtctgataaacatggatacacaatacccccatgcatcaaaattgcaaatatatggaatccacacgtacagcttacagtacgtggagaggattaaatgaggggaagagagtagtgttatttgtgagagcgagaacatgctaagaatgtcaggctaaatggaagagttggaggatggatgctttcctaaattaaatgataaaactgtcacagagacaaggtgtaatattgatgggcactagaactatttagacatctgttctaaatctctacaacaagcttagaatttaatgcattcttgacttgctttcctgataatttcatctttcaaaagggacgagaaggaatgacaggaactgctactctacactcaattctgaccagcaaggaaggacttgttggtgatgtttatatgatagaaatcttcgcttcaacaaatatacaacataaaatgcagtctttgccttcctgaagatgaaagaaaggagtcatgtcttcccagattctgtaatatagaaaaaaagaaagaacctctggttatagtagacatgtaattgaggctttaggaaagcaaacttcaaaaagttcacagaaatataattataaccccaaggtcagaggcaatagaaagcaatacatttttaaaattttgaactctgaaaaataaaactttatactgcagaaaccaatatgatccaacgtggcgtcctttgatgagtctgttttgaaatggcgtgtaccaaaaaatgagagaaagggcacaaaccaaggagagtgagacaatgggtgatacgaacccgggaagaaagcgatagaaggaaaactccagaagaggctgagcagtgctaagtgaggaggaccacagaaagggctttaaaaacatacacagtttgaagccagcagataagggaaaggataagctgactgccaagagaagaacctgttaagtgataacagagaaaaggcagaggcactcaatttctcctttcttctccagcaaggaacatagtcttcatactgagaagggtagaaccaatatcacagagagggaattgaggcacaacccaaatgaggagagagtcagagacgacctggaatataggctttgcagaccgaatgaaagattataggtctcagaaccactgcctcttatctctggaaaatagaaaatgggccaggtgccagaaatctaagcaaggcaaaactagtttttttaaaaggaggaaaaaatggattatggaatttatagtgtgagcttagcat

SEQ ID NO: 713711 - DNA, 1658 bp, Homo sapiens
ccctcatatgtctcgatgggaatatacattgatataacctttctggaagacaatgttggcatttgttaccaagattttaaatatacatacttttcaagtgrcaattccacccaggtatccagcctagagaattcttcacacatgtgcccagtgagtcatgtacacttttttagcaataaaactgaaaacattcttaatgtttatcaacagggaaaagttaaattatatacattcctgtaatggaacactatgcatcagataaaaagataaataatatatgtaaatgaggacatggaaagagctctaagatatattatgaagtgaaaaaggcaagtttagacaaacaagtacaacgtcccacagaatgaactatttccagaaatgaagaagtatatggggaaaggtcttgaagaatacactccaaattgagttgagtgagtacctttggagagggatgtggggttggaagaggggccaaaggggatgttcagtatctgtagtatctgagtttatgcattgttaacatattcaacatgtgatctttaaaattaaaaataaacaaaaatattcctttgaaaaaatgtaatattttggctgggcatagtgattcatgcctgtaatcccagcacttcaggaagacaaggcaggaggataactttggtccaggagtttgagaccagcctgggcaacatagggagaccctatctctacaaaaagatttaaaaattagcaggcatggcagtgcacctctagggcctcagctactcaggaggctaagatgggaggatctcttgagcccagaaggtcaaggctgcagtgagctgtgattgtgccactgcactctagcctggacacagagcaagactctgtaaagaagaaggagagggaggggggagggggagggggaggatatatatatatatatatatatatatagtattttaaataaagaaagggtaccaaggcactagtctcgaatacatgacatgaatactagacatgaatccttgtcctagctctgcacttgctagtaagtcacctcactgccctgagcttcagtggccacctgtaagaaagggaataatcactgcccagagacttagatcataaaatgagataatatataggacaatttttcaaaaacttcacagtgcactaaaattccttataattaagatatatccaagttgaatcaggtgactaaagttgggagggaaagctaataaattgaatgatacaaccagggtccaaattattttaatgaattagatcaatgagcatcaaccaatcagaataattgaataaggataaatataaattttatttatagcttcaaaaaatgaactgcacaagagtaggatattaaaaaacagtgttagaagcattattgtgaaacagttttagaagtagtttataatgtagatgctgaaaataaaacacaatttcaagccatattaagagaaagcttggagaggtgctcacagtcaccgactgggtcatccaccaagattcactcatccaaactggttgaccagttagaaacactgaaatatgcatcatacagtcttacctgaacttctctacattgaatgccatacaactttgcatttaatatgatttaaataattttccctgttttttccattatactgtaagct

SEQ ID NO: 713712 - DNA, 610 bp, Homo sapiens
ccttattttttaaatacctcctgatctattttactgctttttaaacttaatatttttgtttttatgtacgctttgtagccatctcatcgtgttgcctaaaggaaacggagtgcaagtgccacctgagtagggacacagcagagaagccgtcgctgtccagcaggaaaggtgaaagcctttccagtgagaatgaggagctagagagaggaagtgggaatttggtcaggtgtaatcagtccctagccttggtgcagaatctgcggggtgtgtactgagaaagaaccagaaggtttgggagaaatccagagcagagacgtttttatctaagaacaaagctggaggcatcacactacctgacttcaaactatactacaaagctacagtaaccaaaacagcatggtactggtaccaaaacagagatatagatcaatggaacagaacagagacctcagaaataacgccacatatctacaactatctgatctttgacaaacctgagaaaaacaagcaatggggaaaggattccctatttaacaaatggtgctgggaaaacyggctagccatatgtagaaagctgaaactggttcccttccttacaccttatacaaaa

SEQ ID NO: 713713 - DNA, 1294 bp, Homo sapiens
atctatatctactctgcaggaagacccttgagattctacttcttttgctaaggattgcaattgtattccatttatcattatctccccaatctatctatacatttatttttattaataatttacctttacatggctgggcgcggtggctcacgcctataatcccagcactttgggaggccgaggcgggtagatcacaaggtcaggagatcgagaccatcctggctaacacggtgaaaccccgtctctactaaaaatacaaaaaattagccgggcatggtggcgggcgcctgtagtcccagctactcgggaggctgaggcaggagaatggcgtgaacctgggaagtggagcttgcagtgagctaagatcacgccactgcactccagcctgggcaagagaacgaaactctgtctcaataacaataataataatattttacctttacattatagatatctatgtacatttaatattgaaaatagatttcttcagaatgcttttatttataagaaatacacgtttaaccaatttttttttctgccaagacatttacttagttatggctttatagacagaaataatttactcatttcctggctgaataaatcataatagattttaagaaattgaaaaagattaaaagtgcttctctggtatgcatgagacttccttatttttagaagtattagttaactattatatgccaggccatattaaggctcatgatagcagatatcaatagagatataagttgtcccttaatactctttaaacagtgtcacatggctttaaaagtatagattttggagtcagacaaacctgaattcaaattagaaactggtcatggtagtgggatagtaactaagctgtttcacttccttctataacaaacagctaacttttgctagcagcatctagaaaggcttgcagaaacaatctgtgttttaaaagaaaatagctttactcctagagaattataaaaccatctgaagaccagaggatattgcaaaagaggcttccacctttccccttcaatctcacttcagccatgaagagttcttacagatgggtgctgtgtggtcccttctctctctgaatactcttactcaatctacragttctgccataggactctgttcccagccgagtcaatgcactgtcctgcagggatgttcagccttggagtgccctgccagagaatacttcaaatatgttcaatttcttcagtgtagagtgcctacaagggtaactattgtgttggtgctgtgggccacatctcagagcctaactaggaaa

SEQ ID NO: 713714 - DNA, 1215 bp, Homo sapiens
tcacttgctctaaatgtgaaatggagaggaagacgctgagccaaaactgaggaagtgctacatacattaaattacctagtgcttgtgaaccatctttaaacacataaattattttaaaataaaatactttgcatgcagatgacagaacagacctcataaagcattatattataatttgttcaaattccagaccctgtcatattccattaatgaatacaggatgattcagggtgaacacgttgagatgaaatgtggtcctggaacatggaaaactcgaaagtggaagctcattgtgggatgcagcacagatatgctaaattattgtgaacgtaaccattcatggtgactcaaatgcgatggcttgtggacctcagagcagtaaacctgagcytttgctagacgattttttaattaccaagggcttttctttctcacacaaactaaatactcaaagaattatctgagtcctcccatgaaacagacagtgagatgacggaaacccggattttcggtgtcatttacagacccacaatctctaattttaaaatgaacccagcaaaaacgtttaattacctaactttcaaaagtctctaggaagtgataactcaattgcatgtgaagcacccagacagccacactctagacaaccaccagctctctaggtgcaatttcaaacctatagcttactgaggatcatgcagtgtgcacatgctcggagacctgacccaagtcccgctacaccctaggaaggtggcctagttccaccctagatgggaggctggctctgtcagttttcagcgttgcagtattgaactcgtgtctcacctccagcctgtggatgaagcaaagttctttgccataaaagtcccctggatgatgttagtgccatcaacaccctgcctgcttcccacgcccatctgtgggccatctatttagtttacattgcattcacttctttcctctggagctcttttcctgccaccgtgctactagcatattaacaaagagagaaatcttgacgataatcatatttttcaaaaaggtaattaactttctcttctcatccagaaacagtaattaaaatcatcctgaaaccatacaaagaaaagaagcatttgaaccatggtcgcagtgcctgtgagtttcatgtagagtatgctttgttgagcccattcattgaacgatgaacttcatttgaaaaccacccatttgatc

SEQ ID NO: 713715 - DNA, 963 bp, Homo sapiens
acacagattttaatcaagagccttctgagtgtcaagcacagtcgaggaaccaggcgaaccatgtgaacacctgttcccgaccgtatggctctacaattcccactggtgaaagctcatcagaaagcaggacttaaacttctacaaagaagtgatttccagatgcaaaaatcaatcaactaggaggctgttgcaggactcatctaggactgaggatggggatgaaggaacaggaaaagatgggagagatgtcacagagccagaactgagagacttggcaattaatggtatacaggaagcaagtyatatgggggtctcagaaacagtcacatgccctctgaggtttggagcataacaatcactcccatctactgccagaaagggaattgcattgaaggacagctaccatttaacagtaaagaaaactgcaccaaacacagataagagcagagggctcagaggctcctggcagggaaatgcgtgttaagatttatagacatatatgaagaactagaccatgtatatacaactttattatgtgtatatacatgcctccatgtatctgtatataaatacatatcataatatttacataaatacacacacatgtatacacactatactcatgtataaatattactgtgctcctatatgtatatgattttaacctagatttgcagttagtgaaaaaatatgaagattttcccactaatatgtgtgccaggcctgcccaatcaagctatacattaaggtggctattattttcttcaagctcacatttttaatatgctaagataaaacatctataacaaattaaaaaaatgaggcctgcttggcaacctacgtcaagtctctggcacagcacagcaagtgttttcatagaagtaggagcaagacgcaccttctctagggaggaggcccaaagggcacgtccaatgatccagttcttattccagccacaggcaa

SEQ ID NO: 713716 - DNA, 963 bp, Homo sapiens
acacagattttaatcaagagccttctgagtgtcaagcacagtcgaggaaccaggcgaaccatgtgaacacctgttcccgaccgtatggctctacaattcccactggtgaaagctcatcagaaagcaggacttaaacttctacaaagaagtgatttccagatgcaaaaatcaatcaactaggaggctgttgcaggactcatctaggactgaggatggggatgaaggaacaggaaaagatgggagagatgtcacagagccagaactgagagacttggcaattaatggtatacaggaagcaagtcatatgggggtctcagaaacastcacatgccctctgaggtttggagcataacaatcactcccatctactgccagaaagggaattgcattgaaggacagctaccatttaacagtaaagaaaactgcaccaaacacagataagagcagagggctcagaggctcctggcagggaaatgcgtgttaagatttatagacatatatgaagaactagaccatgtatatacaactttattatgtgtatatacatgcctccatgtatctgtatataaatacatatcataatatttacataaatacacacacatgtatacacactatactcatgtataaatattactgtgctcctatatgtatatgattttaacctagatttgcagttagtgaaaaaatatgaagattttcccactaatatgtgtgccaggcctgcccaatcaagctatacattaaggtggctattattttcttcaagctcacatttttaatatgctaagataaaacatctataacaaattaaaaaaatgaggcctgcttggcaacctacgtcaagtctctggcacagcacagcaagtgttttcatagaagtaggagcaagacgcaccttctctagggaggaggcccaaagggcacgtccaatgatccagttcttattccagccacaggcaa

SEQ ID NO: 713717 - DNA, 963 bp, Homo sapiens
acacagattttaatcaagagccttctgagtgtcaagcacagtcgaggaaccaggcgaaccatgtgaacacctgttcccgaccgtatggctctacaattcccactggtgaaagctcatcagaaagcaggacttaaacttctacaaagaagtgatttccagatgcaaaaatcaatcaactaggaggctgttgcaggactcatctaggactgaggatggggatgaaggaacaggaaaagatgggagagatgtcacagagccagaactgagagacttggcaattaatggtatacaggaagcaagtcatatgggggtctcagaaacagtcacatgccctctgaggtttggagcataacaatcactcccatctactgccagaaagggaattgcattgaaggacagctaccatttaacagtaaagaaaactgcaccaaacacagataagagcagagggctcagaggctcctggcagggaaatgcgtgttaagatttatagacatatatgaagaactagaccatgtatatacaactttattatgtgtatatacatgcctccatgtatctgtatataaatacatatcataatatttacataaatacacacacatgtatacacactatacycatgtataaatattactgtgctcctatatgtatatgattttaacctagatttgcagttagtgaaaaaatatgaagattttcccactaatatgtgtgccaggcctgcccaatcaagctatacattaaggtggctattattttcttcaagctcacatttttaatatgctaagataaaacatctataacaaattaaaaaaatgaggcctgcttggcaacctacgtcaagtctctggcacagcacagcaagtgttttcatagaagtaggagcaagacgcaccttctctagggaggaggcccaaagggcacgtccaatgatccagttcttattccagccacaggcaa

SEQ ID NO: 713718 - DNA, 980 bp, Homo sapiens
taggtcaaagggtatttctggttttagaactttgaggaatcaccacagtgtcttccacaatggttgaactaatttacattccaccaacagtgtaaaagtcttcctatttctctgcaacctctccagcacctgttgtttctagactttttaataagcatcattctgactggcatgagatctaagcatcttaatggctcacacaggatgtctgcaatagtcataggctgcaacatcagtgaaccacaaagtgcattctaataaatctatgtaattatctattgttatatgcactatttttagagtactatttgcttgaaaaggaatgcaaatataccagcctttggcaygtgaagataattcttctaatccttataaacttctgtgctggtttcctagtgaaatcaacatgaaggtgaatcgaggacatgtctgctgcacaaatgagattaaaattctcagctgactttatgatacctttgtggctagaagagtccatggcatttcctaaatgcctaatatgctactgactaatcctgtgagaattaaaacccattaatttcccaatcaatagaaagcttttaaatttgaatattctttagacatatattattggcaagcaggaatatttttatttctagaataattatacctatgaaaaaatagaaaaatataaaatacagcacaatattgttgtataagtatgctggtatcatgagtaacattttgtctattttctttgttcatattcttcaaatttactctaataaaaggtgtattttgtaataatgattaagtttggggaaagtattttatcagctaagttttagaactaaatttagatctgtcaaaaacaaaaacacgcaaaaagatctgctgcattaggaaggaattcccatagaataatcataatgcctgtgatatacaactcatgtcatgaccttttagaaagtgtgcagcagaagttatggtagcatatcttt

SEQ ID NO: 713719 - DNA, 949 bp, Homo sapiens
tctatggtgtatacatgccaacttttctcgccccctttttaagctccttctttcactggctttcatgatcccaccaattcctgcttttccttttttgtttttttcctggctgcatcttcttcgtcaatttcttaaattcttcccttgtcaacctctattttttttcttttttgatatttgagtatttcatccatggcgcttctcactccyctatacattctccagggttgaggtagtctacccccataggttcagaacctatgacctgtatcttcagttggcattcaatagcctatccaactccatgtgggagtttcataataatctatgggattacctgacttctcaatgtctcctgctctccctctcctcactaagagtcccattgtgtggcatcggcaatcacccatatgactaacaagaaccttaagacttcttcttcttcaaagacaggtctattgagatgaacgtacttttaagtcaccctcccctttaacttgtgtgattaaatgtttcccaagataattacagagtgaagccaccatcactaaaattagatttcagaatatttctcacaccccatagagaaaatttatactcatttgctatcactcttcattctccctctgccttgtacacaggctgagtaaaccactagtctaagttttttccctatagatttaatctctctctggacgcttgatctgtcactaaggtctaacctgtaatacctcctcagcagggcttaatgtgtatacttccttacatcagattccctctctctttatatcttttacttgtgaaactgctattttctcccaactgggaacaccatatatgtttgtttactctaatctatttttgccagcattgttctataacagtaaacatacttatatggtttggatatttgttgcctccaaatctcaggttgaaatgtaatccctag

SEQ ID NO: 713720 - DNA, 949 bp, Homo sapiens
tctatggtgtatacatgccaacttttctcgccccctttttaagctccttctttcactggctttcatgatcccaccaattcctgcttttccttttttgtttttttcctggctgcatcttcttcgtcaatttcttaaattcttcccttgtcaacctctattttttttcttttttgatatttgagtatttcatccatggcgcttctcactcccctatacattctccagggttgaggtagtctacccccataggttcagaacctatgacctgtatcttcagttggcattcaatagcctatccaactccatgtgggagtttcataataatctatgggattacctgacttctcaatgtctcctgctctccctctcctcactaagagtcccattgtgtggcatcggcaatcacccatatgactaacaagaaccttaagacttcttcttcttcaaagacaggtctattgagatgaacgtacttttaagtcaccctcccctttaacttgtgtgattaaatgtttcccaagataattacagagtgaagccaccatcactaaaattagatttcagaatatttctcacaccccatagagaaaatttatactcatttgctatcactcttcattctccctctgccttgtacacaggctgagtaaaccactagtctaagttttttccctatagatttaatctytctctggacgcttgatctgtcactaaggtctaacctgtaatacctcctcagcagggcttaatgtgtatacttccttacatcagattccctctctctttatatcttttacttgtgaaactgctattttctcccaactgggaacaccatatatgtttgtttactctaatctatttttgccagcattgttctataacagtaaacatacttatatggtttggatatttgttgcctccaaatctcaggttgaaatgtaatccctag

SEQ ID NO: 713721 - DNA, 1843 bp, Homo sapiens
ctctcacacaggctgcagtgcagtggtgcaatctcagctcactgcaacctccgcctcctgggttcaagcaattctcctgccccaggctctagagtagctggggctacaggcacacaccattacgcgcctggctaatttttgtatttttagtagagagggggttttgccatggtggccgggctgaggatgactattttaaaacacttatatgatctagggctaaaattactcgtcattgtattaccagtcatgtctttgattataaattaaattgaacatctttgataaacttctttaccaattgatcattccttttatgaactggtgagctacatcggtgttatcccttaccgtttcactcttacagttttcaaaacattttttcttattcccttgtgagtgcctgtcatgtagtgactttatgtaagcacatctctcatgtattgagttgatcaagatcccaggggcgtgacccatggcccggaaggaaagatgcgcagggtcggccaatgcaagccctgacctctgtcctcaccagcccacgctcctgctggaaacccccctggatatcagaggatggaggagttgaggaaggaggatgtgggcgtgcagaagcatggagagtgaatttggagggcagatcaagaatggccgatgcaaacagttgctgaatttttactttggtctgaggtcttactttatcttttcatttatttatggcatctgtgatatacagaggttatatgaaactttaggcagccaaaatgattatttttcttctcccagtttctacttttgaagttctactaatgaggtttttatcagcataatgttacatacctattaataaatgtaagtttctacttttttttaacaaattggtatttttctgaaaattagtttggtgtatggtggaagactggtatagttttcttgaaagaattgaccaggttttagacgaatttttattgaaaaagcattccaacacacagtgtggtaactttttgagagtttattttccaccttagcttgcctgtgactagttgtcagatactaacctgtctgttcacatatcagagtaagcaattttcaattctgtactttttaatmgacattttatatattgcaaaatctcatctcctttttaaaaataaaatatctcccttaaaaattagaatatttttagtcattaaaaatgcacatatacaccatggaatactatgcagccataaaaaaggatgagttcatgtcctttgtagggacatggatgaagctagaaaccatcattctcagcaaactagcgcaaggacagaaaacaaacaccgcatgttctcactcataggtgggaactgaacaatgagaacacttggacacaagaaggggaacatcacacaccggggcctgtcattgggtgggggaagtggggagggatagcattaggagatatacctaatgtaaatgatgagttattgggtacagcatgccaacatggcacatttacacatacttaagaaacctgcacgttgtgcgcatgtaccctagaacttaaagtataataaaaaaataaaaatgcttcgagattttggctggaataattttgcatagatgcatttgggaaaactgtagtctaggcacatatgtatgtcttcatttatggagatctgtcatgcccttctgtggaattttataagtatttaagatgattttcgtaaaatccatgaggaaatgtctttatatggtttctcttgataattatacattttttgttacatgagcacaagtatttttaaatttctctgaatgattagtctcagcatttataaaagttacttatcttctacat

SEQ ID NO: 713722 - DNA, 1843 bp, Homo sapiens
ctctcacacaggctgcagtgcagtggtgcaatctcagctcactgcaacctccgcctcctgggttcaagcaattctcctgccccaggctctagagtagctggggctacaggcacacaccattacgcgcctggctaatttttgtatttttagtagagagggggttttgccatggtggccgggctgaggatgactattttaaaacacttatatgatctagggctaaaattactcgtcattgtattaccagtcatgtctttgattataaattaaattgaacatctttgataaacttctttaccaattgatcattccttttatgaactggtgagctacatcggtgttatcccttaccgtttcactcttacagttttcaaaacattttttcttattcccttgtgagtgcctgtcatgtagtgactttatgtaagcacatctctcatgtattgagttgatcaagatcccaggggcgtgacccatggcccggaaggaaagatgcgcagggtcggccaatgcaagccctgacctctgtcctcaccagcccacgctcctgctggaaacccccctggatatcagaggatggaggagttgaggaaggaggatgtgggcgtgcagaagcatggagagtgaatttggagggcagatcaagaatggccgatgcaaacagttgctgaatttttactttggtctgaggtcttactttatcttttcatttatttatggcatctgtgatatacagaggttatatgaaactttaggcagccaaaatgattatttttcttctcccagtttctacttttgaagttctactaatgaggtttttatcagcataatgttacatacctattaataaatgtaagtttctacttttttttaacaaattggtatttttctgaaaattagtttggtgtatggtggaagactggtatagttttcttgaaagaattgaccaggttttagacgaatttttattgaaaaagcattccaacacacagtgtggtaactttttgagagtttattttccaccttagcttgcctgtgactagttgtcagatactaacctgtctgttcacatatcagagtaagcaattttcaattctgtactttttaatagacattttatatattgcaaaatctcatctcctttttaaaaataaaatatctcccttaaaaattagaatatttttagtcattaaaaatgcacatatacaccatggaatactatrcagccataaaaaaggatgagttcatgtcctttgtagggacatggatgaagctagaaaccatcattctcagcaaactagcgcaaggacagaaaacaaacaccgcatgttctcactcataggtgggaactgaacaatgagaacacttggacacaagaaggggaacatcacacaccggggcctgtcattgggtgggggaagtggggagggatagcattaggagatatacctaatgtaaatgatgagttattgggtacagcatgccaacatggcacatttacacatacttaagaaacctgcacgttgtgcgcatgtaccctagaacttaaagtataataaaaaaataaaaatgcttcgagattttggctggaataattttgcatagatgcatttgggaaaactgtagtctaggcacatatgtatgtcttcatttatggagatctgtcatgcccttctgtggaattttataagtatttaagatgattttcgtaaaatccatgaggaaatgtctttatatggtttctcttgataattatacattttttgttacatgagcacaagtatttttaaatttctctgaatgattagtctcagcatttataaaagttacttatcttctacat

SEQ ID NO: 713723 - DNA, 666 bp, Homo sapiens
aacccttgcctatagaattaggctcttccaggtcagaaactcgaagttagttttttttttttttttttatctcatttacgcctcaatatattttacaagctcaaatttattcaataaattcatgtttaattgatttcttaaatttggaaataaaaaactatgcaaagttttaaatacataaagagtctttaaggtattctgcaacctcagcccttccacttgatattttgaataaaaagcatgcagcagtggtctttttctttagagaccacactgttgacattgtacagcattttattcacaaactgcatggaataagatgatttgggcctataagtaaaagccaagattctacaattcgagcattattttgttttgttatttttcaacacttttatgaggcaggggaaaaacattgatgctggacacttttgtggggttcttcttgcagggagaatcagcttcatgcaatgaaaaggatatgacatggggctcagctatacctggaaagaaatctcagcccttccaacacttatttgcaatcctgggcaagtaatctcactgaatttctgttttcttatttagaaagtacgaataataagccctcatttaaccayagtattttgtaaaataaactagagtaggctgatgaagcacatgtagtta

SEQ ID NO: 713724 - DNA, 638 bp, Homo sapiens
caatttgtccagttcacagagccagttttggaatgtggtcctctttacagccagaatgtatgacctttcaactacatcacaactatgaaacagaaatatatgacttcaggtatcttacctaataattaatatttcctgaggttcttgaggtgaaaggtaaaggtgctaaaactatgttcaatcagtttatacgtcagaaactagttctaagaaagaaaactattttatgatggcctctagaaaaatcccattttccccttaawtttgttttaaagaaataatttctagtcattttagtcaatatctcataaacacacttgatcttggctcaggctggaagaagactgaagcagcacgatagagtggagtgaatttggtgagaaacgagaaatgcaaatgtctacgaagtaagctgaaaaggagagagaacctccaggttcctatggattagagtaggaaggcacatacaggggagatggcactcgggtcctcacagccatgggcatcctgggcaagacaggtgagagcgtgactccgacaccctcccgcaggacaggtgagaacgtgactctgacaccctcttctgcttcaggtcctcacagccatgggtatcctgggcaggacaggtgagagcgtga

SEQ ID NO: 713725 - DNA, 638 bp, Homo sapiens
caatttgtccagttcacagagccagttttggaatgtggtcctctttacagccagaatgtatgacctttcaactacatcacaactatgaaacagaaatatatgacttcaggtatcttacctaataattaatatttcctgaggttcttgaggtgaaaggtaaaggtgctaaaactatgttcaatcagtttatacgtcagaaactagttctaagaaagaaaactattttatgatggcctctagaaaaatcccattttccccttaattttgttttaaagaaataatttctagtcattttagtcaatatctcataaacayacttgatcttggctcaggctggaagaagactgaagcagcacgatagagtggagtgaatttggtgagaaacgagaaatgcaaatgtctacgaagtaagctgaaaaggagagagaacctccaggttcctatggattagagtaggaaggcacatacaggggagatggcactcgggtcctcacagccatgggcatcctgggcaagacaggtgagagcgtgactccgacaccctcccgcaggacaggtgagaacgtgactctgacaccctcttctgcttcaggtcctcacagccatgggtatcctgggcaggacaggtgagagcgtga

SEQ ID NO: 713726 - DNA, 638 bp, Homo sapiens
caatttgtccagttcacagagccagttttggaatgtggtcctctttacagccagaatgtatgacctttcaactacatcacaactatgaaacagaaatatatgacttcaggtatcttacctaataattaatatttcctgaggttcttgaggtgaaaggtaaaggtgctaaaactatgttcaatcagtttatacgtcagaaactagttctaagaaagaaaactattttatgatggcctctagaaaaatcccattttccccttaattttgttttaaagaaataatttctagtcattttagtcaatatctcataaacacacttgatctyggctcaggctggaagaagactgaagcagcacgatagagtggagtgaatttggtgagaaacgagaaatgcaaatgtctacgaagtaagctgaaaaggagagagaacctccaggttcctatggattagagtaggaaggcacatacaggggagatggcactcgggtcctcacagccatgggcatcctgggcaagacaggtgagagcgtgactccgacaccctcccgcaggacaggtgagaacgtgactctgacaccctcttctgcttcaggtcctcacagccatgggtatcctgggcaggacaggtgagagcgtga

SEQ ID NO: 713727 - DNA, 638 bp, Homo sapiens
caatttgtccagttcacagagccagttttggaatgtggtcctctttacagccagaatgtatgacctttcaactacatcacaactatgaaacagaaatatatgacttcaggtatcttacctaataattaatatttcctgaggttcttgaggtgaaaggtaaaggtgctaaaactatgttcaatcagtttatacgtcagaaactagttctaagaaagaaaactattttatgatggcctctagaaaaatcccattttccccttaattttgttttaaagaaataatttctagtcattttagtcaatatctcataaacacacttgatcttggctcaggctggaagaagactgaagcagcacgatasagtggagtgaatttggtgagaaacgagaaatgcaaatgtctacgaagtaagctgaaaaggagagagaacctccaggttcctatggattagagtaggaaggcacatacaggggagatggcactcgggtcctcacagccatgggcatcctgggcaagacaggtgagagcgtgactccgacaccctcccgcaggacaggtgagaacgtgactctgacaccctcttctgcttcaggtcctcacagccatgggtatcctgggcaggacaggtgagagcgtga

SEQ ID NO: 713728 - DNA, 574 bp, Homo sapiens
tttttgagacaggttttcactctgttacccaagctgaagtgcagtggcaaaaacatggctcactgcagcctcaattttccaggctctaatgatcctcctagtcaactactagagtagctgggaccacaggcacatgccactatccccggcaattttttttttttttcattttttgtagagatggggtcttgctttgtttcccaggctgctccgaaacccctgggctcaagcaatcctctttcctcagcctcscaaagtgctgggattacagacaatagccatctcactttggccattgtttattaattatatcctgcagccataacaaaaaattgtgtttctttttgtgagttaaaatcatttgatagaaaataaaagtaaggttatgactcagatataggcatagatattctaatacaccatctgggaattattacttttaaaataattacttttcttctgtggaatgtacaatagttttccattaatttaaggtggttttctttctccatggaagtcgtctatgtccttcacttttgcagtataattttgctgggtacagaattctaggtag

SEQ ID NO: 713729 - DNA, 1598 bp, Homo sapiens
tttctttttggtaaaaggctgacatgtattggttaataaaaaatgtgataagcaggactttagcatgaagatttgtgttaatcggactaggagttggattatgtttaatgcttgctgtaggtgtaggtgtcagaggatttgattttcttctcagagaggactgtccctggcagggccttctgctgtaatccastcttataatgcaggaggcctgttgctgtggtagtgagggatggtagagtgttttataaccttcctactagctgtgagtcttttagtgatcctgtgtttcagggctatgacttttctgagaattttcccagcaaaatacctccttttacctccttgccttctactacttttccagttatagaaatcccattttatttccttgaagccatgacacccactaagtatgaattttccactagcaagacaggaaggctaaaggggtctgtctgacatggaagtaacacccttccctgataaccttctagcagagatttttccctaaagagaaagccttcctgatgtagaaggatctaggatacttcacaatgtccatttttccttgacctgccagaggtaagaagggatattcctggaattttcaccgtgagcacttcatggggttcctagaagtaaaggcaatgagtgtaggggcctcctaagactgcacacccccggattttctccttctcacaccactgcttccagcagctcatgaaagtgaccatttaagtgatctcacctgtatatagctcctatagtctctgatccatgtacatttgttttggttgtgactctgtggacccacctgtccttcatttccaggtggcaatttaactgcaacctcagttctctgatgggttcagagaagtcattgatttggggtttgcccagctttttcttcttatgaggatgggagtgagccctttacacgactagctgaaactgaagtcttgtggatgattttactatattatttatcttttctaaactttatcaatgattgaaatgtttcagcatatatgaataaccaatagcatgtcagattcttaactcccactttctgtaactcacaaaaccagactttacttaggactgaatcttaattattgtctaaatttttatatcagttttaatgttataatgttgcagaacatatatttcaaattgtgtttcattatacacatacacacacttgttatactggactaaattattattcatcttgggaaatgtgactatttacacttccattgtattatctcatcacagtgaacagtcaacgcatatatcttgatttatacaactttataagctttttctgtcaatgttgatgatgtatcttagtcaattttggctgctataaaaaatactataaactggattgcttataaacaatagaaatttatttttcacattctggaggctgagaagtccaggatcaagttattagcgggtttgtcctctgatgcagggtcttgcctggtttctagaaggcaccttcccgctgtgttttcccatggtaaaaacgacaaggaatctctgaagcttttttatagacgctaattccattcatgaaagctccctcc

SEQ ID NO: 713730 - DNA, 1239 bp, Homo sapiens
ccatcagcctggctccttgagtggttgtgataggcagggtccattgacaatcagcactagacatgtggtgtgcgtgtgacatatatctcatcattaactactcgtaggattttggaataaattttgaccaatatagtccctttcttaaatattaatttaagcaattgaggacaaagttgagttgaccaagatatgtgaacatcaagaatgggtgacacagggagacttcatctcaaaaaaaaattaaaaaattaaaaaagaatatggaggtgtggtataagaaatagaaaaattgatataataaaaaagttgtaatttagtcttaaaataggatttagattgtatgtcatacttagagataattatagcatcttttctgctctctccaacgacaataaaatgtccatttctaaggtgttaaaattagagactacattacctagcctcccttaccctctggcttctgagcatccagagagaacatgatcaagacacttctttcctctctgctttctctggcactgtgttatagctggcatgtattcctttatgataagtagttctctagtagaaagaacatttgacaatgcctagagacctttttgattgtcacaactctgatgctacagaaatctagtaagaggacaccgaggatgctgatattttacaatgtacaggacaacttctctcccaaaataacaccacacacacacacacacacacacacacacacacacacacacacacacacacacgagacagagagagagagagagaattatccaatcctaatgcaacagtgccacgattgagaacacctgatcaatgaccacaggtccttgtcaggagccccttgtccatggcaccagctcacacacagctctacctcctccaacttttaagcttattacaggtagtcatgtcttcccactaatactggtctctgtgtggctcagcagctttctttgttttytaaaggctaattatacctccatatgtaatccatttatcaaagtctatttaactcttcactgtgtttgccatatttgcttggatcctgaattattagagtacttgccaaatgaatatgaacacttaaaaaggctttctcgggccgggcatggtggctcatgcctgtagtcccagcactttgggaggctgaggtgggtggatctcttgaggtcaggagtttgagaccagcctggccaacatggtgaaaccccatctctactaaaaaaa

SEQ ID NO: 713731 - DNA, 1782 bp, Homo sapiens
aatcagctattagcatttaaaggaaaacccaaaaaatgacacattaaagattttgacatttattttcattaattgagcatatagtcaaattctgattaattgaaagtttatattatactaggtatatataccctcaccacaaaaaatatatataaaatggaaattactatgactttgagaaagcttatgaggcagaaagttggtgttttcttccagagactacaagcctagttgagcatctgacctgcaaatgaattggttatttattcatttatttatttatttagagacagagtcttgctctgttgcccaggctggagtgcagtggtgtgatctcagctcactgcaacctccgcctcctaggctcaagcagttctcctgcctcagcctcctgaataactgggattacaggcacccaccaccacgcccagctaatttttgtatttttagtagaaatgggtttcaccatgctgaccaggctggtctcgaactcttgacctcaagtgatccgcctgcctcagcctcccagagtgctgggattacaggcatgagccgccacacccggctgaactgaaggtttatattgcagaatatcagcataaacatcttcaaatggccatactctgacatctgctgaagttttctgaagcagattcaaattgtttcattgaaattaactttctactataacatttaaaagctaaacttttcagttttcaaaaagcattttaaagtattgtttataattacaaaatgcatgcatgctttttttttttttttgagacagagtctctttcgcccaggccagactgcagtggtgccatctcggctcactgcaacctctgcctcccgggttcaagtgattcttctgcctcagcctcccaagtagctgggattacagtcatgcaccaccacacccagctagtttttgtatttttagcagagatagggtttcaggctagtctcaaactcctgacctcaagtgagccgtcctccccggcctccccagatgctaggattacaggcatgagccaccacacccagcctcttacagagttttaatgtagctgaaatcttactgtatatatttcacttattggtcatagtaaaaattttttcatcctattaaaaattcattaatataatttaatgatcatactcttacattttatgaatatacaataatatatttaccctattgcagaacatttaggtcgtatctttttactttattgaaccatcttgtaagcaattttaattactcccttggcatgagtccttagaagggaattagtaggttaaaggatgtgactgttattaaggtccatggtacattttgccaaaatctttgattcacagtcccaatatgtactgactccgctttactgttttcacatttcataaatggcaacatgtattaatttggctctgtgattattaatgaagttgtacatttttatgtttggctgtttacactttgaattatttggccaaatctttcatcatagtttggtaaggcaagtgctaattgcatgtttaagtgctaatkgcatgtttgttgatgaaagagctgaagttcaaataacatgttcagactcatataacgaataacaagtagagttggaacacagccctgtgctcccttctgacacccaaatacatggtgctttgccctaggtcaggtattaaatgtcaaaggcattaaaatagcaatgtactgtcacttgaatttgcaagatctagtgaatatatcttaatatcaagcattgatattgcttgata

SEQ ID NO: 713732 - DNA, 928 bp, Homo sapiens
tacttggggaaaattataacatctataattgtagcaaaatgtttcacataatttgacatcttgtgctaaaatctgcactgtaaattgccaatagcagaaattattaaattctagaactatctacaaatggagactattaaatgtcttccagtgcacttttaaaaaatgggatggttgggaggccaaggtgggtggaccacttgaggccaggagttcaatatcagtctggccaacatagcaaaaccccatctctactgaaaatacaaaaactagccaggcatggtggtgcacacctgtggtcccagctactcaggaggctgaggcaggagaatcacttgaacctgggaggtagaggttacagtgagctgagaccaggctcctgcactccagcctggtcaacagagcaagactctgcctcaaaaaaaaaaaaaaaaaaaaaaaaaggaggcrgggtggaatgaataagccactatcttacatggtttgtatttgtttttacttggactagataagacttagtcgggtatcaggtggagaatgctacaaaaatcctgtttgccttccactgaaaatcccttaaaatcctcaaaaaaaaaaaaaaagctacacaaatttagaaatgaactcaagtttcttttgtatttatatgaaaactgcatttcatttgttgagtgaatggctcaggatctataccgttcatttatttgggacaggttaaacagtcagtcagagtgtatattttatggttaaatgaacctgagctaggttaattatggtagcaactgactctcaatcctattccttgcatattgaccttagtatggtgatatttaactctaagctgcagtatattaaacacaaacttctgattggaagcagtttcagaatcaatttgcattcaaataaaaagccacttcagtgagaggca

SEQ ID NO: 713733 - DNA, 2218 bp, Homo sapiens
  misc_feature 1422, 1423, 1424, 1425, 1426, 1427, 1428, 1429, 1430, 1431,1432, 1433, 1434, 1435, 1436, 1437, 1438, 1439, 1440, 1441,1442, 1443, 1444, 1445, 1446, 1447, 1448, 1449, 1450, 1451,1452, 1453, 1454, 1455, 1456, 1457, 1458, 1459, 1460: n = A,T,C or G
  misc_feature 1461, 1462, 1463, 1464, 1465, 1466, 1467, 1468, 1469, 1470,1471, 1472, 1473, 1474, 1475, 1476, 1477, 1478, 1479, 1480,1481, 1482, 1483, 1484, 1485, 1486, 1487, 1488, 1489, 1490,1491, 1492, 1493, 1494, 1495, 1496, 1497, 1498, 1499: n = A,T,C or G
  misc_feature 1500, 1501, 1502, 1503, 1504, 1505, 1506, 1507, 1508, 1509,1510, 1511, 1512, 1513, 1514, 1515, 1516, 1517, 1518, 1519,1520, 1521: n = A,T,C or G
aaaattacctgtcttccaaatcaaacttttatcaaaccttccaagctgaaagctggtamaatttaagatcattttacccaggaacagagtaataatttattttgtgtttactgtttcattggacttactgatttattggtggtgacttgatcttatgtgtacttggtgaccttaaagtaaattacctgggtagttgtggtcatttgacaagtttttattgagcacacagccatttgcgctcttggtgtacagtggtataaagacagaccaggtccctgttcttacggagcttaaaatactatggaaaggaagagaaaataaactaacagaaaaataacaatttcagctggcgacaagtgctacgaagaatttagagaagggtaaggaactacagagtgatgagaactgggtggagtgactgctttatagacaatgttgagataatgcatttaattttttaggaaaaagtaatgctacttccttttggagccggggataattcttatgtaggtttacctgtgccatttagctcatttggttgggggacagacagcttttagatttggagcccttgtgcataggctgctaaacttataaacttagttccatgttgtagactaaacctaggccagctaatttactagtattgttagtcattagggtgggagattatgaatggattcacttacatattatttattcatgtggcatatatttgttgtgtatttcagtaggtgctgaagaaaattccaggattaagaaaaactttctcaagtagctgtagtttaccaaaatagttatcagaactaatttggttcattaggactttgagtaaatagtaggtctctcgtgtcctaaatgacttgagctaacacattctgcagtctttctggcacttcttttctcttttgcctcatcacccatgctttttctctttgtggcatcttctgtgttacttttcataactagtactcccacttccctttttacctatagatacaaactttttcaacggtcgcatacatagaagtgcacaaatcgtaagtataaggatttgataaagttttgcagaatgagcatatctttgccactagcacccagattgattttttttttttttttgagacaggtatctggctctgttgcccaggctagagtgtggtggtgtaatcacagctcactgtagcccctactttgaggcccaggtgatactctcacctcagcctcctgagtagttgggaccatagacatgtgccatcatgcctggcacatttttaagggctttttttttttctttttgtgagacacggtctccctatgttgcctaggctagtgtcttatttctgggctcaagcgatcctcccgcctcagcctcccagagagttggtattataggcatgagccactgtgctggcttgcgannnnnnnnnnnnnnnnnnnnnnnnnnnnnnnnnnnnnnnnnnnnnnnnnnnnnnnnnnnnnnnnnnnnnnnnnnnnnnnnnnnnnnnnnnnnnnnnnnnnccccacatctagctgtggacacattatttacattctctgagtggcagtttcctcggctgagagagaacgcatagcagcctcccagcaatgtggtgagaactaaatgaagcacttagcacatcaagcactgagcatggtgcttggtacctggtcagcgcccaatacgtggctgttcttctattataataatttaagaatgatcactattttcgttccaagttccacactgcacagtaggggacaggaggctgaggaaggcagagcctgaaggagtctgaactgggcgctggtttgtcaattggcatgaaaatcccacctcatagtaaatttccgatggaaacgaagcgtgagagttcagtgttttcccacttaatggaattgtgacttttcttctagccacggttctttgtcctgagtaaagttgtagcaaaggctgtcactgttcgcacttctttgttttatttttacttgtgtgaagagcaatcaaaataaataaatcggctgtgtgatttcaagtaactaaaacagaagccaaaaattgagggagaaaaaaaccccaacaaaccaaaacaaaaccaatcaaaatttgcttcttcagtggcccaaatgcctcttctgagtttaggcacccgggggtttgtctgctccggagaacagacacaccaattgcatggtgttcccaaggcttagaggagca

SEQ ID NO: 713734 - DNA, 2180 bp, Homo sapiens
ggcacatttttattttattttttgagacacagtctcactctgtcaccaggctggagtgcagcggtgataccttggcttactgcaacatctgcctcccaggttcaagcaattctcctgcctcagcctcctgagtagcggggattacgggcacccaccaccatgccttgctaatttttgtatttttagtagaggcagggtttcaccatgttggctaggctggtaataaactcctgacctcaagcaatttgtccaccttggcctcccaaagagctgggattacatgcgtgagccaccacgcccagctygtgacacatttttgaagtgacttgtctgattgtctcatctgcttccaaaggctgttatctaggagggcatggcacccagtaggcatgcagtctagcttcatggaagagtgggctctgtgatgggagcaacttcatctgtcatcttcatcattatagctttagtaaccagcgtggtgttggcacataataggtgctcagtaagtatgtgtcgaacgaaggaatgattgaatgctcccattcaatcacttctttctctctaaccgaagaatcctagttggggttttgagccttgtcttctcttccctcataatattatcacaaatggccctgttccctagtacttagtacactggataacaatgacaatcaagacaataggtgaaatcatgtttgtgggaaaaatgatgctctattttgagggctctttctaaaaacagaaaaaccaagtccagtgctgtgcccagcaacctcatggtctaacttgtccctctactgccacgcctgctgtgcccctggcagctctcaaccacacccatcacacacacactggccctaagtggaggaatcactcagggctgctgagatttgaaagctcacttccactccaaagcatcatcgtgcctcgctcctcgctgactgtaaccccagccccctgcactgcattctgccagtgagtgattacacggagctcactcgcaagcctctcctgggcatgggaacagtcctctctgcagcgtgctctccacctgatgacctgaaatgaagaggccagtgagggctccacagcagaagggagtctcgatactattcaggcaaacaaacattaaaaaacggttggtagaaaggaaatctgcctgctagggagaagagtctggtactcagagtagaggtgggtagctcttcatgcacagtagatggtgaatatgcatcctttatatgcatcctttaatcacaaagcctgtggagagaagatgctgtagttattatttatacttggcatccaatcttccacataaataacagcaccgaggtctggtgtttggtttaagtcagctccgtttaaacagcctggccaggtgcagacacacactctggacctttgaactctgtgtgttgtaatccagatgtttggtcaaggtgatgaacttgggtcactgacggtgagagagtgtgcgctgccctcttctagcatcttccactgggagccctggacagtaggcctggccccaagcccactttcttcgccagagtcaagaaacagtagcagctgcagttgttgctagggatgagggatcatccacttgggagttgagatagctgggagggggaggtgggtagcaggaaggaggtcatgaaattgaccgtgcttagctgctgcccacgtttggattactcggagacagtctgcaatgggggaaatattaggcttttaatgacagccctgacaaacatgatccgtatgaccaaatgaatcttaaatgcaactgctatcatttgttaaaggaggatttgccaagtggcacggttctcctagagttttcctagtcccacactttgcctcaaacacgtacacagagcgaggggtttgaactttctgagtttcatgcaaagcacatatgttgtttgggttttgttttgtttgtttttatttttgcaaaatatgttatataagaaagaagaatatatcaatgaaatggtaaatacaaaccctccaaaaggatataacatatttctaatgaaaggaaacaaccaccttcgctttatccacacaaaaaaatttaaaaagatgaagaggggccattttcattcacagattgtggaatcgtactgtttagtgctctccaaatgagtatttttgaggcatgacttcaatgg

SEQ ID NO: 713735 - DNA, 2180 bp, Homo sapiens
ggcacatttttattttattttttgagacacagtctcactctgtcaccaggctggagtgcagcggtgataccttggcttactgcaacatctgcctcccaggttcaagcaattctcctgcctcagcctcctgagtagcggggattacgggcacccaccaccatgccttgctaatttttgtatttttagtagaggcagggtttcaccatgttggctaggctggtaataaactcctgacctcaagcaatttgtccaccttggcctcccaaagagctgggattacatgcgtgagccaccacgcccagcttgtgacacatttttgaagtgacttgtctgattgtctcatctgcttccaaaggctgttatctaggagggcatggcacccagtaggcatgcagtctagcttcatggaagagtgggctctgtgatgggagcaacttcatctgtcatcttcatcattatagctttagtaaccagcgtggtgttggcacataataggtgctcagtaagtatgtgtcgaaygaaggaatgattgaatgctcccattcaatcacttctttctctctaaccgaagaatcctagttggggttttgagccttgtcttctcttccctcataatattatcacaaatggccctgttccctagtacttagtacactggataacaatgacaatcaagacaataggtgaaatcatgtttgtgggaaaaatgatgctctattttgagggctctttctaaaaacagaaaaaccaagtccagtgctgtgcccagcaacctcatggtctaacttgtccctctactgccacgcctgctgtgcccctggcagctctcaaccacacccatcacacacacactggccctaagtggaggaatcactcagggctgctgagatttgaaagctcacttccactccaaagcatcatcgtgcctcgctcctcgctgactgtaaccccagccccctgcactgcattctgccagtgagtgattacacggagctcactcgcaagcctctcctgggcatgggaacagtcctctctgcagcgtgctctccacctgatgacctgaaatgaagaggccagtgagggctccacagcagaagggagtctcgatactattcaggcaaacaaacattaaaaaacggttggtagaaaggaaatctgcctgctagggagaagagtctggtactcagagtagaggtgggtagctcttcatgcacagtagatggtgaatatgcatcctttatatgcatcctttaatcacaaagcctgtggagagaagatgctgtagttattatttatacttggcatccaatcttccacataaataacagcaccgaggtctggtgtttggtttaagtcagctccgtttaaacagcctggccaggtgcagacacacactctggacctttgaactctgtgtgttgtaatccagatgtttggtcaaggtgatgaacttgggtcactgacggtgagagagtgtgcgctgccctcttctagcatcttccactgggagccctggacagtaggcctggccccaagcccactttcttcgccagagtcaagaaacagtagcagctgcagttgttgctagggatgagggatcatccacttgggagttgagatagctgggagggggaggtgggtagcaggaaggaggtcatgaaattgaccgtgcttagctgctgcccacgtttggattactcggagacagtctgcaatgggggaaatattaggcttttaatgacagccctgacaaacatgatccgtatgaccaaatgaatcttaaatgcaactgctatcatttgttaaaggaggatttgccaagtggcacggttctcctagagttttcctagtcccacactttgcctcaaacacgtacacagagcgaggggtttgaactttctgagtttcatgcaaagcacatatgttgtttgggttttgttttgtttgtttttatttttgcaaaatatgttatataagaaagaagaatatatcaatgaaatggtaaatacaaaccctccaaaaggatataacatatttctaatgaaaggaaacaaccaccttcgctttatccacacaaaaaaatttaaaaagatgaagaggggccattttcattcacagattgtggaatcgtactgtttagtgctctccaaatgagtatttttgaggcatgacttcaatgg

SEQ ID NO: 713736 - DNA, 635 bp, Homo sapiens
tcagaggatcagtgaactcctgtgactttgtttcctcctgagaaggacaggcacaccagcctttgacttggcctctagttcctggctgaacgtgaaagaggyacactggatgtgaaaacccactttccctcctctaagtattcctccttgaggcacaggagagcaggggatgcctttgtggattcagaaaagattggcaaaaatgaaaagtggtgccaactactgctgatggggatggggggaagtatatactctcatacactatgggaaacatctaatgatgtcaaaaattatacagacccttaacccactcccaagatatcatgccacaaaaggaaaataaccagatactaagaatacatgttaaaaaaagaaaaagaaagcaaacatcaataaataggaaaacagctttatagactatagttaattcaatctatgaagtatcattcaggcattaaaaaagaatgagccgggccatattgttgtcttagaagacattttgaaagctgttattaaatgacaatagtaagatgtagagaaacatgtaatagtcacctttataaaataaataggcacaaaatctatacatgtcttatatttaatactttccctctatgttttaactctctgcaaat

SEQ ID NO: 713737 - DNA, 639 bp, Homo sapiens
agctcaggagttcaaggctgcagtgagccatggttgggccactgcactccagcctgggtgacagagtgagaccctgttgctaaaaattaaataaataaataaaaggggcacacaatataaagtgataaaactgyggaacaaccaaagaggtctgcatttggtatttcatatgtgctgatggttgtgctaagcactttgtgtgcatgaatgctgaagtactgggtaggaattctctgtataggtagcgggtctggaatgcagaaaaagtgggctggggaggccccatggctcagatgagtcaattgggacccccatagcaggtggatggcctgagtactgtgctctcctctgtgctgacctcacccagagccttctgcacacttggctgacagatgtcagcaggagtctcctccctcaagtgctatttaactacctgctttctcttttgtctcttctccttccctcttttctctaagttttagtagtgggaagtggaagacagaccaataaaaccctccagtaaaaatgctaagttacaagcatttgttcctaactagccttgggcaaaactctccgtaacagcagagtaacttaattagtaaattggacttccattcaaaacatatacagggatctaca

SEQ ID NO: 713738 - DNA, 584 bp, Homo sapiens
gaagccaagaaaacatatgcaaaacctctttgtaaaccatgaccatattccccaaatgtgtcatattacagactaaatcatgtctcctcaaaattcatatattgaagcccttacccccaatatgacggcatttggagaaagggcctgtaaggaggtgatcagtgttaaatgaggttataaggatgtggccctcatccaacaggactggtgtccttataagaaggatgcctgccctttccatgttttctgcccctcctcatccggaaaaggttcaggtktcccttcttccaggaagccttcggtgatccccctgaacttggttggaattcctcctttggcatctagggtactattattaatcttgttccacaggtagcacattgcagtgtaataatctgataatagtttgacctctacctcctttcctccagacatgaccctctcccgggccaggaccacttgacctgcatctcagcctcccccaggtgcagccaagacctggcaataaaaggcccttcgtgaattgtttgggcagaattcctagaagactacaatgggatgaaagtagatagtttaacattttt

SEQ ID NO: 713739 - DNA, 2232 bp, Homo sapiens
tgtccatggctccctttcaatgtcaccataaaatgacactatggcaaaaaaagtcaaatcatacctgattttctacatagttgtctagaactaaagaatcagaaggaactctagaaataatctagattaaacatctgatctcagataaatgtatggtatttacctgtaatgctcagaggtaatagtaatgccactgaaaattgcaagctggtatcctttttgctacctagtgtattatttttagttttggaaggcgtgtggtgatattttttgctcagaattttttttatcttaatgataaacagaaatcacattcagtcctcagatttgctatttggattttcaacaatttagagaagtcttcagttcaatagcattacatttagctttggatttcaacaacttcagaaacccagctaaattagtcaggaatctttcaattgcaagtgacagaaatacaaccaaactgacataagcaaaaaccatttaaatggctcacgtgactaagtagtccagaggattgtggttttaggcacgacttggctctaaataagctctcctcatatgttggcaagatgaccaccaccacttccaggcttgtgttctaccagctgaatgaccataacggtctctttcctaatagttcagcaaagtcttggggttgaatttcattggctcagtcactgttaaactaagtgtcatgactagcaaataaaaaatgttgactggcaagacttcagtcatctgcccatcacatggacttagagttggggatgagggtgggagcccaaaggaaaactgagataccatttcccaaaggaagaaaaatggattctgagcagctaaaaatagctggtatgcaccctgcacggttcttactttattgttatgtcattttttgtttgctgttaacataacaaatcacagaaattcataaagtactttcccgagaagtactttcttgttctcaggatattaggatcaactctgttcaagaagaacttggtatataacatacaccttcaggcaataaatgcccagttctaaacattgacattgccaagctccaaatggttccctacatctatggccccctaagggataggctcaaccacctctaccagaggaccaaacaagacaattaggcaaaaggttttccaggtgtatgggctcaatgctctgaaatttagcatcagcatttgttaacttctgtatgcttgattggagagctttttgacactttacgaaaacagatgaataggcaagtctttttgagactttatgaaaacagaactaggactaagtactagaaagcaagggggacttgaaggatatccaagaagagataatcccgcaaatagccccagcatcaaggcattgcaggcactgctgttacttgtcaggaaaygacagcctcaaggttttctatagtttttttaaccagccacactacagaggactttggtaggaggtttggggaaaggtgaggcaactattccagaagacaaggtaaatatggcatactggagtctgagtatacaactgtcaactcattttacactatacatctacaaatataccctttgtcaaaggaaaaattcagcaatcctagaaatgctaggctgcatgtgtataacaacaaacactgtatgtattgtatgtgctatgcactaagccagctccttgacatgccatatggataaagaaatcaagatccatggtgatttaacagctttctccaggtcaaagattagcaggcagcagagccagactttgaaggcagatctgtctgacttagaaaggctgaccttctccaagggattcatgtctccctgctgcttcccataagtgacttggtccttgccactttccaacaaatgtcccagatatcaacctcctccctcctattttcttgagtctccaaatatcctttgctcctgaactcccccttattggacccagctttgggtcttcctggtgccacctgctctgactacaactgttctattgaataagcctcctctttccatgactgacttggtttggctctgtgtctgcacccaaatctcatgttcaattgtaatcctcagtgtaggaggtagggcctggtgggtggtgattggatcatggaggtggtttctaatcccctagtgttgtctcatgatagagttctcacaagatctggctattcaaaagtgtgtggtatcttcccctttggtctctcttctgctc

SEQ ID NO: 713740 - DNA, 1942 bp, Homo sapiens
cacacacacatatacatacacacaccaataatgcaacactcaaaagttatcaggttataagaaaaaagattaatagaaaatggagataattctgatccagctttctttttaaaaaagaagctatattttttatataaaacattctcttcagtcaaaagtcttttcaggaaacaaaagttttacaaaattattttctgtgactacatgtaccaagcgttttgtcaattctaatcatttcatttaaaaaatcagaaaaaaagttaatttttccccaaattcacacaaaaagacaactattagtttaccaaaaatttcacttctggctaatgaagtgttgtgtacgctcagcctagaaaagctgagagcaaagcaagtgttaaagcagtggaatctgaccactatgaaaagatacgcaatattaaagctggatattcagttaaggagaattcatgagggaaaaaaacagaccaatccacttgcaagatatgagatggcatatctagaatagatggttaagtatttggatgtggattacagctaatctaaaaatacataggtgggtatatatttaagctaagtacatttaggtaaatgcaaaaacgtcagatgcatttattatatctttgctaatgtgtaaaatgtgtaatttatactagtgttttgcttgagttaatgctttcaaagagaagtaagcaaattagaaggctcatacaaatgtagcagagaaaactgaaacagaaaaaaatagtttttctaataagacataagaaataactagggatataaaatgaaagctggctaaaaaaataagtaccgattgctttaaaaatctgtcctaatagaataaatgaagaaaagtaaaatcaacagaaacagtaataagcaaagttgaagataaaaacttggtgagttgagtatttctaagcaattggaatgagggaaatgcatgtgaatcacaaaaggcataaaaactaggagccagcatatgcttggcaatcttgtctgtgtagctttactgaactgatcaaaacactgccaatttattttgttttgctttctgccattgtaatggatagttactgagcaattgattgtatcgttgtgcacttggttggatttagtcattaagatggatgaaatgattggagcaagtgtttcatggtctggcgatcttagtcaccttaacgacccaattgaattgaccataaagaagcctgactgccatgcattctctccatcttcaatggatatattcttatgatccataaaggacagttttcatgttgcctctatktcttaaaaaggccctgaaaactaagttgacactaaagaaagtctaaaatgaacataaactaataacacaactatattaagacataaatctgtaagcatattgtagataaagaatttaaaaatagcacctacaactgatatgctttaaaaaagaaaaaggtacaagataaaacttccactatggaatcatatggaatcattaaattgagatttgtagatccctacatgcctttttccatcctccacccacagtataattttaggtcaaacattaagtgtaaattggattttagcaactgcccggtatggtgtcctgatctcccaactgcattcaacagagcttcaagcctataggcttagccctgtctcccatcctgaggcagtgcttattgaggctggtgaggtcttgaaataaatctagacacctagactggaggcctgaaaatttatctatgactgctagggttttttcatggcttacaactatcttttcctgcccatttgacccaaaaactgtaatttcagagtgaattgtaggtgtccttgcagcccatgttagagtactccccctgataattagccctggctgtgttatcttacttctgcttaacttacttctttttggtttgtgaccagttaccatgagaca

SEQ ID NO: 713741 - DNA, 1942 bp, Homo sapiens
cacacacacatatacatacacacaccaataatgcaacactcaaaagttatcaggttataagaaaaaagattaatagaaaatggagataattctgatccagctttctttttaaaaaagaagctatattttttatataaaacattctcttcagtcaaaagtcttttcaggaaacaaaagttttacaaaattattttctgtgactacatgtaccaagcgttttgtcaattctaatcatttcatttaaaaaatcagaaaaaaagttaatttttccccaaattcacacaaaaagacaactattagtttaccaaaaatttcacttctggctaatgaagtgttgtgtacgctcagcctagaaaagctgagagcaaagcaagtgttaaagcagtggaatctgaccactatgaaaagatacgcaatattaaagctggatattcagttaaggagaattcatgagggaaaaaaacagaccaatccacttgcaagatatgagatggcatatctagaatagatggttaagtatttggatgtggattacagctaatctaaaaatacataggtgggtatatatttaagctaagtacatttaggtaaatgcaaaaacgtcagatgcatttattatatctttgctaatgtgtaaaatgtgtaatttatactagtgttttgcttgagttaatgctttcaaagagaagtaagcaaattagaaggctcatacaaatgtagcagagaaaactgaaacagaaaaaaatagtttttctaataagacataagaaataactagggatataaaatgaaagctggctaaaaaaataagtaccgattgctttaaaaatctgtcctaatagaataaatgaagaaaagtaaaatcaacagaaacagtaataagcaaagttgaagataaaaacttggtgagttgagtatttctaagcaattggaatgagggaaatgcatgtgaatcacaaaaggcataaaaactaggagccagcatatgcttggcaatcttgtctgtgtagctttactgaactgatcaaaacactgccaatttattttgttttgctttctgccattgtaatggatagttactgagcaattgattgtatcgttgtgcacttggttggatttagtcattaagatggatgaaatgattggagcaagtgtttcatggtctggcgatcttagtcaccttaacgacccaattgaattgaccataaagaagcctgactgccatgcattctctccatcttcaatggatatattcttatgatccataaaggacagttttcatgttgcctctatttcttaaaaaggccctgaaaactaagttgacactaaagaaagtctaaaatgaacataaactaataacacaactatattaagacataaatctgtaagcatattgtagataaagaatttaaaaatagcacctacaactgatatgctttaaaaaagaaaaaggtacaagataaaacttccactatggaatcatatggaatcattaaattgagatttgtagatccctacatgcctttttccatcctccacccacagtataattttaggtcraacattaagtgtaaattggattttagcaactgcccggtatggtgtcctgatctcccaactgcattcaacagagcttcaagcctataggcttagccctgtctcccatcctgaggcagtgcttattgaggctggtgaggtcttgaaataaatctagacacctagactggaggcctgaaaatttatctatgactgctagggttttttcatggcttacaactatcttttcctgcccatttgacccaaaaactgtaatttcagagtgaattgtaggtgtccttgcagcccatgttagagtactccccctgataattagccctggctgtgttatcttacttctgcttaacttacttctttttggtttgtgaccagttaccatgagaca

SEQ ID NO: 713742 - DNA, 623 bp, Homo sapiens
ctctttctattgaatgaaaacttaactcagtttagttttgtttgcatacacaaatcaagcattggaataaatcttaagagttaaaatgaaataactatatttgtaaaatgcttagaaatatccccagaaaaatatttcttaaggctcttcatcattggctgtggcaagatggaaggcatttcaaggtctcacaaaataaaaagtaaagtagcatgcaaacatatgcagacacaaaactcttaactccggaattttagggattttttagatttctagtttgggtttaagataatggtcaattgtcacttattggaactttgatttagtaataattttaaaaaattaagtgttggactaagttttaaaatttaaaatatactcctataactaaaccatattggattatgcctcttgccaagattattcttaaaccatgatctaagaatctcctattattctttcactgtcaggatccagaaactcagtgccaagggtaagtcagccttagataaacagattgyctggcctaggccaccaatctgtccaacatttgtgacctataaagatttttttttcctgcaagcaactctgcctatgccaactgtttatatgcacagtggaaa

SEQ ID NO: 713743 - DNA, 2808 bp, Homo sapiens
taggagagtgcccagtatgaagggagagtagaaggcattccagagaagtgggataacatggggcatggtcatggagccttgaggggacgatcctaaaaaatagtggagagtgtttgatggtaagaattaggggggagggaaaatgagcctgtaagataaaccatagccaacaaaaacaaaaacaaaaacaaaacaaaacaaaaaaacaaaaaaaaaaaacggcctgatagggcaagaactttgtgccattagcagcttttggctaggggagcaaagtgatgtaaaaagcatttatggcacctatgcatgcaggattgcatggaagactggaggcaggaagcaagttaagaggttattgtttgaaacacgtatatagaagagaaaataaaaccatggactagagtgttcataattgaaatttaaatgtaaaatgaattgcagactttttgaagaaaaatgggtcattttcagtgcctatgacacatgaagaaaagtctctgccaatacatgtggtccatgatcctttcaatttggctaaccagttgttttgtagtctaggctgtatgayagtgtgacaaggctcgtcatggaagtagtccttcttttacgcaatactgtgggcccttctgcagatctacttgcattccatttttatttccctaattcttggactgctggctgtatacctcaaccttcttttctgcttctgactccttcaggtagaccctatctgatatgctgtcctcgcctctgagactgggactcctctgtccactgggctctttgtcctgctctgttctctagctttggacaccatcttcagcattgaactccattgtcctatttcaaacccactgcaccctataagccaggagaatccccctaacttgccctatgatgtgtggagaaataaatatgattataagatttctagcttagatttactggaatggatgggctattggcagaactgataaaaggaagaactgatttggtgaggaagacaatgatttttatttccagcatggccagcatgaggaaaacatccagaaagaaatcactaattgaaggtccagaagtggaggcagagggtacagggggcacatgactcaaaggctgattgagagcttattcatcttcgtggcattagttgaggaagggttagaaagaaaagagctaagagaagggcttactcacccttcagtggcagaagatacttcattcagagaaaaagaaagagcagttagtaaaagcatatgggatcagggaagccaacaaaaagaaagctctaaaataaatggtcagtactattaaatcagagtgattaagaaggatgacaatggagaatagaccattgaatataggaataaagagaccattgataatctctgagtgggtagtttagttgagtagtgaggatgaaagccagagtttaaaggcttagaagaaggttgaagtagaagaaatacagataactggcatagaccacaaatctagaaatttggtattcctctcagtcaattcctgctactacaaaaaaaaatcacagattggttattagtaacagaaatttatttctcacagttctgtatgctgatccaggcaccaacaggtttggtgtctagtaaaggcctggtctctgtctccaagatggtgctttactgttgcatcctcacatggcagaagggcaacaaggaataaattcactttctcaagcctttttatgaggacatttgctgagacctcttgacctaatcacctccgaaaggccccacctcttaatactattgcattagggattaagtttcaacttgaattttgaaaagacacaaacattcaaaccataacagtgtcgaatggagaaagagaaatgagattgtaataaaaagatgctatttttcaaggtagggagaaacctgttttaaagtagagggaataatagagaagggaagactgaaagggtaacagaagaaatcaatgtgacagtaaagaagggataagttcaaatgtttagatctcagcagagttccttatggagaaatgatacagctttgaaacagaaaggaaaaagaagaggacaagaaatgtattgaaatgggatggtttatattcaggggatcctgtcaaaatcctgaattttgatgctgcatgtgatgattcccacctttaatcccagctactcagtagggtgaagcaggagaattgcttgaggccaggagttcaagaccagtctgagcaatatagtgagaccctgtctctaaaaaaaaaaaaaaagaaagaaagaaagaaaaagaaaagaaaagaaaatcctgaaaccctgaaaccctcccctcttttttccctcagtgaagaactttggctggctgttcagaggaaaaatgggaaagaaaaaccttcaggggagtttactaactgacaggaatgaattagacagcactttcccaagtgttctatggatcacctgacatagtgtcacctggagaaggtttttaaaatgatctctggaggagacacttcattcacaagctcctcagatgattatgatgcttgcaaacgtccaggagtgagtgccttgttggaggtggatccatcttgaaaacactgactaatttaggaacctagcaggaagctacattgtctctcatcctgtggttatttttctcttcacatccctcacagggctcccttcgctgggtgtatttctatggtaaagagtgcaactcatcccagcatacaccggcataagctcttggttaggtccaaaatatcagcgagggcattatagtatatccacaacccaaaagaaaa

SEQ ID NO: 713744 - DNA, 898 bp, Homo sapiens
atcatagatagggcataggggaagcataatccatttaggggacagctaggtctaccctgaatggagcaaaggttaaactggmgagactggactcttctgatgcgctaaatcagtggcagatgaggactgtgaaaagaaggctcacagcagccttggttaacttacttccaaaagcagtgagctgctgtgagcagccatgtgttactgatgaggctggctccacactgatggcctgaccctatgagctggaggctggcctgccatggccattccccttccatagctgtttcccttccttggacaattctttgagtagaagaggatgctggtaatggcatgtttgaagatgtcatccttattccacagcctgccacagaaatacatgatcattcatattcataaaaaggaggaaaaaagtatattctgatttgctttggttatagacaatcctttgtccctgctaccatgtgaaccattcatagcactcagcctttgagcttatttgatacaggtcttgctgatcctactgaggttcagaagaaatgtttactaacatttcaaggcattcagtccaggaattaacttctatctctccttataaagcatatatagataattcattgagcaccaaaaatgtatagatcctctgctatgtgtcttagatgtatttatagaaacataccttttagatgagaaaattaagccttgaagagggaacattgctggcggtcacccagctggtaagtgacagagtgggatacaaaattaggaggatccacaccaaaactagtagcagtatccttattactgagagagagcccaatactaactgtaggtcatgattttcccttaactaatgactaaagagaatcaatttattgtgtttgcaaagccctgt

SEQ ID NO: 713745 - DNA, 533 bp, Homo sapiens
tttttacatagttcagagcagaatcctgtacaaagcaatattgccagttctcttgctgcctgatccagggattaattgctccaaaataaacatcagtgtaattgtttaaagagactaaaatatacattactgagtgtaaatataaatgtcaatctttttcaagtttctaagaaaagttaaatgcacatctcagggcaaaggggaatagattcacagtagtgtcatctcttaagtcctagtttcatgcctagtgtcccttccatcatttgtgttaatgttggtgaaaattaataaccttgacttatctagtccagygaacccacacattcttaatggggaatatttgacaagagagactaaagctgtggagccatcaggtacaggaagtgtgccatttcagcgaaaaagtagagaatgcttagccaattggtacttatctgattaaactgctggctcactctgaaaggaatattgtatgtcttaggaaaagaaaaatgaataaatcagagacacttagcagcaatggtagatct

SEQ ID NO: 713746 - DNA, 3694 bp, Homo sapiens
cttatgatctctacctcaacttcccgtagcatattgggaaagggacctgaaagaaagaaaaaataaatagatgaagaacttctacattgctgccatgatagttaattgtgtcttacaaagaatggaccagtgataaaacctaagtcttgaagttgtaagattctggactgaatgacagtgctcagaatcaagttacatttattgggtggcttctatttactaggtaccatatttggtttgtttacttctgctaccttatttaatccttgcagcagccaccaaagaaagacataaatattctctttttcagttgaggaaactaaagcttacctggttaggagtcttatcatgatcacacagttaaggaataatgttagaagctttttaacttgatgtgatctttgtaaaaccagaatatttcttaccacctgggagaatatgctacagcttaccttaaccttacttggaaatcttcattactttacaaaggacacagctattttgggaaccgtgaatcctgaggaaaagcagcatagaacactactgtactaccagatttaactttaatacagatgcaatgctatcacttcataggaaaaaccacgcttactctgataatagcttcacttgctatccaaaacaaataccagagtaagtaacacataaaggtagcttatattttattaactaaccacacacttattgattgcatgtaacattgttttaactattatattcttctcatttctttaaaataggagcaacttctattttaaagactgtactaatctttcatataaagacggatgctttgtttacaacagggtcaaagaattgagaggataagggagggcagtagtactgatttgagcgatgaattagcgtaattatgtgcttaagggccttgaatttagaaggagcagatataagtttgaacactatttgcacaatttacaagctatatgtgactttgggaaagtcgctaagcatcatttaactcacctgtgaaaagaagaaaataatgccttgctcagacgtttataagttaaaaacaatgaatataatcagttatgacagtagcttgcctcatattcagttcttaaaaaatagatgctattagactaaattgtagagattagggtatatacttaagatcctcagggtcttaaagctgcactttaaggtttacrttggatggagagaaagttagagcttttataaggagagatctaggtttctggggatttggccattcgctgtcaagaaaactaattgttttaaaatgagtaaattcactcacctaagattgccagtcttgctgagaaactaagtccagattctctacagtcattaaagattttgtagggtcttgtgaatttttccatctcagtcatcatctttaaaagggtcattgtatggccattttctcttttatctctgattctgcttgaaatgttcccagtgaagcagtctgctcaccaactgctctttatatagattttatgcaatctatttatttgagtaaatgccttagcaatattcaatactatctattttgttgtgtataatgtcattaacatttttaagatattctcaagttttaatcaattatatttcctatttgtaatttctgtgtgcaaattttcattttagctaattggtctaaaatgcttagtctcaattttcaaatgcttacaatcttttagtctcagcttaaaaaaataaattcaagtgctcgacaatgtaacaaaatactttacattaccaattatttaaagaagaaactgtccagagcgtagaatatttctgttttgcaagctgtctggtaacaagatttcttttcttttttaaaaaaacttattttagattcagggataaactagtgtttcagggtttgttgtataggttatttcatcccccaaatattaaggctggtacccaatagttgttttttctgctcctctccctcctcccaccctccaccctcaattaggccccagtgtctgttgttctcttttttgtggtaacaagatttctaattagatatgattggctaaatcttgggaggtaggagaagagaaccttagtaggtccttgtctccatttcaaagtgcaggaaaataaaaaaatacaatcaaatatctattaatttactttgatgccttacaaacccacaatgttattgtgaaatgtattcaacttatgagagtagacagctcattgcacagtattctgcacactattgggctttgaatgattcatgatgaagtagcaaatcactcccaagctctgggagtaggaggtgttaagtttagttaagattatagaggtaagcgtaatggtgctactcaagtagtagatgttttccttttctacttttatcaggaagtggctttaagtcttaaaggatttaattcccctttatactcatcaccatttcctatagaacaatgcagatccctcagagatgaggaaaatttgattatataatctgagattataacgatagtgcatccacctagactcaacatcagaattttagagtgtatattggagggaagccgacttctataaaaattaactgattagactcatatgacttcataataagagcttgaaacaaaaattagaaatttgagggcagattaaactctcatatgtaaaaagtcaaccaatagacataaaaatgggaaagtcatatcaggatctaaacatctatgtttgtagtttattgtcaaatttataaagtttcaggttgaagaacagctccatagatacacggatcagagggatcccatttaatatttagggccaggtaaagaataatcattcagtttattcatttaaggctctttctgtttagttgcatgatgcattgcaaaagcttatcattactagtgcttgcaaattatacactttatgaatcaagcagccatagcagaaactacacatatgaaagaaagcatttgaaagaaaaaatgatgtaaaaatatgctttaataaatttggaaaataaagctctaaccagtttccaaaatagtccatataaagacaataaatataggtaccgtgtaatagtaatggtgctaaagtttttgaaattcaccacatctgtttcttatttgtttgtttttgccatatttataatgggacatctgatttcatctcttatttattttgattttgtattttatttcatatctctgttcaaatgaaggataggtttatattttttgctttgttgttttactgagatactcaccatctaatttaagtgctccccatccagtgacaaacactttactcttaggcaaggcttcaaaagtagcttctggaagacagactctgtgcacctcattggaaaatatgatgggggtgaagagcttcactacagcgatatcatcctcgtgtttatgggcagcatagttctcatgaataataattgactccccctttcttctcattagtgagggattcgggttattccaaaactagccatccagagtttgggtttttcttcactgatcacagagtaaaaggaatacagttggttcatttctaatttaaatttgcccaggactgtggatgggcaggggacataaatgtgggagaagggcaaattttttaaggtaataattgattgggaccatcccaccttcttatctgaggcttctctcctaagactgctttgctt

SEQ ID NO: 713747 - DNA, 3694 bp, Homo sapiens
cttatgatctctacctcaacttcccgtagcatattgggaaagggacctgaaagaaagaaaaaataaatagatgaagaacttctacattgctgccatgatagttaattgtgtcttacaaagaatggaccagtgataaaacctaagtcttgaagttgtaagattctggactgaatgacagtgctcagaatcaagttacatttattgggtggcttctatttactaggtaccatatttggtttgtttacttctgctaccttatttaatccttgcagcagccaccaaagaaagacataaatattctctttttcagttgaggaaactaaagcttacctggttaggagtcttatcatgatcacacagttaaggaataatgttagaagctttttaacttgatgtgatctttgtaaaaccagaatatttcttaccacctgggagaatatgctacagcttaccttaaccttacttggaaatcttcattactttacaaaggacacagctattttgggaaccgtgaatcctgaggaaaagcagcatagaacactactgtactaccagatttaactttaatacagatgcaatgctatcacttcataggaaaaaccacgcttactctgataatagcttcacttgctatccaaaacaaataccagagtaagtaacacataaaggtagcttatattttattaactaaccacacacttattgattgcatgtaacattgttttaactattatattcttctcatttctttaaaataggagcaacttctattttaaagactgtactaatctttcatataaagacggatgctttgtttacaacagggtcaaagaattgagaggataagggagggcagtagtactgatttgagcgatgaattagcgtaattatgtgcttaagggccttgaatttagaaggagcagatataagtttgaacactatttgcacaatttacaagctatatgtgactttgggaaagtcgctaagcatcatttaactcacctgtgaaaagaagaaaataatgccttgctcagacgtttataagttaaaaacaatgaatataatcagttatgacagtagcttgcctcatattcagttcttaaaaaatagatgctattagactaaattgtagagattagggtatatacttaagatcctcagggtcttaaagctgcactttaaggtttacgttggatggagagaaagttagagcttttataaggagagatctaggtttctggggatttggccattcgctgtcaagaaaactaattgttttaaaatgagtaaattcactcacctaagattgccagtcttgctgagaaactaagtccagattctctacagtcattaaagattttgtagggtcttgtgaatttttccatctcagtcatcatctttaaaagggtcattgtatggccattttctcttttatctctgattctgcttgaaatgttcccagtgargcagtctgctcaccaactgctctttatatagattttatgcaatctatttatttgagtaaatgccttagcaatattcaatactatctattttgttgtgtataatgtcattaacatttttaagatattctcaagttttaatcaattatatttcctatttgtaatttctgtgtgcaaattttcattttagctaattggtctaaaatgcttagtctcaattttcaaatgcttacaatcttttagtctcagcttaaaaaaataaattcaagtgctcgacaatgtaacaaaatactttacattaccaattatttaaagaagaaactgtccagagcgtagaatatttctgttttgcaagctgtctggtaacaagatttcttttcttttttaaaaaaacttattttagattcagggataaactagtgtttcagggtttgttgtataggttatttcatcccccaaatattaaggctggtacccaatagttgttttttctgctcctctccctcctcccaccctccaccctcaattaggccccagtgtctgttgttctcttttttgtggtaacaagatttctaattagatatgattggctaaatcttgggaggtaggagaagagaaccttagtaggtccttgtctccatttcaaagtgcaggaaaataaaaaaatacaatcaaatatctattaatttactttgatgccttacaaacccacaatgttattgtgaaatgtattcaacttatgagagtagacagctcattgcacagtattctgcacactattgggctttgaatgattcatgatgaagtagcaaatcactcccaagctctgggagtaggaggtgttaagtttagttaagattatagaggtaagcgtaatggtgctactcaagtagtagatgttttccttttctacttttatcaggaagtggctttaagtcttaaaggatttaattcccctttatactcatcaccatttcctatagaacaatgcagatccctcagagatgaggaaaatttgattatataatctgagattataacgatagtgcatccacctagactcaacatcagaattttagagtgtatattggagggaagccgacttctataaaaattaactgattagactcatatgacttcataataagagcttgaaacaaaaattagaaatttgagggcagattaaactctcatatgtaaaaagtcaaccaatagacataaaaatgggaaagtcatatcaggatctaaacatctatgtttgtagtttattgtcaaatttataaagtttcaggttgaagaacagctccatagatacacggatcagagggatcccatttaatatttagggccaggtaaagaataatcattcagtttattcatttaaggctctttctgtttagttgcatgatgcattgcaaaagcttatcattactagtgcttgcaaattatacactttatgaatcaagcagccatagcagaaactacacatatgaaagaaagcatttgaaagaaaaaatgatgtaaaaatatgctttaataaatttggaaaataaagctctaaccagtttccaaaatagtccatataaagacaataaatataggtaccgtgtaatagtaatggtgctaaagtttttgaaattcaccacatctgtttcttatttgtttgtttttgccatatttataatgggacatctgatttcatctcttatttattttgattttgtattttatttcatatctctgttcaaatgaaggataggtttatattttttgctttgttgttttactgagatactcaccatctaatttaagtgctccccatccagtgacaaacactttactcttaggcaaggcttcaaaagtagcttctggaagacagactctgtgcacctcattggaaaatatgatgggggtgaagagcttcactacagcgatatcatcctcgtgtttatgggcagcatagttctcatgaataataattgactccccctttcttctcattagtgagggattcgggttattccaaaactagccatccagagtttgggtttttcttcactgatcacagagtaaaaggaatacagttggttcatttctaatttaaatttgcccaggactgtggatgggcaggggacataaatgtgggagaagggcaaattttttaaggtaataattgattgggaccatcccaccttcttatctgaggcttctctcctaagactgctttgctt

SEQ ID NO: 713748 - DNA, 653 bp, Homo sapiens
aactttcaaatctctgtgcctcctgctccatgtatattttataatagaggttgaaatactgcattaagtcaactctttagatagtcatctttgaccatgtgacaagttgttcaagtatcatcatccagttatagagataatctttatgatggygagttcatgctcaaatgaggtttggggggataaccgtaaataaacattgaagtaaatgttatttgtatcacagcaagctttatgtaagcatttttgtgatatattgaaatgtgtgaaattcatatttaacaaagctctaatttgttgtttttttcttttctcagatatttcagagatccaatttaaaccatcattacataaagtgtcaagttgtcaactttaggtaatcacagttaataaatttgtatgattataaaaggcagctttgtattatatagttattcttcaattaattgctttgtaaacaggtctaaagatcttagctatatcaagagcaaaaatagtttaatattattacatttgtgattcctcctgtatagtttctgtagtgagagagtttcttgagtagtgatgaaatatattctactggttgtcattttaaagtcttttgcatttcatacagaagattcttacaattattaactactgctctcaatttt

SEQ ID NO: 713749 - DNA, 653 bp, Homo sapiens
aactttcaaatctctgtgcctcctgctccatgtatattttataatagaggttgaaatactgcattaagtcaactctttagatagtcatctttgaccatgtgacaagttgttcaagtatcatcatccagttatagagataatctttatgatggcgagttcatgctcaaatgaggtttggggggataaccgtaaataaacattgaagtaaatgttatttgtatcacagcaagctttatgtaagcatttttgtgatatattgaaatgtgtgaaattcatatttaacaaagctctaatttgttgtttttttcttttctcagatatttcagagatccaatttaaaccatcattacataaagtgtcaagttgtcaactttaggtaatcacagttaayaaatttgtatgattataaaaggcagctttgtattatatagttattcttcaattaattgctttgtaaacaggtctaaagatcttagctatatcaagagcaaaaatagtttaatattattacatttgtgattcctcctgtatagtttctgtagtgagagagtttcttgagtagtgatgaaatatattctactggttgtcattttaaagtcttttgcatttcatacagaagattcttacaattattaactactgctctcaatttt

SEQ ID NO: 713750 - DNA, 613 bp, Homo sapiens
tagggcacaaccaaaatatggtaggaagaaggaaagagccctggcactgtaggatacactctcataccctctctgcagcacacaggataggattggcccaggacatggagtgggsagaaggacaagaaagacatcagacttggatagtatctgtctcagacataaagacaccatcttatttgcaacacagacacaaagaactgattgataaatgttcaggatatgaaattaaatcaagctcattgtaattctaaaactactagctgcctctcaggaattagctttgaagtcgtcatgttttagcagaacttgtttaacttttgcaatgagattataagactgatcgaaaattactaattatcagtaaatcttcactcagtaccttttcccagaactatcctgggaggctagagcatatacattatagtatgttaacagaagagaaaattatattatagatttgacaaaagtcagaaagaagaaaaaatagcttgaagataagaatgagtagtctctgtgagtaatacccaacattcagttccattagttatgcagacaggacagaatagactctgaattcaaagcactggactataggtagcagagacaagac

SEQ ID NO: 713751 - DNA, 613 bp, Homo sapiens
tagggcacaaccaaaatatggtaggaagaaggaaagagccctggcactgtaggatacactctcataccctctctgcagcacacaggataggattggcccaggacatggagtggggagaaggacaagaaagacatcagacttggatagtatctgtctcagacataaagacaccatcttatttgcaacacagacacaaagaactgattgataaatgttcaggatatgaaattaaatcaagctcattgtaattctaaaactactagctgcctctcaggaattagctttgaagtcgtcatgttttagcagaacttgtttaacttttgcaatgagattataagactgatcgaaaattactaattatcagtaaatcttcactcagtaccttttcccagaactatyctgggaggctagagcatatacattatagtatgttaacagaagagaaaattatattatagatttgacaaaagtcagaaagaagaaaaaatagcttgaagataagaatgagtagtctctgtgagtaatacccaacattcagttccattagttatgcagacaggacagaatagactctgaattcaaagcactggactataggtagcagagacaagac

SEQ ID NO: 713752 - DNA, 820 bp, Homo sapiens
tgagggacatggaggaggcctgttgctgggatgactgttgggaagggtgaaaatgtcaaagccgaggagaaaaaagtgaattccaagctggactgaatatttggacatccaacagcctgcctctttttttttactttttgctagaatttcacaaaagtttagtttcaaactctccaggcccctgatttactctgaactcaacattcaggtttggttttcagccttacctacacctggaactgtggctgtggagggcyctgtgctcttcccacctcctcttcctgcagttcccatcagactcacactgcaggctgcaccacgttcatggatagggcacgcgcccgaggacatcccgcttgctcccgccattctgtttaccacaggtgacaaccgccatggctgagaggcagggaggtcccccgagggccagtgtatccccacctcatggcctcagagaatggggcatggaagtcccacagtggaagtctctctatgaaagtccctctatggaagtcccctatggaagtccttctatggaagtccctctatggaagtcgcctgtggaagtcccaaagtggaagtccctctatggaagtcccacagtggaagtccctctatggaagtcccctatgaaagcccctttatggaaatctctctatgaaagtttttctatggaactccccctatggaagatcctgtatggaagcctctctatggaagtttctctatggaagtttctctatggaagtcccacagctgaagtcccttatggaagcccctctatggaagtccctctatgaaagtcccctatggaagtccc

SEQ ID NO: 713753 - DNA, 637 bp, Homo sapiens
atcctctatggaattccctctatggaagtccctctatagaggatcctctatcgaagtctgtttatggaagatcctccatggaagtccttctatggacattcctctatgacgatggtttattccacgtgtcagcttgaccagcaccgggtgcccaggtcaaacattgttctgggtgtgtctgtgagggtgttcctgaaacagattaacatctgaatcagtggacctcatcaagttggccaccctctgtggagtggctggcaccttccagtgcttcggggcatggacagaacaaaaggcggaggaaggagaaactcccctttcctgcctgactgctgggctgggacctgtgtcctctcctgcccttggactaagattcaccccattggctctcctgttcctcaggtcttcagactgagactggaacttttggctttcctgggtctccaggttgcaacrgcccatcctgggactcctcagcctcaacaatttcctaagccaattcttcgtaactcctgcgtgtgtgtgtgtgtgtgtgtgtgtgtgtgcatgcatgtgcattttctattggttctgtttccccgcctgtcgcaggcacctgttgtacctggatcaggatgcaatggaagcagggtccatg

SEQ ID NO: 713754 - DNA, 637 bp, Homo sapiens
atcctctatggaattccctctatggaagtccctctatagaggatcctctatcgaagtctgtttatggaagatcctccatggaagtccttctatggacattcctctatgacgatggtttattccacgtgtcagcttgaccagcaccgggtgcccaggtcaaacattgttctgggtgtgtctgtgagggtgttcctgaaacagattaacatctgaatcagtggacctcatcaagttggccaccctctgtggagtggctggcaccttccagtgcttcggggcatggacagaacaaaaggcggaggaaggagaaactcccctttcctgcctgactgctgggctgggacctgtgtcctctcctgcccttggactaagattcaccccattggctctcctgttcctcaggtcttcagactgagactggaacttttggctttcctgggtctccaggttgcaacggcccatcctgggactcctcagcctcaacaatttcctaagccaattcttcgtaactcctgcgtgtgtgtgtgtgtgtgtgtgtgtgtgtgcatgcatgtgcattttctattggttctgtttccccgcctgtygcaggcacctgttgtacctggatcaggatgcaatggaagcagggtccatg

SEQ ID NO: 713755 - DNA, 720 bp, Homo sapiens
ggcttttcattcataaaaacatgctagatgtaaataatgttttgcttgttgatgagtttggtttgagataactgaagaaaacaaaacagattatcctttaagcataataagcctgtgttcattaggtccattcattcattcattgaacaaatatttgtgcttgctgtataggaactactgtgttaaatgctggagacacaatggtgagaaaaagcattcagagcctccaatctcatggagcttatagtccagacagagaggcagacattcatcgaataaytgaacaactgacagagatgagtgctttgaaggaagaggaatatggggttctggtagcattaacttaaagagggccaaaatggcctggaccagggtcagaagtgccacacactgagatctaaaggatgaaggggcctgggcaagagagacagaacagagacgaagttccagggagaaaaaagaaggaacagtattttaccaagccaggagaggcttagcaaagggggaggaactcagggcttaactggctggagtaagagacggaggaagcagtgatgcagactgcagggacaggcacctggtcttcacccaagagtaagtgatggggaggattgggagaggggcagcagtaatcagattggtgtttggaaagaataactctgctggcactctgggaagtggtcagagggacccagatggatgaagcatagcccttggaag

SEQ ID NO: 713756 - DNA, 974 bp, Homo sapiens
tatttattttgagacagggtctcactctgtcacccaggctggaatgcagtggcacaatgttggctcactgcaacctctacccgctgggttcaagcgaccctcccaccttagcctcccaagtagctgggccacaggcgtgcaccaccatgcctggcttatttttgtatttttagtagcgatgaggtctcaccatgttgcccaggctggttttgaactcctgagctcgagcaatctgtctgcctcagcctcgcaaactggtgggattataggtgtgagccaccatgcctgaacttcagctcactttatgtctgtattgtccgatgcagtgcctggcacgaattcagtgtttaattaatatttgttgagttgaatcaaactcttacctcttctttttcatcactattttctttttctttttctttttcttttctttttttttttttttttttttgagatggagtctcactctgtcacctaggctggagtgtagtggggtgatctcggcttactgcaagcttcgcctcctggattcatgccattctcctatctcagcctcccgagtagctgggactacaggcacctaccaccatgcccagctaatttttttgtattttttttagtagagacggggtttcaccatgttagccaggatggtctcgatctcctgaccttgtgatccgcctgcctcggcctcccaaagtactgggattacaggcgtgagccactgcgcccagccgttttatcactattttcttttatcatcccttgactcacacttygatccttgctctttgaaatatatgacagatacctagaactggctttgttgaggttaagttttccttgtactgtagtgtacaacctagattgatagaatgtaagatttcaggtaagtcatagtagctctttatcaataaaaggtaagaaacctaaataagttgatttaaaataaggctgtaacccagtttgacaat

SEQ ID NO: 713757 - DNA, 588 bp, Homo sapiens
tgtcactctctgtctacattttcatgttataccccagtttctgtttctctgtgcgtcctcttagctgctattgttgtggttagtttattataaagtatgtaccacaggaagaaaataaatgtgtaaaagtccccaacaagccagatgtctttcaatgggtttatgaataaagaaattatgatgcatccacascacgggctactcttggcaataaagaggaacacactactgttacacaagaatgtggatgaccctcggaagaagtcaatctccgaaggacacatactgcattatcaaatttatgtaaatttgtgaaataacaattatagtacagaacagattggtggctgccagggattgtggcagaaacaaggtgtgagtataaaggggtagcatgaaggagctttgtcactgtgacggcagttacatgaatctgcacatgagctaaaactgctcagagtatattaacataggcacactcacgtattaaaacaaacttcataagtagacccagtgcattatgagttgttaccctttcctcctttttacaaaagaaagatctaaaaaatccttttacctgtattgcag

SEQ ID NO: 713758 - DNA, 578 bp, Homo sapiens
aatataagcatttatgacactcaggaagttaggcagaawaggttaaagtacattatatgattttgccatttttgctctttgcattgtattacatataggataaaagtatttattacattttagatgaaaatctattgcaacaccatacctagcttcttccaaactctgaagacattaacagaaaataaatctcagttaatgatattcaagggatgtattagtaacagaagctcataggatctcccacctacacacttccttttgaaaatcacaaattaaattatgtaaattaaatacacaggttttatttgatgatcatcataaaataatatgaaagcctgtatgagaacttcagatatttagaataaacagtttctcattgttatattaggtaataataatatgttttttagtaaaaataatgtaagttttaacttcagctattctatgtagaataactaaaatttagaaataataatgatttggatcacagttttgtaatcacaatattcattaattaaatacaataaaataacaactggctaataaaatactcaaattacctctataattttgtg

SEQ ID NO: 713759 - DNA, 578 bp, Homo sapiens
aatataagcatttatgacactcaggaagttaggcagaaaaggttaaagtacattatatgattttgccatttttgctctttgcattgtattacatayaggataaaagtatttattacattttagatgaaaatctattgcaacaccatacctagcttcttccaaactctgaagacattaacagaaaataaatctcagttaatgatattcaagggatgtattagtaacagaagctcataggatctcccacctacacacttccttttgaaaatcacaaattaaattatgtaaattaaatacacaggttttatttgatgatcatcataaaataatatgaaagcctgtatgagaacttcagatatttagaataaacagtttctcattgttatattaggtaataataatatgttttttagtaaaaataatgtaagttttaacttcagctattctatgtagaataactaaaatttagaaataataatgatttggatcacagttttgtaatcacaatattcattaattaaatacaataaaataacaactggctaataaaatactcaaattacctctataattttgtg

SEQ ID NO: 713760 - DNA, 578 bp, Homo sapiens
aatataagcatttatgacactcaggaagttaggcagaaaaggttaaagtacattatatgattttgccatttttgctctttgcattgtattacatataggataaaagtatttattacattttagatgaaaatctattgcaacaccatacctagcttcttccaaactctgaagacattaacagaaaataaatctcagttaatgatattcaagggatgtattagtaacagaagctcataggatctcccacctacacacttccttttgaaaatcacaaattaaattatgtaaatkaaatacacaggttttatttgatgatcatcataaaataatatgaaagcctgtatgagaacttcagatatttagaataaacagtttctcattgttatattaggtaataataatatgttttttagtaaaaataatgtaagttttaacttcagctattctatgtagaataactaaaatttagaaataataatgatttggatcacagttttgtaatcacaatattcattaattaaatacaataaaataacaactggctaataaaatactcaaattacctctataattttgtg

SEQ ID NO: 713761 - DNA, 2408 bp, Homo sapiens
cacctcctcagagatctggattctttctccatggtgcacctcctccaagtttctcgggcacaaatatcagccaggcagcacaactcttcttagggttctaaataccagatccatgggccatcacttgcatttggacaggacgcttgttttagaggtccactgtgtctaacgggggtgcctgctcctcaaggcctcttctccaggcttctgcattctggtaatgccgacctctccttcttgtttctctgaccctacaggaggatggtctctaatatatcaaaatttagaagcttcgagaagaggccttgaggagaagcctgactaaatcacttgtcagcagttgcacctttaacatacactgtacatatctaaggaagcataaagcaatgaacagcatttactaaagtatgttcccatcaaaacctttcaggtatgaagtctttaccttgaatcagacctcatgttttatggttttcacactttctatgtctaattttcattgttgggaagaaaagtcatgagttaaattaggtaaaaatgcatcttactgagtttaaactaaacagtatttttagaaataagcagttaatctgaggataaagtcttacacaaaacaaataaacagagaaaaacccccaaaagtcaaggactgataacatagatcaactgatgttgacaagaactgaygtccacaagagcaaaatggaaagacaatctctggttttttgtgtgtcacagatgtgaaatatagttggcctgcagtgggaagaataccaagaataggtaaggatatcaccaaggaaggagagtacagttatcaagaaagacttgagataccagaccatcctacacagtacaatgaatggcatatgaagaagtggatgtacagagctaactgggacatcgcatggtactgatcactaccaggaagacatcggataggaacctgggtgaaatcagaaggaacaaaaagagagagaattataattgtgagaaatacaatcagtcttgaatgtctgacgactctgtgtgcattgcaaacctaattttctattggttctttctggaaaaagacaaaggctcactcagagggacctctgtgacttggccaggcatcggtttcatatactaacctatttctcagattgctgccctgcccaggagggttggacctctcagagttgagaaaagaagagagtcactgctcataaaaaccctgtggggcaagattagtttcatctcctctttactgaggagaaaactgagactcagataagcaaaagctgcctagctggcaggtgacagagctttgcttagaagccaagtgtctctgactccaaggtcgtctgatgtcatacctttccaactgtaagttcaaagtgtaggcagtttagaatttaggctacaatataaatcccttattaatatctctctctgtctctctttttactataattgggaaactctaactgtaagcttctttgggagcaaaaattttgtgatcttgtgatactgtctcagtattttttttcacctaaacaactctactctataactctcaagtttagtatttacttagaagcaggagatgtgaaaattttgagtgccctaagtatgtctggaaatacctcaatttgattttcacagtccagtgctactcaacaaactataactgagcacttactctgtgctagaaacagcatttctgctttccaaggacctctaaggtaagagataaataaacaaatagttttataacaacataacttaataaaaaatataaaattactatgagacttatgtgtaggatgttttgagtacaccgaataggaacacttaacccatcctggggtaaggttagtggtcagaagaggttccccataagagaaagaattcaagtcttgatgtctagtgcagaagtaggaaaagtgcaatctggggagtgggaacatctatttagaaaccaccaagtcacttcaaactcaactaccctcacttcatcctcaattacctccttgcatttgcatgtgcacacctctctctttctctcttacacacacacacacacacacacaatttcttatcgtggtgaataacaatcacacaatcatccatccagtactacaaatagaaacccaggagttgactttattatccacctctcaactatcaccaagtctatttctacctcctaaatatcttcttagttgcatcccacacataatgatatatcatatttctattactatttagttcaaactattttctatattgtgtctactgttaaatccatccaatgaatgttttaatttttaaatttataattgacacataataactgtatgtttatgtagtacaacctgatattttaatgcatatatgcatagtataaagattaaattggggta

SEQ ID NO: 713762 - DNA, 2408 bp, Homo sapiens
cacctcctcagagatctggattctttctccatggtgcacctcctccaagtttctcgggcacaaatatcagccaggcagcacaactcttcttagggttctaaataccagatccatgggccatcacttgcatttggacaggacgcttgttttagaggtccactgtgtctaacgggggtgcctgctcctcaaggcctcttctccaggcttctgcattctggtaatgccgacctctccttcttgtttctctgaccctacaggaggatggtctctaatatatcaaaatttagaagcttcgagaagaggccttgaggagaagcctgactaaatcacttgtcagcagttgcacctttaacatacactgtacatatctaaggaagcataaagcaatgaacagcatttactaaagtatgttcccatcaaaacctttcaggtatgaagtctttaccttgaatcagacctcatgttttatggttttcacactttctatgtctaattttcattgttgggaagaaaagtcatgagttaaattaggtaaaaatgcatcttactgagtttaaactaaacagtatttttagaaataagcagttaatctgaggataaagtcttacacaaaacaaataaacagagaaaaacccccaaaagtcaaggactgataacatagatcaactgatgttgacaagaactgatgtccacaagagcaaaatggaaagacaatctctggttttttgtgtgtcacagatgtgaaatatagttggcctgcagtgggaagaataccaagaataggtaaggatatcaccaaggaaggagagtacagttatcaagaaagacttgagataccagaccatcctacacagtacaatgaatggcatatgaagaagtggatgtacagagctaactgggacatcgcatggtactgatcactaccaggaagacatcggataggaacctgggtgaaatcagaaggaacaaaaagagagagaattataattgtgagaaatacaatcagtcttgaatgtctgacgactctgtgtgcattgcaaacctaattttctattggttctttctggaaaaagacaaaggctcactcagagggacctctgtgacttggccaggcatyggtttcatatactaacctatttctcagattgctgccctgcccaggagggttggacctctcagagttgagaaaagaagagagtcactgctcataaaaaccctgtggggcaagattagtttcatctcctctttactgaggagaaaactgagactcagataagcaaaagctgcctagctggcaggtgacagagctttgcttagaagccaagtgtctctgactccaaggtcgtctgatgtcatacctttccaactgtaagttcaaagtgtaggcagtttagaatttaggctacaatataaatcccttattaatatctctctctgtctctctttttactataattgggaaactctaactgtaagcttctttgggagcaaaaattttgtgatcttgtgatactgtctcagtattttttttcacctaaacaactctactctataactctcaagtttagtatttacttagaagcaggagatgtgaaaattttgagtgccctaagtatgtctggaaatacctcaatttgattttcacagtccagtgctactcaacaaactataactgagcacttactctgtgctagaaacagcatttctgctttccaaggacctctaaggtaagagataaataaacaaatagttttataacaacataacttaataaaaaatataaaattactatgagacttatgtgtaggatgttttgagtacaccgaataggaacacttaacccatcctggggtaaggttagtggtcagaagaggttccccataagagaaagaattcaagtcttgatgtctagtgcagaagtaggaaaagtgcaatctggggagtgggaacatctatttagaaaccaccaagtcacttcaaactcaactaccctcacttcatcctcaattacctccttgcatttgcatgtgcacacctctctctttctctcttacacacacacacacacacacacaatttcttatcgtggtgaataacaatcacacaatcatccatccagtactacaaatagaaacccaggagttgactttattatccacctctcaactatcaccaagtctatttctacctcctaaatatcttcttagttgcatcccacacataatgatatatcatatttctattactatttagttcaaactattttctatattgtgtctactgttaaatccatccaatgaatgttttaatttttaaatttataattgacacataataactgtatgtttatgtagtacaacctgatattttaatgcatatatgcatagtataaagattaaattggggta

SEQ ID NO: 713763 - DNA, 605 bp, Homo sapiens
caggagaatcaatggagcccagaaggtcgaggctgcagtgagccaagaacatgtcattgcaccctagcctgggtaacagagcaagactctgtctcaaaaacttgataaaataaaaaaagaggggatggttgtacaaccttgtgaatgtaattaatgaaaccaagttgtacatttaaaaatagttaaaacggcaaatgttatattttatcgcgacttaaaaattaataatataccaaaaaacattcactagtacactataaatgggtaaattgtatggtatgcaaactagatctcaataaagcaattagaaaataaaaaacataaagcagttcaggatacactggttctttttcctttatatcaggaaggaccagaagtactacagaaacagcaacatgttgaaatactcaccaccaaccaccatcactgttaccaagcccattctcccccaccatcctactttcagtaacagctaacatttaccaacaaaccccacatcacagacagaagcctaaacagaacaatgatgatgtcaggcacygttctaagacttcacatacatggcttcgtttaatcctcagaagagttctgtgacatagctacta

SEQ ID NO: 713764 - DNA, 605 bp, Homo sapiens
caggagaatcaatggagcccagaaggtcgaggctgcagtgagccaagaacatgtcattgcaccctagcctgggtaacagagcaagactctgtctcaaaaacttgataaaataaaaaaagaggggatggttgtacaaccttgtgaatgtaattaatgaaaccaagttgtacatttaaaaatagttaaaacggcaaatgttatattttatcgcgacttaaaaattaataatataccaaaaaacattcactagtacactataaatgggtaaattgtatggtatgcaaactagatctcaataaagcaattagaaaataaaaaacataaagcagttcaggatacactggttctttttcctttatatcaggaaggaccagaagtactacagaaacagcaacatgttgaaatactcaccaccaaccaccatcactgttaccaagcccattctcccccaccatcctactttcagtaacagctaacatttaccaacaaaccccacatcacagacagaagcctaaacagaacaatgatgatgtcaggcaccgttctaagacttcacatacatggcttcgtttaatcctcagaagagttctgtracatagctacta

SEQ ID NO: 713765 - DNA, 856 bp, Homo sapiens
cgcagactattggtgtgccctggaactgagcattagctgttccctctccgagttctctcccctacttccccagccttccaggctgggctgtgggtcactgcctccgaggagccctcctggattctgctgaagatggtcaggcccctccatccccccattttctcttatgtacctgacagccctgccttaaaaaaaaaaaaaaggtagagcaggaattcccatttcacaggggtggaagccgaggcttggaggagtcaggactggtgcctgagttctygcagtcaggaattgaccgcgctgggctgaacgcctctagggcaggttggggactgggtgtgttttctgggtggacatacccaggtcccggcgcggaccttggcctcctcatctgtgggcttagataaaggcctcccagcctcctgttcaccagggttgtcaccacgcagggtctgactcacctgcctggagctatgccggttcccagcccaggctggcggccgtgttctgctgggacctgggacctgggctgcctgccctcctgaggggtcccagtggtcggtcgcctgccttctgggtgggtgtggtagagggagggtcaggtggccccctgctgttggggggcagtcgctgtgggagtgagtcgtccccccgggccatagcaggtaggtaggaggtgctctggcagttgaggccgccctggcctgggacagtcaatcagcctgaacactgtgcctgttccgggattttgacctgccctccaagggcgcggcgggcccagcctgcagtgtcccggcagctgcctcctctctgggtcgtttgtttttcatcagacagaggttgtactcttggagggaca

SEQ ID NO: 713766 - DNA, 650 bp, Homo sapiens
ccgcggcggcctcagcaacaggacccagctttccttcctgcgaggcatgagtctggcccctgcccccgggctcctgaccctccagccaacccggcctcrgaatgagtggccccgagagggccccgggccacagggctgtggggacacctccagctgtaacaggcggcaggaccaggaggtgagcaaggggggaaaagcttccagaagttttcccagacgctgcgaccctgaggctgggccttcaaggatgaatggggcgagagtgggagaagggcttcctgggcagaggatgtgcggctgttgggacagtggcatctctaacaaaataccgtaggtggggcagcttagacacaacaaatttacttctcacagctttggagagcgtggaggttcaagaccaaggtgtgggcagctttggtatctgctgagggcctgtttttgttttttcgttgtttttgaggttagagtgcagtggcataatcttgactcactgcaacctctgcctcccaggttctagtgattcttctgcctcgtcctcctgagtagacaggattacaggcgcccaccaccaagactggctaatgtttgcattttttgtagagacggggtttcaccatgttgaccaggctggtcttgaactaccgacctca

SEQ ID NO: 713767 - DNA, 650 bp, Homo sapiens
ccgcggcggcctcagcaacaggacccagctttccttcctgcgaggcatgagtctggcccctgcccccgggctcctgaccctccagccaacccggcctcagaatgagtggccccgagagggccccgggccacagggctgtggggacacctccagctgtaacaggcggcaggaccaggaggtgagcaaggggggaaaagcttccagaagttttcccagacgctgcgaccctgaggctgggccttcaaggatgaatggggcgagagtgggagaagggcttcctgggcagaggatgtgcggctgttgggacagtggcatctctaacaaaataccgtaggtggggcagcttagacacaacaaatttacttctcacagctttggagagcgtggaggttcaagaccaaggtgtgggcagctttggtatctgctgagggcctgtttttgttttttcgttgtttttgaggttagagtgcagtggcataatcttgactcactgcaacctctgcctcccaggttctagtgattcttctgcctcgtcctcctgagtagacaggattacaggcgcccaccaccaagactggctaatgtttgcatttkttgtagagacggggtttcaccatgttgaccaggctggtcttgaactaccgacctca

SEQ ID NO: 713768 - DNA, 3706 bp, Homo sapiens
ggaatcactggggcttcttgggcgccgggaacctttcatggtgaaaatttccagggttctccaagtcagccactgccagtgtttgtctgtctcctgcaaagatttcttcttggctcccgaatcctttagttcctttgagagagtggtgtcagccccaaagctgctcccgaaggcttgggttgtgtagcgacggggctgtggccagcggcaggtggatgaggctctgacaactgagctcttgggggaatcttgtacactgtcagcagggggtggagccaggggatttgtcagcaggaactgatgtgattggctgttcctggtatgacaacgggaggggccctcatggaggattggggcgtaactcaatccatagatgaccgatcaacagaacctgcctaatcccatcaagagccaacctgtttcctgtcccctcccatcctctagctcttgcctaataatgatagacactttctgtcatacccaattcatccatcgctgaaatagtttttcatgtgtgccttttatattttcatgcaataaaaatatgttaattttcacggkggctatcctggggaatgctatgtacatgaaatgaagtgtcaaaggagcagaagcagaaggaaattcacaagcttctctgagcgtctctgcttcaattcctgccatgtttcctaaacatgttggcttctttcttcctacccaagtaagaaggtgcttcagaagatcaatcttagggcatttgacaaacgctgctgagaatttcaggatgacacgaaggaacctttgattggatttgtggatgtgcctgtgaaagcgtgtgtgtgtgtgtgtgtgtgtgtttgtgtgtgtgtgaagccaggatgaagtggctgttcctggggtggagacccttctttctcttgagaatgttcattgctgttgactcattgtgggttttggagatattttctctctttctttcgttctttcagacattttttgctttctccctccctcgatcctaacccccctctttccccccctcactccctccctccctctttccatccttcctccctcccttccctctttccttccttcctgccttcttcccttccccttcccctcttccttccgtccttccttcctgtgtgtaaaagaaaaattggtgaatagaagaataattgaataactgcctgagtcacttatacatttctcatctcactctggggacacagaagaccgtgttatactcatctcctcgattttaaaaacagtcattctaaaatcaaggattctagatgtatcacttctaggcgaaatcttgaaagaaaatgtgtaagagtttcatgtgctctttatctctatgatcacaattgaagaaggcaggaggttgagatgctgcatcgccaagatcgtggtgattccattatcattacccttgtaacttgtgagcatccttaccgccagcaatcattattagatatggaatctgatataggagttcatatttactgtatgaatatcttggtgtgggagtgttggctcatgcctgtaatcccagtgctttgggaggcagaggcaggaggctcgcttgaacccaggagttcgagacaagccggaagagcatggcgagaccctcgtctctacaaaaatgtaaaaatcagccaagtgtgctggtaggtgcctgtagtctcagctccttaggaggctgaagtgttaggatcgctttcgcccgggatgtaatggctacagggagtcgagatcttgccactgaacttcagcctgggcaacagagcaagactctctctcaaaaataaaatgctttttcctttaggcttaaattctaacactcaaacctccaaagcggaggtattaggaggtggggcccttgggagatgatgagattatgaaagtggaaccctcgtaaatgggattagtgcccttctgaaagtgacggaagagagctcgccagcaccttccatgtggggagacagggaggatatgacagtctccaacctggaagagggtcctcaccagaccccgatcatgctggcactctcatcgtggacttccggcctccagaactctgatcaacaaatgtgtgttcttaaagaaaaaaaaagtgtggaaagcaatgttaatgttcccaatcactttgagtacattctttccttaactatgtcttaatgcatagttgtgttggatggcctagtttgtaatgttagaatatgcatgttagtgaattaataaatacagcagtaaagaatagagttgtggttgggaatggtgtctcacgcctgtaatcccagcacaatggcatgccgaggcgggtcaatcacctgtagtcgggaggtggagatcaccctgaccaacatggagaaatcccgactctactaaaaatacaaatcagcctgtcatagaggcacatgcctttaatcccagctactcgggaggctgaggcaggagaatcacttgaacctaggaggcagaggttgcggtgagccgagatcgcgccattgcactccagcctgggcaacaaaagctaaattctatatcaaaaaattaaaaaaaaaaaaaagaaggctgtttgttgaccatttgagtggccagtcttggtgcttcctggtgggcgaggagagccctaccccattcctacccattccagtagtcatggcataagagtgattctcactttcttctatagcctccttatccattggctgaaatgattcttttttaatgtgtcttataaatgcttccatagcaaaaaaatttgaattgacttttatagggactctttcggggattgttacccatcattccataatttgtttgtactcctagaaaagggaagtatgccgagcacagtggatatttcgtctcaaataataaataaataaccaaatagaaaagaaagaaaaggaagtaaagggaaatatacaaatatacaaggtgttaggagagagttgctaatcgtgattcccccttaattgtccaaacagaccacctctggggatctattcgtaaaagactcgttagaagtgcagactcatgcatttgagaatcactcagggaaatctgaagatgacctgtggtgggggtgtaaatggatacttaaatgtgtcttgtgattgtgtgagagtgtgactgtgtgtttgtgtgtgtgctgtcatctgtggagtgggggatcctcttttgccttgagaaagctcatctctgtccacttactctgggctctaccatctgtgccttgtatccagtagaaataaaacagtttgcggcagaaatggagttttattttatttcactttactttttattaggattatttgtagaccgggtctcactctgtcactcaggctggagtgcaatggcacgatctcagatcactgcaacctgtgcctcctgcactgaagccatcctcccacctcagcctctggagtggggagatcccacacctgtgtaatttttgcattttttctagagatggggtttcctcatgctgcccgggctggtttccaacgcctgggctcaagtgatccacccgcctcagcctcccaaagtgctgggattacaggtgggagctactgtgcccggccagagatggagatttttgttcttcttttgatgagacggaacctcgcaccgtggcccaggctggagtgcagtggagtgacctcggctcactgcaagctctgcctcctggggtcatgccattctcctg

SEQ ID NO: 713769 - DNA, 632 bp, Homo sapiens
gtcatgattgtttccctctccacacctctttctggatgattgggcagctgtggtgatcctggagctctgggcttccatacctgtgtgggacagggaagctctctgggtctccatggcccaagtgatggctgcacgctcggtccaggaagaggcggaggcaagcccaccgctcctgacattggccttctaggaaaggcggtgttgcatcccacctgcacttcctctctgattcttgagggccaaccgcttcctccgctcctggggaaagtgccttctagcaccgaatcttttggctgccacggatgtcagggagccaacgggactgggttttggctgggtgcaggggaggttgcgtcaggggtacctagccggcggcgggctgggggtggggtgtactttgtccaaacctctcggctcctctggcgggcctccctgaacgtggcgtggactcgcgcacaggccctgtctcgcaggttttcaggtgcgcttggcttttcctccgctttgtggggcaggtctccagtggccccccgggcgcacgcctggacatcactgtccgtctcgtcgtcgccccctacggcctcaaagacacacgctgcctgcatgtgctcttgggrgacgacagtgccaca

SEQ ID NO: 713770 - DNA, 1101 bp, Homo sapiens
tcgaacccctgacctcaggtgatccgccagcctcggcctcccaaagtgctgggattacaggcgtgagccaccatacccagccagcatgactattaactgaaaaaaaaaaaaaaacctcagggtgtggaagtgctcagaggcattcaatgytgatgtagcgtgtcaaggaagcagtctcttaagtgttgggcaaatgaaaggaataagacaaaatgaagtgtttatcaagctcaaaagcagaaggttgtacctgattatttctaaggtctttcatttgctcatttaatctaagctacttcacatcatttgaagagaaagtaaattatctcgctttctgagatgcaggagagattccccgtccccaaatcccactatcatcaacaacacaacttcctcaagttcttcactcacacacataccacctgctgaaccctgaagcttcagtcactcattcctagctactccaaccacaagggacctacgggcctgccaaccaggcacacgccacgccctccctatggtggactcctattcatcctccaagacccaatttaactcctcctctctgaagccttcccctagccccctggtggggataatcactcccttcttggtgcctcatccgaatgccttctttagacatccctctactgtgcgtctgccccattatactgtcagctccttgaggccaaggaataagtctgagggctgtgcctaggataggatgaatggcggccattttacagatgagaaaagcaagtctccaggtgaacagaggagctgaggaaactgaccaacagccagatctcccgactcgtccagactttaaaagctgagtccaccattaccctcatccagcgaccccagaacccgcgccaacttctggggacgcggaagcctggaaactcaagttttctttagggaatgaatggacaggggcccgtggaaggcgcagagaggcagcagacggggagagaaccaagaacccgccagtctggcttcagattgctccgctggaccgcggtagcggccagggattctacggtcaagacaacttgggggtggccggtcgaccaccagaacccgacagagaggaattca

SEQ ID NO: 713771 - DNA, 1101 bp, Homo sapiens
tcgaacccctgacctcaggtgatccgccagcctcggcctcccaaagtgctgggattacaggcgtgagccaccatacccagccagcatgactattaactgaaaaaaaaaaaaaaacctcagggtgtggaagtgctcagaggcattcaatgctgatgtagcgtgtcaaggaagcagtctcttaagtgttgggcaaatgaaaggaataagacaaaatgaastgtttatcaagctcaaaagcagaaggttgtacctgattatttctaaggtctttcatttgctcatttaatctaagctacttcacatcatttgaagagaaagtaaattatctcgctttctgagatgcaggagagattccccgtccccaaatcccactatcatcaacaacacaacttcctcaagttcttcactcacacacataccacctgctgaaccctgaagcttcagtcactcattcctagctactccaaccacaagggacctacgggcctgccaaccaggcacacgccacgccctccctatggtggactcctattcatcctccaagacccaatttaactcctcctctctgaagccttcccctagccccctggtggggataatcactcccttcttggtgcctcatccgaatgccttctttagacatccctctactgtgcgtctgccccattatactgtcagctccttgaggccaaggaataagtctgagggctgtgcctaggataggatgaatggcggccattttacagatgagaaaagcaagtctccaggtgaacagaggagctgaggaaactgaccaacagccagatctcccgactcgtccagactttaaaagctgagtccaccattaccctcatccagcgaccccagaacccgcgccaacttctggggacgcggaagcctggaaactcaagttttctttagggaatgaatggacaggggcccgtggaaggcgcagagaggcagcagacggggagagaaccaagaacccgccagtctggcttcagattgctccgctggaccgcggtagcggccagggattctacggtcaagacaacttgggggtggccggtcgaccaccagaacccgacagagaggaattca

SEQ ID NO: 713772 - DNA, 655 bp, Homo sapiens
tttctttttcttttgctttcacttagtttttcactttataacccatgatgtcatgtaaatagtagtatattggaaggcaagagccataagaatgagtaacacgtaagtaatgataatcaatcaaacatcatcatgaaaaawatatatatatatataattaggaggaactttttttctcttctaatacatttgatgaaggaaatgataaaaacagatggtgaacactttatgttgggtaaaacattcagggcagaatgactcctagtatgcaatattggacattcctaaagatactgccaatgctgtctttttgtcagcctcagctcatgcatatacacaaatgatcagtctaagattatcaacctatcaattaatttgtagattactatatataccagtactgtgaatcacaaataacatttgtcatctgggatattcagataataaaaagcagagctaaacatcagagtccatagcatgtcactcagctttgacgaatgcattaaaattgtgtataatgttaatatactcatgttaaacattaaaaataaaagcataataatatcaaatccattatttattcccaggtgagttttaactacataagaaatacaaaagttaactgcacttatcttaaggctgtatttctaaacag

SEQ ID NO: 713773 - DNA, 635 bp, Homo sapiens
tgaaacagtctcactccatcacccaggctggagtgcagtggcacgatattggctatcgacaacttccgcctactgggttcaagcattctcgtgcctcagcctcccgagtagggagggattacaggtgcctgccaccacgctgggctaatttttgtatctttaatagagacagggttttgccatgttggccaggtgaactgctgacctcaagtgattcacccgccttggcctcccaaagtgctgggattacaggcgagagcgaccgtgcccagccagcagtatagttttgaattgcaaataattctaatcattttcttccctttgcaaggtaacaaacacccacctagaagatacacataggcaaaaagaagacagtaaaaatactcatcatctcaagcaaatcactgttaacatttgatatatatccatctgcatgtgtatcagtgtgtaaactgacaaaaatggcaacatactacaatatkttttctaacaatctaccatgaccatctttccatgtctatgaatatttatatacagcataattttttaaagccaaataatgttccgtcatatggctgtccataatttaatcctcttattcttgagcatttagactattgccaatttttcactat

SEQ ID NO: 713774 - DNA, 636 bp, Homo sapiens
cagcctcccctagagggcttgtgaaacgcagattgctgggccccagcccagggcttccgcattcagcagctcaaggctgggcccaggtcatttgcatttctaacgagctcccaggagaagctgatgttggaccgcacctcgaggaccactgttcaaacgaaagccatattctttttttcctttttcttttctttctttcttttttttttttttttttttttttttttttttttgagacgagtttggctcagttacccaggctggagtgcagtggcatgatcttggctcactcsgagatctccgcctcccgggttcaagcaatcctcctgcctcagccttccgagtagctgggattacaggcgtgcgccaccacacccggctaatttttgtatttttagtagagacagggcttcaccatgttggccaggctggtctcaaactcctgacctcaagtgatccacccacctgggcttcacaaagtgctgggtttacaggcgtgagcccccatactcggccacgacagccatattctaaacccaggaaggagcctgtgcataggcatgtatataaataggtaagttaatgatataaaaatagaaaataccagtgcttcttacacttccacttggggaaatc

SEQ ID NO: 713775 - DNA, 636 bp, Homo sapiens
cagcctcccctagagggcttgtgaaacgcagattgctgggccccagcccagggcttccgcattcagcagctcaaggctgggcccaggtcatttgcatttctaacgagctcccaggagaagctgatgttggaccgcacctcgaggaccactgttcaaacgaaagccatattctttttttcctttttcttttctttctttcttttttttttttttttttttttttttttttttttgagacgagtttggctcagttacccaggctggagtgcagtggcatgatcttggctcactccgagatctccgcctcccgggttcaagcaatcctcctgcctcagccttccgagtagctgggattacaggcgtgcgccaccacacccggctaatttttgtatttttagtagagacagggcttcaccatgttggccaggctggtctcaaactcctgacctcaagtgatccacccacctgggcttcacaaagtgctgggtttacaggcgtgagcccccatactcggccacgacagccatattctaaacccaggaaggagcctgtgcataggcatgtatataaataggtaagttaatgatataaaaatagaaaataccagtgcttcttacacttccacttgggraaatc

SEQ ID NO: 713776 - DNA, 2573 bp, Homo sapiens
agtactttagtgctttctcttttttctttttttttttttttttttttttgagatggagtctcactctgttgcccagactggagtgcagtgtcgtgattgcggctcactacaacctctgcctcccgggttcaagcgatccccaccccacctccacctcagcctcccaagcagctgggattacaatcgtgccccaccacgcctggctgatctttgtatttttaataggggtttcaccatattggccaggctggtctcgaactcctgacctcaagtgatccgcctgcctaagcctcccaaagtgctgggattacaggcgtgagccatcgtgcctggccagtgctttctcttctttaatgcagcttgaatttcgcattaattctaagtggagaaatctaccactttttcatggccttctttacttttttactcatagcccctcctttttagtctttyacccttcagaacaacataattacattttgtcttcgttcctaccatcatcagcaattcaaaaataactccaaactccaaattcccgcaatgaagtgaaacggtgttggttttgcccccatgataatcacttgcccatagaaaattattttgttaatttattcttaaatgtgacattgtattctgttttcttagaaaatagcaactcagttatatgctctaagtataccatgcaaatttaagtaaaacatgtttattaaaacttatatatatggtaagcattgtggaaggtgctagaaatataaggatgaggtctagtagggcaaatagaggcaaaatatagatatctagcgtgcagtgtgatggggaatatataatgtagttgttattgtagttaccaaattgttaaaagatcaaatcattattaatggttaatggaattatggtggtgagaggggccagccaggggtgggtaggaaataagaaatgtgattattgagaaattagtttcataatgtctgttctgctaactgttccttttttttaattactgaagtgaaattcacataacataaaattaacgattaagcagttgctgtcatgctcccttccccgcaatccctggcaaccaccaatctgcactctgtctctgaatttaccagttctggatatttcatgtaaatggggactcatacaatatgtgagcttttatatctgacttcttttccttgtaatgtttttcagtttcatccacattgtagtatgagtatttaatttatttttatgactgaataatattccattgtatggatatgccacaatttgtttatccattcatctgttgatgacatttgggcagtttctgcctcttggctattgtgaatagagttgctatggacatgtgtgtacatgtatttgtttgagtacttgtttccaattcttatttcacctaggagtagaattgctgggctgcaattgttataaactaaaattatattcagtttagaaaagaacttctttaggaaagactttagaaagaactgctaaatgttctaattttgtatcttatggtcttttcctctgataaaaatgataccatttagagccagtgaataacttgccatgcagtttcctgatttctctccccctggctgttgcctttactagttggagcatttcggtaatgcataaccatgtttctcttcttgactttctcttcacagtctacagtgattattccaaacctccttcactggcctcaaaattaactttccctttacccatctcacttggaacagatgacctttctttcaacttctccaaaaagttaaaagccattatctgggaactccctagatgtcccagaccaaagctgtaaagcttcttgcagcagtcgccaatcctcattgccctcctattatgatagaggaagtgtctcttaataaaggatgtctttgtacatctgtccccttcctactgccttcaaggtacctgctatctcttatgctcttgttcattctctcatttgtattcattcttatttctttcttctccccttccctctcttttgctcttcatcaattataaacttgctcaattattttccaacttcaagtttcacaccctcaagttttcactttctcccttgctcttcctgggcagcatcttgaaagcatgcttacactcttgcctctcgttcacacctgacctcctccaacctgacttacatccatcactttacaaaagtagctcctccagggattaaaacagcagcatttgacacacttgatcatgcctcctttaaaaactcttacacacaccctcctggttccctccgcctttttaggcagcttcctctgccttcctttgttggatcttccttccctatctgacctgtaacagggcttctatttgttggctttcttaagagctcagtcccgggctttcttttcctctctatttatattctctacctcagcaaactcctgtggcttcaaatactacataagtgacaacttccaaattccactctctgccaagaccttctgaaatcgggacccatgtagccaactgccattttaacatctccacttcctattcaaacatgcccaagactgcgcttc

SEQ ID NO: 713777 - DNA, 632 bp, Homo sapiens
cgctgaaggagcagggccaggtgtggaagatataaatggagtagagaagaagcttgaacagattaaaatsagatcagagacaattttccacatgtttagactactaaataagcaccagaattagagggaaggctgctactcgcttggagggaaagaaagagacttggagacttttagccttttcatcaaagttcatctctctttctctctctgtctcatctgcctttcatggtatccggaccaaggttcgtgcatttgcaagagtttaacttaatcatcctggacattgtccttgcagaagtgctgcttctattgctgaaaagtcctgaacatagtgaaatattatagtaggctccttactcaaggaatctcctctccagggttacctgtaagctgaaatgccttgggccactgctgctaattttagttactcctttgttttcagcagtggacatttagattcttattaaatctttttcctccccctagtccaaacaggaaatattccctgaaagtagaccatacaggaaagtatgccagagagccaatgcccctcagcctgtgttgttaacatgttgtgcagcttactcagaatgctacatcagagacatcctccttgacgtccccctacc

SEQ ID NO: 713778 - DNA, 632 bp, Homo sapiens
cgctgaaggagcagggccaggtgtggaagatataaatggagtagagaagaagcttgaacagattaaaatcagatcagagacaattttccacatgtttagactactaaataagcaccagaattagagggaaggctgctactcgcttggagggaaagaaagagacttggagacttttagccttttcatcaaagttcatctctctttctctctctgtctcatctgcctttcatggtatccggaccaaggttcgtgcatttgcaagagtttaacttaatcatcctggacrttgtccttgcagaagtgctgcttctattgctgaaaagtcctgaacatagtgaaatattatagtaggctccttactcaaggaatctcctctccagggttacctgtaagctgaaatgccttgggccactgctgctaattttagttactcctttgttttcagcagtggacatttagattcttattaaatctttttcctccccctagtccaaacaggaaatattccctgaaagtagaccatacaggaaagtatgccagagagccaatgcccctcagcctgtgttgttaacatgttgtgcagcttactcagaatgctacatcagagacatcctccttgacgtccccctacc

SEQ ID NO: 713779 - DNA, 645 bp, Homo sapiens
gcttattacctgaatgacagaatattctgtgcaccaaacccccatgacatgcaatttccctttatataacaaacctccatgtgtacccctgaacctaaaataaaaattaataaataaataaaatttaaaagtaaaaataaaaataaaggaaggagaccaagaaatacttaagggcccactccccttctttctgaacaaaatagccagaccagcctctgccactgattgaaccagggattggaaactaacataaagcagccaccacctctaggatgagcataagattatcagtagcctgtgaggaaacttggtaataaaactctgactggtagtgacactgtatgaggtagtgtgggcatctaaccaaccaatgtggtggtcctcttgtggacaggagagggtatgtggtgtgtacaacaggaaaaacacattaaaactctagaaacccaaacagagggagtaggagggrccataaaatgtctgacttctcaaatggctgatgagctcctagaggtgtccttggtctcttccccagaggcaaatttcaactagaggttgaagctaagaagcttatcaagactcagggcttctcacttttcccctcacaggcccactccaaggctctgatttcctgggctctctttg

SEQ ID NO: 713780 - DNA, 2300 bp, Homo sapiens
tggcacatttagcaaaatgtatcaaaactgttaaaaaatgacacaccttctgacctcgcaattccaatttaaggaatttccctaaggagttaataatagtttcaactattcagttacaagaatatcactcaaatagagttcataaaagcaaaataatagaaataatttaaattcacttagaacatctatatatggaaatgttaacctagctaataaatacagtgctgtagaaaaatatcttattgaatgtgttctgaatgccttgtaaaaaataatttagacagctgttgccaggcacagtggctcatgcctataattccagctacttgggaggctggggtgggaggatcacgtgaggccaggagttcaagaccagcctgagcaacataatgagaccctgtctctacaaaaaaattgttttaaaacttatccaggcatggtgatgcacacctgtaatcccagctgctcttaaggctgaggtgggaagatcccttgagtgcagcagatgagttccaggctgcagtgagctatgattgcatcactgcactccagcctcagtgacagagggagaccctgtctctaaaacaatcaaacaaacaaacaaaacctatatacagtgctatccaagttatgcacacatgcataaacgtactcgtgtgcacatggacccaaaggaaatgtacccaaatgtttacctaccattacgtcttcacagcggcacctcctccctgcttttccctccttcatattttgggaagttttctagtaggagcagccatgtsttttccatacaactctcctgtcatagcttcagttaattgatccaagagtggactttccatctaagctggacaatcagtgtctttctggaaatttcttcgaaatggctgctgtcttgaaccaaggagtttggaaacttgaaagatgttgttagtgactgttttaagcatcacagacatagaaagaaagccaatctgcagaaagatataggattaaaacagctgtgcagaggagcaattgtggaagagaggagagggagggaaagagtaagaatgaatggacttcctggatttccttataatgttccagtctgcaactctaatccattctggaggcccagcataataaaataataatgatagccaatgtttattgaacacttaatgtgtgcttggcataattctcacaatgatcctatggatgttactgttctaatccccattatggcaatggaataaaggcaaacttttcttaaaatccttactaatttgctttcacagaaactgccagatctcccctctctccccagttccctttcctgcctcctcttttcttcactgcctcccctccccacaagatcttcccctttaggtcaatctttcctttccatatgcagtgctttctctgggcttctttatttgtataaccattatatcagtaaggaattgcatttgacaaatggaccacagggacttaaaaacctgggatgttggttcagcagctcaaggacgtcaggtcaaagattactgtggatttctggtttccccttgtggccccagcagctgctttgccaatccatctaatctgcattccagccagaagaccctgagggcactgggctccctggagaaaaattcattgcatgttttacggcaggaaatatcaagatgagtctggaaatatcttcttattgccagaaaacaaacatactttcaaagacccttggaagacaagctaagttatgtctagtcataaattttatctagaaataagttttgtaaccattatagtattttgtgtatatttttctgctttttaaggtaagtaaagagactgattcattagactcaaaatattagtaaaaatttataagatgttgataactaagtttgaaataatgttcaaatgtttaaattgttaaatctttaaatttataatttattaaatttgtaaggttaaactttttaagttcagtatgttttcagtgtttattaagattttgcctatagaaatgtgagtctgctttgttgtttttttccttgagaaatcaattaaaattagattgtagtttgaaatgtctaaaacttaattctgaaagtttgataaatatttgggagtaccttatcaaatttacaagccagttgggcattcatcaaaaccaaataaaagtagataataaaatattaacaaaactgatttataaattaacacaagtttaaagtcttcaaaattaagttttaaaacatataatttaaatatataaaatataagttgaaattaaagggagtatttatttcaat

SEQ ID NO: 713781 - DNA, 590 bp, Homo sapiens
ttttttttttttttgagacagggtctcgctctgttgctcamgctggagtgcagtggcatgatcatggcttgctgcagcctcgacctctcacctcagcctctggagttgctgaagtgtgtgctaccatgcctggctagttttttgttttgtagcgatggggtcccactacattgccctggctggtcttcaattcctgagctcaagcaagctactgctttggcctcctaaagtgctgagattacaagtatgagccactgcatccagccttagctgatttttaacacaacctattctgctaaattaaaataactatattttgcaaatattgtcaaggggatttatacctgaacttagaaattcagttctcaacttaaatacaaaatgcatctgtctacatctacattaaaaacaaagcaaaaccaagtaatcaaaacaaataatcaaatcgatacaaatccaccagtggtcattttgtgttgcctttaagaaatggcaaacaaactgcctcctctacaaatgggtaatcatatcatctactgaaacgtacactttggagcccagcgtggtttttgctgtctgaatcaggggtt

SEQ ID NO: 713782 - DNA, 590 bp, Homo sapiens
ttttttttttttttgagacagggtctcgctctgttgctcaagctggagtgcagtggcatgatcatggcttgctgcagcctcgacctctcayctcagcctctggagttgctgaagtgtgtgctaccatgcctggctagttttttgttttgtagcgatggggtcccactacattgccctggctggtcttcaattcctgagctcaagcaagctactgctttggcctcctaaagtgctgagattacaagtatgagccactgcatccagccttagctgatttttaacacaacctattctgctaaattaaaataactatattttgcaaatattgtcaaggggatttatacctgaacttagaaattcagttctcaacttaaatacaaaatgcatctgtctacatctacattaaaaacaaagcaaaaccaagtaatcaaaacaaataatcaaatcgatacaaatccaccagtggtcattttgtgttgcctttaagaaatggcaaacaaactgcctcctctacaaatgggtaatcatatcatctactgaaacgtacactttggagcccagcgtggtttttgctgtctgaatcaggggtt

SEQ ID NO: 713783 - DNA, 590 bp, Homo sapiens
ttttttttttttttgagacagggtctcgctctgttgctcaagctggagtgcagtggcatgatcatggcttgctgcagcctcgacctctcacctcagcctctggagttgctgaagtgtgtgctaccatgcctggctagttttttgttttgtagcgatggggtcccactacattgccctggctggtcttcaattcctgagctcwagcaagctactgctttggcctcctaaagtgctgagattacaagtatgagccactgcatccagccttagctgatttttaacacaacctattctgctaaattaaaataactatattttgcaaatattgtcaaggggatttatacctgaacttagaaattcagttctcaacttaaatacaaaatgcatctgtctacatctacattaaaaacaaagcaaaaccaagtaatcaaaacaaataatcaaatcgatacaaatccaccagtggtcattttgtgttgcctttaagaaatggcaaacaaactgcctcctctacaaatgggtaatcatatcatctactgaaacgtacactttggagcccagcgtggtttttgctgtctgaatcaggggtt

SEQ ID NO: 713784 - DNA, 590 bp, Homo sapiens
ttttttttttttttgagacagggtctcgctctgttgctcaagctggagtgcagtggcatgatcatggcttgctgcagcctcgacctctcacctcagcctctggagttgctgaagtgtgtgctaccatgcctggctagttttttgttttgtagcgatggggtcccactacattgccctggctggtcttcaattcctgagctcargcaagctactgctttggcctcctaaagtgctgagattacaagtatgagccactgcatccagccttagctgatttttaacacaacctattctgctaaattaaaataactatattttgcaaatattgtcaaggggatttatacctgaacttagaaattcagttctcaacttaaatacaaaatgcatctgtctacatctacattaaaaacaaagcaaaaccaagtaatcaaaacaaataatcaaatcgatacaaatccaccagtggtcattttgtgttgcctttaagaaatggcaaacaaactgcctcctctacaaatgggtaatcatatcatctactgaaacgtacactttggagcccagcgtggtttttgctgtctgaatcaggggtt

SEQ ID NO: 713785 - DNA, 590 bp, Homo sapiens
ttttttttttttttgagacagggtctcgctctgttgctcaagctggagtgcagtggcatgatcatggcttgctgcagcctcgacctctcacctcagcctctggagttgctgaagtgtgtgctaccatgcctggctagttttttgttttgtagcgatggggtcccactacattgccctggctggtcttcaattcctgagctcaagcaagctactgctttggcctcctaaagtgctgagattacaagtatgagccactgcatccagccttagctgatttttaacacaacctattctgctaaattaaaataactatattttgcaaatattgtcaaggggatttatacctgaacttagaaattcagttctcaacttaaatacaaaatgcatctgtctacatctacattaaaaacaaagcaaaaccaagtaatcaaaacaaataatcaaatcratacaaatccaccagtggtcattttgtgttgcctttaagaaatggcaaacaaactgcctcctctacaaatgggtaatcatatcatctactgaaacgtacactttggagcccagcgtggtttttgctgtctgaatcaggggtt

SEQ ID NO: 713786 - DNA, 620 bp, Homo sapiens
aaactatagtaagagtatacaaatatatttatgttaagagattaaaactatgtcagaaatatagactaacttcataggaaaacaaataatattttattttttaatttataggtaaacaatgctgatagctcattacacaaaaggtaaaaattcttaaagatacaaggcaaaatttatgctttcatagggtcaaatactaatactcaggattrtaaactttgattgctttattagaatcgcttagagtgagaatgcattataagtgaaaaccatcgaaataaatatttttccatgcccagaacaaggcaatataggaggtatgtaagcaaatggagatcgatgaagaggtaattggtgaagaaatacaaatcccttatttaagatctcacacacacacagacacacacacacacacacacacacacacacacacaaaatgcttcaaagcttaggcagttgttgaaagctttgaaaaaagcaaaagcgaaaacataaaactcttacaaaatgacaacttaaatatagggatcttctgtaaaatgattagataagcacactgtgtgtgtgtgtgtgtgtgtgtgtgtttatgaatgcattgaaacaaacagatactgtatgtg

SEQ ID NO: 713787 - DNA, 620 bp, Homo sapiens
aaactatagtaagagtatacaaatatatttatgttaagagattaaaactatgtcagaaatatagactaacttcataggaaaacaaataatattttattttttaatttataggtaaacaatgctgatagctcattacacaaaaggtaaaaattcttaaagatacaaggcaaaatttatgctttcatagggtcaaatactaatactcaggattgtaaactttgattgctttattagaatcgcttagagtgagaatgcattataagtgaaaaccatcgaaataaatatttttccatgcccagaacaaggcaatataggagktatgtaagcaaatggagatcgatgaagaggtaattggtgaagaaatacaaatcccttatttaagatctcacacacacacagacacacacacacacacacacacacacacacacacaaaatgcttcaaagcttaggcagttgttgaaagctttgaaaaaagcaaaagcgaaaacataaaactcttacaaaatgacaacttaaatatagggatcttctgtaaaatgattagataagcacactgtgtgtgtgtgtgtgtgtgtgtgtgtttatgaatgcattgaaacaaacagatactgtatgtg

SEQ ID NO: 713788 - DNA, 1711 bp, Homo sapiens
ctttaaatgagtaaatatttctttttaaatgaaaatttgaaaataaatttaatcttctctaagcaaattaaagaagaatctccctttacctttatattttaaagtcataatttgctggaatttagttttattgcaagatgccctccaatgaattttcaacatactagcggtttttgtatgcaatcctatattgatctcaaattagtaatggttgcttgaaatgatgtaatgcatattaattcataaacacatagatggtagttctctaagaaattggaataactggacataaatctactgattggaaagaaggataccattccaatttgtcatatagttgtgttgattttttttatatgagaggaggcagagactcgtaccaaggaactcatggaaaagttcagggacatttctttgataaagctgattttaagtgatacttcactctaagaaaacttattgcccttaattaatttttattatttacctaataataaaaggtagtcaaaattattttatactttctaaactatagttttctcttagtattgtaaagttgagtccctgttttaatcaaaagattagttttccttaagcaaatatttgcaaagcatactcaatgtagtcacaatactcaacaattccatatgcctttaaaaagcaagtatattctgacatgagagacattagttggaattcactaactacytataaacagcccatacttactgcaattaacatatataaagaaaataatattttaaatgtttaatgcgacagcatgtaacattgttgaagaggaaaaaatgttaacgtatttgtaattgatgttagttttaactgatcttggaagaatagtaagagatgcagaatgtgatggaagatcattgattaaattagatttttagatctctgcattttttatttatttaagctttagaatcatttatcagtcaacaatggaattttgtttgtattattaaacttcaccatacttttcataaaaacaagttgtaaaaattctattaaaatgtaaatgtccaaaattgtgtagttatgttgtcttcaccagatgtagccttagatttgatgagtctaataagaagaaaattctaacaatattttcagattttataactatatgattttttattatatattctgatatccagatataagtgttatttcatgtaaaaattactattaaataaacccataacattttattaaaattcatttgtgccatatgaggtaaattataagcaagccaataagacaaaaaaaaaccagatataatttgattaaaatactggggagaaagttaccttgagaaattgactcaaacatcacttgagagttatttataacttgaatgtttaaatttggccactcaaaggagctttttgtccaagagcttaaaaaaggaaagttttttctgaaagtaatcttctaatgattgtgttattgaccttcttctataacatgagatttacttttactcctttcatgtttacttgacctctaaaatatctttatttttccaatcatatcagtgttgatttttcctccaaaaatcagtgtgtgggaacattggtgtatttaactgaagtttgcaaaaataattctattaatcatttgattcatttgaatacttatgcactattttagattttctatacagaatatatgggaccactgtttcccagaagga

SEQ ID NO: 713789 - DNA, 1571 bp, Homo sapiens
tccctcaggttgatagctcaatccacaagactgcctaaccccacaccaggcacaatttcgggcctccaggacttctgacctaagcttcaagttgaggtttccatgaccccctctttgggtttaattaattagctggaacggctcacagaaatcaagaaaacacttacatttacaggtttattacaaaggacaccacaaaggatgcaaatgaagagacacatagggcaagatatgggggaaaaggcatgagcttctatgacctccctgggaatgtcaccctctaggaacctccacatgttcagccatgtggaagctctccaaacccagtacttttgggtttttgtggacaaccttgtagaaatgtaactggcctccaggttgtggggtgagaccctggaaggtcatatgaccaactataagaaagtcaggggaagatttgtataaggttaaggtcacatttgaaaagtaaaagacatttccccaggttgttatctgctcctgcatctaaaatatttaaactacattagagatttaatatggttttcctattgttcatgacaactttttttctccagtatatctaaatttgtattctactgaaaatgttattcctttttacctaatcttttactatttctaaaaaagtttttagattttcttgtgtttctcagtacaccttgctattacctgaaaatcttcttatttatattaattatttgtagttctttgactatctgttgctttgactggcttttctggaacaatgtaacataatgaaattttcggtcctctaattttgtttgaatgatttttactgtttcatcactatgtaacatgtttacaattgctttgtaataaatattttataacactaagaatggatcctagtcttttaaaatactatattatttaagagttttyaatgtcagttttatcagtcttttgcaaattaggttaaaaaatggtagaatgttttgtgataccgcttgttagaaacatttaaaaaaattcattgaaaacttcttttgacctaaatatttggtgtggtaattggaaatattttttattcttgtctatatatgatttctttactgttgaggttttgtgtgtgcatgtatttttaattttatttttagaagttttaagttcacagaaatattgagcaaaacatacagagttcccatatatcccttgttccccgccttagcctatccaactatcagcatcctataccagaatgatacatttgttaaaatcaatgaatctaacacagtaacacattattatcatccagagtcaatagttcacattacagttcaccagcagcgttgtatattccgtaggttttgacaaatgtataatgacatttatctagcattgtagtatcattcagaacagttttcactgccttaaaaatcctctgtgctcctgcgagagtcttctgtcccttcccccagagcaaccactgaatgttttattttctttgtactttttgccttgtcatgtagttaaatcatgcagtttatggatttttaaaatgacttatttcacttagtaatatgcatgtaaat

SEQ ID NO: 713790 - DNA, 1571 bp, Homo sapiens
tccctcaggttgatagctcaatccacaagactgcctaaccccacaccaggcacaatttcgggcctccaggacttctgacctaagcttcaagttgaggtttccatgaccccctctttgggtttaattaattagctggaacggctcacagaaatcaagaaaacacttacatttacaggtttattacaaaggacaccacaaaggatgcaaatgaagagacacatagggcaagatatgggggaaaaggcatgagcttctatgacctccctgggaatgtcaccctctaggaacctccacatgttcagccatgtggaagctctccaaacccagtacttttgggtttttgtggacaaccttgtagaaatgtaactggcctccaggttgtggggtgagaccctggaaggtcatatgaccaactataagaaagtcaggggaagatttgtataaggttaaggtcacatttgaaaagtaaaagacatttccccaggttgttatctgctcctgcatctaaaatatttaaactacattagagatttaatatggttttcctattgttcatgacaactttttttctccagtatatctaaatttgtattctactgaaaatgttattcctttttacctaatcttttactatttctaaaaaagtttttagattttcttgtgtttctcagtacaccttgctattacctgaaaatcttcttatttatattaattatttgtagttctttgactatctgttgctttgactggcttttctggaacaatgtaacataatgaaattttcggtcctctaattttgtttgaatgatttttactgtttcatcactatgtaacatgtttacaattgctttgtaataaatattttataacactaagaatggatcctagtcttttaaaatactatattatttaagagttttcaatgtcagttttatcagtcttttgcaaattaggttaaaaaatggtagaatgttttgtgataccgcttgttagaaacatttaaaaaaattcattgaaaacttcttttgacctaaatatttggtgtggtaattggaaatattttttattcttgtctatatatgatttctttactgttgaggttttgtgtgtgcrtgtatttttaattttatttttagaagttttaagttcacagaaatattgagcaaaacatacagagttcccatatatcccttgttccccgccttagcctatccaactatcagcatcctataccagaatgatacatttgttaaaatcaatgaatctaacacagtaacacattattatcatccagagtcaatagttcacattacagttcaccagcagcgttgtatattccgtaggttttgacaaatgtataatgacatttatctagcattgtagtatcattcagaacagttttcactgccttaaaaatcctctgtgctcctgcgagagtcttctgtcccttcccccagagcaaccactgaatgttttattttctttgtactttttgccttgtcatgtagttaaatcatgcagtttatggatttttaaaatgacttatttcacttagtaatatgcatgtaaat

SEQ ID NO: 713791 - DNA, 1571 bp, Homo sapiens
tccctcaggttgatagctcaatccacaagactgcctaaccccacaccaggcacaatttcgggcctccaggacttctgacctaagcttcaagttgaggtttccatgaccccctctttgggtttaattaattagctggaacggctcacagaaatcaagaaaacacttacatttacaggtttattacaaaggacaccacaaaggatgcaaatgaagagacacatagggcaagatatgggggaaaaggcatgagcttctatgacctccctgggaatgtcaccctctaggaacctccacatgttcagccatgtggaagctctccaaacccagtacttttgggtttttgtggacaaccttgtagaaatgtaactggcctccaggttgtggggtgagaccctggaaggtcatatgaccaactataagaaagtcaggggaagatttgtataaggttaaggtcacatttgaaaagtaaaagacatttccccaggttgttatctgctcctgcatctaaaatatttaaactacattagagatttaatatggttttcctattgttcatgacaactttttttctccagtatatctaaatttgtattctactgaaaatgttattcctttttacctaatcttttactatttctaaaaaagtttttagattttcttgtgtttctcagtacaccttgctattacctgaaaatcttcttatttatattaattatttgtagttctttgactatctgttgctttgactggcttttctggaacaatgtaacataatgaaattttcggtcctctaattttgtttgaatgatttttactgtttcatcactatgtaacatgtttacaattgctttgtaataaatattttataacactaagaatggatcctagtcttttaaaatactatattatttaagagttttcaatgtcagttttatcagtcttttgcaaattaggttaaaaaatggtagaatgttttgtgataccgcttgttagaaacatttaaaaaaattcattgaaaacttcttttgacctaaatatttggtgtggtaattggaaatattttttattcttgtctatatatgatttctttactgttgaggttttgtgtgtgcatgtatttttaattttatttttagaagttttaagttcacagaaatattgagcaaaacatacagagttcccatatatcccttgttccccrccttagcctatccaactatcagcatcctataccagaatgatacatttgttaaaatcaatgaatctaacacagtaacacattattatcatccagagtcaatagttcacattacagttcaccagcagcgttgtatattccgtaggttttgacaaatgtataatgacatttatctagcattgtagtatcattcagaacagttttcactgccttaaaaatcctctgtgctcctgcgagagtcttctgtcccttcccccagagcaaccactgaatgttttattttctttgtactttttgccttgtcatgtagttaaatcatgcagtttatggatttttaaaatgacttatttcacttagtaatatgcatgtaaat

SEQ ID NO: 713792 - DNA, 529 bp, Homo sapiens
cttcctctgccagctactgctctatttcttttcactaaaactcctaaaaagattttgctaaactcagtgcttccaattcttcatcttctgttctctctcaaacccacccagactttccatctacctatctccggtcctctgatactattccagttaaggtcaccaattcttccatgctgctaaattcagtggcaattcccagctgaaaatttcatcaatttaatagcagtatttgaaatggctcatcactacccttccctggagmactttgttcacttaacttctaagaccacatactctctcagctttctttcttatcccttaggtttgggctgcaataacattgcacaacaaataatcccaaaatcttaatggcttgcaaagaccaccattccatttctcacacacgggtctgatggttggttgtggcgcagctgatcttggttggctgagctgggccaggttgaactctagcttccggttctgctctatagccctacatcctaggacccaggctaggcagacagca

SEQ ID NO: 713793 - DNA, 529 bp, Homo sapiens
cttcctctgccagctactgctctatttcttttcactaaaactcctaaaaagattttgctaaactcagtgcttccaattcttcatcttctgttctctctcaaacccacccagactttccatctacctatctccggtcctctgatactattccagttaaggtcaccaattcttccatgctgctaaattcagtggcaattcccagctgaaaatttcatcaatttaatagcagtatttgaaatggctcatcactacccttccctggagcactttgttcacttaacttctaagaccacatactctctcagctttctttcttatcccttaggtttgggctgcaataacattgcacaacaaataatcccaaaatcttaayggcttgcaaagaccaccattccatttctcacacacgggtctgatggttggttgtggcgcagctgatcttggttggctgagctgggccaggttgaactctagcttccggttctgctctatagccctacatcctaggacccaggctaggcagacagca

SEQ ID NO: 713794 - DNA, 529 bp, Homo sapiens
cttcctctgccagctactgctctatttcttttcactaaaactcctaaaaagattttgctaaactcagtgcttccaattcttcatcttctgttctctctcaaacccacccagactttccatctacctatctccggtcctctgatactattccagttaaggtcaccaattcttccatgctgctaaattcagtggcaattcccagctgaaaatttcatcaatttaatagcagtatttgaaatggctcatcactacccttccctggagcactttgttcacttaacttctaagaccacatactctctcagctttctttcttatcccttaggtttgggctgcaataacattgcacaacaaataatcccaaaatcttaatggcttgcaaagaccaccattccatttctcacacacgggtctgatggttggttgtggygcagctgatcttggttggctgagctgggccaggttgaactctagcttccggttctgctctatagccctacatcctaggacccaggctaggcagacagca

SEQ ID NO: 713795 - DNA, 1135 bp, Homo sapiens
gggaggaggtgtggtgcaaatgccctgtggtaagagggaacgaagaatgatcaaggattaaagaaggacctgtgcagcgggctgtgaacaaagaaggtatttgggaggtgatggctggagatataagtaagccaattgtgcaagagcttgaagactattttaaggagcttatctttaagagtaactaaaatacatgtagcctgtgccttcatattgtaaatataggcttcagaagacaaaatttatctaagggtgcatattcttcttggcaaatttgggttcagaactcgtgactctgactcccaggtgacctatagaaagaacatattgataattgattgcatttgggccataccaactagacaaagatcttaaatgaacatgaaaaatcacaaagttgtcttgcaggtccactctcaacataacacaaagtatgcctgtccaaattttatatatgaacttagtataatcacacatataacatatgctatgtcttctaaaaacacatatccaccaacaatttaaaaataatacccttaccactgtatacacattggttcttattttaaaacaaaaacaagcgttggtgaggacatgaagaaattagaacccttgttcactgctagtgggaatgtaaaatgatacagccactatggaaaacattatggcagttcttcaaaaaattaaacatgaaattaccatatgattcagtatttccacttttaggtatatacccaaaagactaaagagcaaggttctgagcagatatacatccccatttatatcagcctattcacaatagccaaaaggtggaacaccttctgtttcacaatagccaaaaggtggaacaacccaaatgtctattgatggataaataggtatagtatatacatacaatcagatattactcaaccttgtaaagaaatggaattctgtaacatgcagcaagatggatggattttaaaacattatgctaactgaaataagccagacacaaaaggacataagtcgtttgagttcacttatacaatatatctaatgtagtctaattcatagaraagtagaatagtggttaccaggagcttaggagttactttttaatgggtacagggtttcaatttggaatgacaaaaaa

SEQ ID NO: 713796 - DNA, 1976 bp, Homo sapiens
ctcaaactagtctagtgaagatactctgtagctgaccatttggcaaatgatccctgctttcttcaacatcccagcttctggttggcagtttgggttagaagcatctgatttggcaaacccaggtggtgtggccatgtttaaactcgaagagctgatgggagaaaaaagcacgtgacattttcagcctgtgtattggtagcccagctctgccttacatgatagggaatttctaaaacaccagaagaaatttagatatcaggtggccaaaaagaatttttaaatcttaatttcttgcttatctccattttttttcaagtgtcaacacaaatgtaggctcctccaaaacttttagtgactcaaatcacattgatctctcccttctctgatccaatgcactaatagactgagtcacacaatacaaaatttaattataaaccattttggcttgtttrccaatcacctcatgtgcatacatctgttcttaccaaatcagtggtaagcaactctagaatacatttagtattgactacttacacagctggatactggggagcgtgtgtgaccctactgaaggtcaccagctaataactgttgcttggtttgaataatttgcacttctgtgtgtataatcaattgcctgtggactgtgatatgaatatgtttgtaatataatgcttaaaagcagaaagatcagaaacaaagagcattgattcctccataaaggaaataaactttggagaaagacagaaaaatgtcacctattctaactaggaaatcactttcaaagtgactcaaagataatacttaagagaaacatgcttctggcctagcattagagcacacctgaatttcccccaataattgtcttatgttcctggaatagacactgttgagttagaccatgtttatactctatgcaatagttattggtgagtttgttcttccagtggtgtctcttgcacaatggcattgcctatcaaagtcagtctttggtgaaatatttaaataaatatatctctattttcctgtatataattctaatttttcccaagtaatatctcatttccaaaataaatctttcattactaaaggacttgttatctaaacttaatttgcttgataattggcctgtgagaacagatgaggtcatactaattgtgaatttaaaaattaattcaaatttccccaactgttccaccctctgagaaaaatctatctgtgactcctctataatttcctatatctgtttctcatacttccttcatgcagaatgttttctcaagtctccaggaaggtgtgcatgagtgctcctcaagtgctcctctccgcctccccaggacccttctgagtaaagtcctgtcctgaaaagacacaggttctcaacctctgcatgcagatagccctttatcccagtcatttgcttagctgtgatagttaatttgcttttaagtctaatcaaatatattgtataagcaaaacgacaggttaataaactgctgcttttttatttctccaggttattttgccaccttgtgggaacagtctaatgctaaaatctttaatcccaggaggctgtccatgaagaccttttaataccacagtcactgagactgcagatcgtatcaggaatatgtcaactttaaccatctcattgctcatgcctgagccatgtagtcattgagtattgattctttgtgctgagggcttctatcttctctacattttggcttttccagtgtcatgtttgttccaggaatccagtggatttgacactgtttatgagtttggacacagcaggcaaacaaagagtgagccccaagagctcagtatatagtataagcaaaggcagatttgggctaaaggggactaaaacttcctagatgagaaagaccccattctgagaaagctataagaaatcaggagaaaaatcaaagacacaatagggatattacaaatcaaatactatttaacaagca

SEQ ID NO: 713797 - DNA, 1976 bp, Homo sapiens
ctcaaactagtctagtgaagatactctgtagctgaccatttggcaaatgatccctgctttcttcaacatcccagcttctggttggcagtttgggttagaagcatctgatttggcaaacccaggtggtgtggccatgtttaaactcgaagagctgatgggagaaaaaagcacgtgacattttcagcctgtgtattggtagcccagctctgccttacatgatagggaatttctaaaacaccagaagaaatttagatatcaggtggccaaaaagaatttttaaatcttaatttcttgcttatctccattttttttcaagtgtcaacacaaatgtaggctcctccaaaacttttagtgactcaaatcacattgatctctcccttctctgatccaatgcactaatagactgagtcacacaatacaaaatttaattataaaccattttggcttgtttaccaatcacctcatgtgcatacatctgttcttaccaaatcagtggtaagcaactctagaatacatttagtattgactacttacacagctggatactggggagcgtgtgtgaccctactgaaggtcaccagctaataactgttgcttggtttgaataatttgcacttctgtgtgtataatcaattgcctgtggactgtgatatgaatatgtttgtaatataatgcttaaaagcagaaagatcagaaacaaagagcattgattcctccataaaggaaataaactttggagaaagacagaaaaatgtcacctattctaactaggaaatcactttcaaagtgactcaaagataatacttaagagaaacatgcttctggcctagcattagagcacacctgaatttcccccaataattgtcttatgttcctggaatagacactgttgagttagaccatgtttatactctatgcaatagttattggtgagtttgttcttccagtggtgtctcttgcacaatggcattgcctatcaaagtcagtctttggtgaaatatttaaataaatatatctctattttcctgtatataattctaatttttcccaagtaatatctcatttccaaaataaatctttcattactaaaggacttgttatctaaacttaatttgcttgataattggcctgtgagaacagatgaggtcatactaattgtgaatttaaaaattaattcaaatttccccaactgttccaccctctgagaaaaatctatctgtgactcctctataatttcctatatctgtttctcatacttccttcatgcagaatgttttctcaagtctccaggaaggtgtgcatgagtgctcctcaagtgctcctctccgcctccccaggacccttctgagtaaagtcctgtcctgaaaagacacaggttctcaacctctgcatgcagatagccctttatcccagtcatttgcttagctgtgatagttaatttgcttttaagtctaatcaaatatattgtataagcaaaacgacaggttaataaactgctgcttttttatttctccaggttattttgccaccttgtgggaacagtctaatgctaaaatctttaatcccaggaggctgtccatgaagaccttttaataccacagtcactgagactgcagatcgtatcaggaatatgtcaactttaaccatctcattgctcatgcctgagccatgtagtcattgagtattgattctttgtgctgagggcttctatcttctctacattttggcttttccagtgtcatgtttgttccaggaatccartggatttgacactgtttatgagtttggacacagcaggcaaacaaagagtgagccccaagagctcagtatatagtataagcaaaggcagatttgggctaaaggggactaaaacttcctagatgagaaagaccccattctgagaaagctataagaaatcaggagaaaaatcaaagacacaatagggatattacaaatcaaatactatttaacaagca

SEQ ID NO: 713798 - DNA, 1358 bp, Homo sapiens
gcccattttgacatccaccaactaatgggacatcatctatattccaccctccattccccggctggtttattttaaagcaaatctcagaaattatatcatttcatctgtaaatactttagtatgtatctctaaaatataaggacttcaaaaatttgtcacaatattttaaaatttaacaatcactccttctaacatcaaatagtcaatgttcttttacagtgagctttcaaaaatcagcatccataatccatacattatatttgaytaatgtttcttttaatctttaacagttcctcctcctttttctccttgccatgtatttgttgatgaaagtgggtcatctgttttgtaacattctgggttttgttgactccatctccaaggtgtcctttaacatgcttctttatcacacaaatatcctataaactagtcagaggtaaatggtaaatgcctggttagatttcagggttttttgggttttttttgacaagaatattcacaggcagtattgtctatttcctgttacatcccatcaggatgtaaataggttctggttgtgtctctttttaagatattaagacccatcatagggcttggattatatcagtctgattctatccaccataatgctccttgtcagtcttttacctaattatcgggattaacagctattgagaaccaatactgtacttacattcatttctttcagagttgcaatatggtaacagtctatacagaaggaataatgttcggtctatatgtttagaaaaatgttacccaactatttgggtaacatactggaattgcaaagcttctcttacaggaataattctttcctcaacaaaatacttgcaaaccaaattcaacaacacattaagaagatcatcatgaccaagtaagatttatcccagggatgcaagaatagttcaacatacacaaatcaatgtaatacactgtgatggttaacactgagtgtcaacttgattggattgaaggatgcaaagtattgttcctgggtgtgtctgtgaaggtgatgccaaacgagatgaacatttgagacagtggaatggaagaggcagacctaccctctatctgggtaggtaccatctaatcagctgccagcatggctaggataaaaggaggcagaggaatgtggaaggactagactggatcagtcttcaggcctttatcttactcctgtgcttcctgccctcaaacattgaactccaagttctacagcttttggattcttggaccagtggtttgccagggattctcaggtgtttggccatagactgaaggctgtactgccggcttccctacttttgaggttttgggactcggactggcctccttgc

SEQ ID NO: 713799 - DNA, 1587 bp, Homo sapiens
cttggaagtgatggatgtatatattaccttcttgtggtgatagtttcatgggtatatgcatatatgtccaaatttatcaacttgtatacattaaatatgtgcagttttcctatattgattacacctcaataaagctgttaaaaaaagaaaaaacagaaattaacaaaaacatattttaaaggtcttgctaatataaatagctatcattaatgttttgctaatattattaactattatttcaaagggcagtgtacacttagggtaaagttcatcatgatggtagttgatgtaaatatgtatcttttagtagatcttaaattcaactttttcagcctatttcttgttagatcctattagactgttagtgtttttaactcataataggcctgattatgagcacaaacaggaatatatataactgaagaccacaatgtacagcaataagctcaacgaaaacaggaacatcatctttttatggatctcactcttcccataggaatcatcatgtgacttaacatgcaaacttctgacatatggaccaagtgaggttccagtgtcaatgagaatataaataccagtgaaaatgtatttagaaattacagcattttctttccatatcatcgtgaatcagcttaagaatcatggccttatgaaatatacttctgtgaaatgttacaggtagaagagagattactatgaattaatgagagagtgggaggagaggaaatagaaatattccagatggacttgtatttcaagtaaactttccaagaaagaaaggaaggaattctacataaaaacatgaggatgtcaaggaagtctatgtacttcatttgttcattcttaaaattagtatttcttgagtatgtctaaatatcaaatatatgttggtggaagaaaagccagtggagaaagatgtattctttctctcatgagatgtattccttctcttatagaggtattctygtctctcatgtatttttctcctctctccactggctttgataaggaaaaattgaatgcaggaccagagactgaactatcgtaacatacaaaaagacagctttctttctgcagttagtagagctgggtcgatatatgaaaatatctcatctagaaagatacagctttgccaagctcaagctcaagctgtgccagggaccagaaatgaatgcagaagtagaagaatggactagaaagaaccagtatggcaatacagaaccagaaaaacaaaagagatggtaaccctgaggtcaattgcagtcatttccttcatcatcttaggacaaatttgaatgatggaatccagtgagcagaaactggaagttaaaccagagccatctcatatgtcaatcatcccttatcaattaatttctaaattcataaatatctactcagtgtttgacatattccaaacaatgtgttgggtgttgacaatacaaaaataaaacagatagacatgttttttgcttccacatttgttttttaattgttgttgttatacctctgaattatttaacaaagtacatatagtctatttcatagtgtcagatgtcattcttaattaaattttatgtacaggtcttc

SEQ ID NO: 713800 - DNA, 575 bp, Homo sapiens
gggttgtttttgtgatattttgcccttgcaagtatacaggtcatcttttgtggagaaacctggacatatacacccattttgttatttctgtctgtgttcctgttactgtgcagactttcagaacagatagwgtttgtaaattgcctgtatgcttcacatgaatttgcctttagtttgtgcacacacataagtaattcacacataaagttcacatgctctggggagccaaatttatgcttgatggttgctatgaaaatccaggacttgtttcattagtgatggagccatggagctgagggttcttgtgaactcttatgctacaaattacatttcccacagaaagaaatgttgaacaaacacaaaggctggtgttggtgtacccggatagctgcaggctcttatctattaatgaccgttgtcataagtaacttttaggacaccaggcaacataaatttatttttgtttaaacaaatagctgcaaaatggtaagttccaaaatcccctgtgtctttaaaataaggcctatcctaaaaccagcatttctttgtcttgctctgtttctttgttctactct

SEQ ID NO: 713801 - DNA, 846 bp, Homo sapiens
gtttctgacatgcatcagtgcccaccggtacagcggtgtggtgtaccccctcaagtccctgggccggctcaaaaagaagaatgcgatctgtatcagcgtgctggtgtggctcattgtggtggtggcgatctcccccatcctcttctactcaggtaccggggtccgcaaaaacaaaaccatcacctgttacgacaccacctcagacgagtacctgcgaagttatttcatctacagcatgtgcacgaccgtggccatgttctgtgtccccttggtgctgattctgggctgttacggattaattgtgagagctttgatttacaaagatctggacaactctcctctgaggagaaaatcgatttacctggtratcattgtactgactgtttttgctgtgtcttacatccctttccatgtgatgaaaacgatgaacttgagggcccggcttgattttcagaccccagcaatgtgtgctttcaatgacagggtttatgccacgtatcaggtgacaagaggtctagcaagtctcaacagttgtgtggaccccattctctatttcttggcgggagatactttcagaaggagactctcccgagccacaaggaaagcttctagaagaagtgaggcaaatttgcaatccaagagtgaagacatgaccctcaatattttacctgagttcaagcagaatggagatacaagcctgtgaaggcacaagaatctccaaacacctctctgttgtaatatggtaggatgcttaacagaatcaagtacttttcccctctttaactttctagtttagaaaaaaatcaaaccaagaaaatagtgagttaaaaaaataatagaagtaga

SEQ ID NO: 713802 - DNA, 631 bp, Homo sapiens
caaataaacatttttttcagaaacctgttaatagaaaagatggcatactttccccartatccaactgatttttaaatattaccttttagcacaattataaaagtagaaaatattatcttaagtatattcaccaggcttcaagaaataaagatagaagaaaatgtgatgcttttctaggagaacaaaacattagaaacatttcctaataggcagaaacagaaactgaaggtaccttaaatatagacaaccatttgttctctagtacttccttagtttaaacaaaaatgctccagccagtgtggaagctgtgtaaaagcactttgatatccccagctaagaaggcattataatacattataactcttaaaaaccattttaaaatttcaatgagcaaacttaaatcatactcccttctctttgcttcttgtaggaaaaaatatatatctacattcactaagtctgaattccttgttttgaaatattactgggttaactcactcaagtagacacctttcacaccctaatcccagtaataattgtgtctttcctcattcctatgggggaattactgcttgcagtgatgtatagcttgttggcatatgtctgcatgttactaaaaactttctgagtt

SEQ ID NO: 713803 - DNA, 571 bp, Homo sapiens
tgcatgtaactcatgcacattgtcctgtatactttaaatcatctctcggttacttataatacctactataatgcccacacatcacttcattagtgtggattcaatgtagcatactcggtgtggcaaattcaagttttgctttttaaagttttgtggtatgtttttccaaacagtttcaattcttggttggttgaatccattaatgcagcacccacggatwtagagggctgactgtatttttcagttatagacacaaccttagaaatactttatgcagaactgataaagaatccgtagcactacaatgattcataataacaaaatggacttcatccttaagaaatatccaaatgagtcgcttctaatttaaatttttatagctaaattaattcaaaaccttatttcactaatttaattttctacaataaagtaaaaaaatagataaatcacttatcaagagaaaaaataagttttctaaaacctatgccctagattaaatacatatccattacagtctcttacatagtttctatttatatgaccaaagttgacattcatgatgactgaccct

SEQ ID NO: 713804 - DNA, 571 bp, Homo sapiens
tgcatgtaactcatgcacattgtcctgtatactttaaatcatctctcggttacttataatacctactataatgcccacacatcacttcattagtgtggattcaatgtagcatactcggtgtggcaaattcaagttttgctttttaaagttttgtggtatgtttttccaaacagtttcaattcttggttggttgaatccattaatgcagcacccacggatttagagggctgactgtatttttcagttatagacacaaccttagaaatactttatgcagractgataaagaatccgtagcactacaatgattcataataacaaaatggacttcatccttaagaaatatccaaatgagtcgcttctaatttaaatttttatagctaaattaattcaaaaccttatttcactaatttaattttctacaataaagtaaaaaaatagataaatcacttatcaagagaaaaaataagttttctaaaacctatgccctagattaaatacatatccattacagtctcttacatagtttctatttatatgaccaaagttgacattcatgatgactgaccct

SEQ ID NO: 713805 - DNA, 1696 bp, Homo sapiens
agatgaggcccggtcacttgccaaaagtgtgaagtttagtaaagcaagagcctggagtttgagtgcaggtatgtgctcctgaacagtatatcctattggacctcccatctttctatcagtcaaggacattagttgcagacaatagaaaccaatcttggctggggtcatcagaaaatgaacctctgaaaggataagaggtggctcataaaatctctgagagagtgctcacatataccacataccaaaattggaagaataaaatttcttgaagggtaaaccctggctggatcctccccagtcccatttctgcttcttaagcacataggaagatgaggtttttcagcctgcctttcagttaggccgacggagcataaggggaaattaatgcatagtgtttccaggcctgtccctaaaatttcttgccatatccttggctctcatggtcctgtgaaagagaaggagctgcgatgctggaaccacactaggaacagcccagggcatgagtcactgcctggagatgcaccgcccagacaagctgtccaacccgcctccacccgtgtgtgattggaaagcaaaactgctgaaatgttggaatttatttgtttcatgggatgacctagcctattctgaccaataagaccggaaaattaagctaggtggcttcatgttcaaggccagcctcccaaatcataggctagaactgcttcagtgaagacagtaatgccatcgctgctggcatagatgctgcaacttgcaccactatcaccgctggccctggacagtggacactggacagagcctgtgctkgctgcttctggagagtaggagctgacactacgcttgctcgaatacattctgtgcagctggatcattaagatatggattctaccttcaaagggccaactgtctagtccgaggagtgaaaatccacaaaaggccgttgtaataaaagagaaagtgctgagtctgctggcagaggacagttactagactctgattcctggaagaagagaggattttaggtcaggataagttgcctatgtggttttaggctcttgggatattgtctaagtgtatgtcaaattaagttactatcttttgaaattcaagaacctaaggaaaaatacctgaggaaaaaagaacctgaggataaaagtgatacggaattaatttttaccaaccaaaagagtcctacaatccccaaatacatagtctcagtgtatatataggtatgtatatgtacatttatactccagtcttcactctcaggtcaatagttacctctttctcttccagtatagccttatttggcagagtgaagtaaaaggtaactttatttgttgttgttttaattataggacattatggttttttttagatcttttattaatgaacgcaaagtcctatccttttcctgtcagtactttcattaatggcacaataacaacaccaccatcaattgttttactagtattcttaattgtcatttgggtttcatgtctggaatagttttccaaaaaaaaaaaaaaaaaacaactcattgtattcaaatgcttttccaggaaggtttatttaatagttaatacacagaactgttaacattgacctcctcacaatcattcttggtttttcttcttctatttttttttttttttgagacagtctcagtctgtcaccaggctgaagtgtagtcaca

SEQ ID NO: 713806 - DNA, 1374 bp, Homo sapiens
gtcccttgatgtttgctattgtacagatgttaataagggatagcaaaagattggaaacaagctgagtatccagagaatggggcctgcttcagttatggtacatctcacagtggaatactaggtagtggtaaaaaataatgaggaggcacttcacgttctgatgtggattgatcttcaagattacagtgatgccctgcctaacwaatgtttttgtcagtgatggaccacatatataatgttgatcccataagattataatggagctgccctatgcaggtataccgtttttaatcttttctaccatattgttactgtactttttctatgtttaggtgtgtttagatgcataaatactttccattttgttacaattacctacagtgttctgtaaattaacatgtttaggtttgtagtgtaggagcagtaggcattaccacatagcctaagtgagtagtaggctgttccatctatgtttgtgtaagtactctaagatgttcacagaacaacagacaaaattgcctaaggccatatccctgtcattaagtgatgcatgactgtattaagaaagacagccagcctgggtgtggtggctcatgcctgtaatcccagcactttggtagggcgaggtgggtggatcacctcccagcactttgggagggcgaggtggggggtcaggagatcgagaccatcctggctaacatggtcaaaccccgtctctactaaaaatacaaaaaattagctgggtgtggtggcacacgcctatagtcccagctactcaggaggctgaggcaggagaatcgcttgaactcgggaggcagaggttgcagcgagcggaaacccacgccactgcactcaagcctgggctacagagcgagactctgtctcaaaaaaaaaaaaaaaaaaaaaaaaaggaaggcaaaatgcagaatagactgtagagaatggtctcacttttgttataaaagagatttaggacatgtattggttgtaaaagcatgaaatgcctctgtgaggatttatccaagaaggagataacatttgttggctattgggaaggaaattgtgtggctgaaaggctgtgttgatggggagaattttcagtgataatttatacccctaaatacatcagtgtgtatttcctaagtgtgagaacattctcttacataaccactatgcaatgatccaaatttggaaatttaacacgaatatactataatctacagcccatattgaaatttcagttgtctcagtcatgactttatagccattttttcccccagtttaagactgtcttagttcattcaggctactataacaaaataccgtagactgggtggcttatgaacagagatttatttcttgcagttctggaca

SEQ ID NO: 713807 - DNA, 1252 bp, Homo sapiens
tcgaggcctgagtaattgacagtgaataatggttacwtgcagcgaataattatcaggacagtattagagtaagtaacaagaaaaacaactggcaaaacatatgggatcacaccacagtagctgtgagagcaattttcagccttctataaatttcaagatcgttttgaatgtcaacagttacggttttctggttggccctgaaaataaagcttccacatagaaccttctgtatcccatcctccagttactttaatcccttgttgcttacctaatcttttcttcagttgtttagcagctaacttccagatatcatttggctgtgccccaccaaatctcaccttgaattgtagctcccataattcccatgtgttgtaggagggacctggtgggagataattgaattatgggggcagtttcccctatactgttctcatggtagtgaataagtctcacaaggtctgatggttttgtaaggggaaacccctttcacttggttctcattctcttatctgccgccatgtaagacgtgcctttcaccatctgccatgattgtgaggcctccccagccacgtggaactatgagtccattaaatctcttttccttataaattacccagtctcgggtatgtctttatcagcagcgtgaaaacagactaatacacttccactttcaggaaaagtgtgcctagaaatgttagcgtggcagagatttgctgtatgctcaccaaactcatttcctctttctggccactcaactagactgcctttcccagtccacctgcttctaggtggagttgtgtgaagaatgccagaggaaatgacgtagccactctagggctgacccagaaagcatcctgtcctattcaatatattccctctcttccccactctttgtaggtgggtgatacaagagcaaatttgtattgaagatggaatagatattacatgaaaggagccctgatccctgagtcactatgggaggagacgcacccaatcagaaatatgtgctttgaactttgcatagtgagaaataaactttcattgtgttaggccacttggaatttggggttcttagaacagttagtttatcccaactaatacattgagcagctcactcatctgtgtttgtgaacattcattattcatcagttcatcattaatgcaggtgactcacagttcacttaacataaggaaaagtcctaaaactatgggattgttagaatcacaaggcccttttgttctggcgatgttt

SEQ ID NO: 713808 - DNA, 1252 bp, Homo sapiens
tcgaggcctgagtaattgacagtgaataatggttacatgcagcgaataattatcaggacagtattagagtaagtaacaagaaaaacaactggcaaaacatatgggatcacaccacagtagctgtgagagcaattttcagccttctataaatttcaagatcgttttgaatgtcaacagttacggttttctggttggccctgaaaataaagcttccacatagaaccttctgtatcccatcctccagttactttaatcccttgttgcttacctaatcttttcttcagttgtttagcagctaacttccagatatcatttggctgtgccccaccaaatctcaccttgaattgtagctcccataattcccatgtgttgtaggagggacctggtgggagataattgaattatgggggcagtttcccctatactgttctcatggtagtgwataagtctcacaaggtctgatggttttgtaaggggaaacccctttcacttggttctcattctcttatctgccgccatgtaagacgtgcctttcaccatctgccatgattgtgaggcctccccagccacgtggaactatgagtccattaaatctcttttccttataaattacccagtctcgggtatgtctttatcagcagcgtgaaaacagactaatacacttccactttcaggaaaagtgtgcctagaaatgttagcgtggcagagatttgctgtatgctcaccaaactcatttcctctttctggccactcaactagactgcctttcccagtccacctgcttctaggtggagttgtgtgaagaatgccagaggaaatgacgtagccactctagggctgacccagaaagcatcctgtcctattcaatatattccctctcttccccactctttgtaggtgggtgatacaagagcaaatttgtattgaagatggaatagatattacatgaaaggagccctgatccctgagtcactatgggaggagacgcacccaatcagaaatatgtgctttgaactttgcatagtgagaaataaactttcattgtgttaggccacttggaatttggggttcttagaacagttagtttatcccaactaatacattgagcagctcactcatctgtgtttgtgaacattcattattcatcagttcatcattaatgcaggtgactcacagttcacttaacataaggaaaagtcctaaaactatgggattgttagaatcacaaggcccttttgttctggcgatgttt

SEQ ID NO: 713809 - DNA, 2876 bp, Homo sapiens
tctcaagactgtggggtgacgtgttttcccactgggggctcataatgcctagttgtcccacttactgtataattagcagctgctgatgctctatgattcatttattcactgacagttgcaaaatggtgatattccagctctataattcctttctcatgtattaattggactaattrcatgtattgtatggatttttataaaaagatgcttccctcatctattattcagtaacccagtggtaaaattcacataggaaaaataagataaatgcgtgattcttcagtttttagtttgctgacttttctaaaggggaccaattcattttctgtcttttaaattattatttacaatagatttaaccatatttggtgggattcaatacattgcaattccttgttctgaagctcatattgcctcatttagagtctcatgtactccactgtctttaacagttagatctttagcagttgtaagaaggttcaggctcatcttgcacattttctgctttgtaaatggatttagccatttccttaagaaggaggtaacattgtgaaataacttggaaaagaagcattttaagaccacaagatatttggatgctagagattctcatgatattgtgttggttgttgcttctaggccttttgagtggccaggctagaaaacataacggttaattcatacatattaaaacatacacatatacagttatcatacatatatacgtatatatgataaattcaagttcatactgataagtcaaatttagaactatggagttttttttcttaatctcttctatattacttctatatctcctttcttccacactaagaaacctactttttaaggacacaggggatggctgaatcagactatcccgtaattattcatttactttatctctcattacacacacactcatctgagaataactgtactaatattatccctgtcaacataacatttctttaaatatgcattctccattctttccccattgtaatagttttaccatacccacattacctgaacatatagccatttcatattatattctttgcctcttagccctcagctagtcttccttctgcaagtagccttatcaccacccagccttatgtcagtcaagcttgtatggaattcagtctctgtaagatttgtaagaaagattcacagaaaaaatattcggtgggttcttacatgttgatatacatttgggtccatattttgaaagtcaattttgctggatacaaaaccatttatgcatattttaatttggggggattactttagtttgtaactgttttattctaacataaaatgtcactgttgaagtgcttaatgatgacctaattcttccttactttgtaaatcactaaatgtttttgccagaggaaagaatctttctttctttctaaagcacatttagtaattttagtaaaatatctttttattagtttcaggtatgtgatttgctttttcaatatggagtttctttattttaatttcaaaaatgctttcatgattttagtttttattctgttctcttgcagactcctgtttccatacgttagatttttatctattgttaacatttgccctttctttccagtctttcataccttttgctttatttctttttgattaaaaaaaatctttcatcttgtacttctcttaaggcaccatattctttgtattccttcttgtgttccctctaatttagtctttattcaaaaattgttttttttctttctgttccaatttttttcttatagttctatcatctttctgagtttttctaattttgagttttgttattctttaatgtgttgaatcatttcataaatgtctttcaactcattctgaaatggaatgttgtagacctccaatcggtggacatgtctttctggtgttttgtaatcgttagtagggattttattttgctcttcattctctccctcttttctgtggtaacactgttcagatttgattttgatatttttctgttgctcatttttatgtgaagtcagtttcctaaaattttagaagaaagcatggtttaaggtagcttctctcacttcatagacatcttctgttgtttttgtgaaatgttcaaaattatgatggcttgcttacatttctggttcttttcctcatcctgtccctatcccctgcccagtcactttcatcagcatattattattattttttttttcagagtttcactctgtcacccagactggagtgcagtggcacaatcttggatcactgcaacctccaccttccaggttcaagattctcgtgcctcagcctctgtagctggaactacaggcatgcgccactgtgtctggctaatttttgtacttttagtagagatggggtttcaccctgttggcaaggctggtctccaactcctgacctcaggtgatccgcgtgccttggcctcccaaagtgctgggattataagcttgagccactgctcctgtcctatcaacacattctcttcctctcctctaattggcccctttcctgctccactttaattttacaccatcagtttcttcccggtgtaaatcctggttctggaagagagccaagctggccagtttcaaggatttgtaagatctagacttcttctttttgcagacttacctcaggcccttagcactgattggttcctggattgggcaacacctctcctgttttaaacagctgttatcaaattggaccaatgcgatttccaataagcacctgcaggatattttaagattattctgttctcaccggcatcccttgctctgttgcttccacacagatattaataccatgcaagtctcctggctgttggtgattcacctcacctgcttaaatac

SEQ ID NO: 713810 - DNA, 2876 bp, Homo sapiens
tctcaagactgtggggtgacgtgttttcccactgggggctcataatgcctagttgtcccacttactgtataattagcagctgctgatgctctatgattcatttattcactgacagttgcaaaatggtgatattccagctctataattcctttctcatgtattaattggactaattgcatgtattgtatggatttttataaaaagatgcttccctcatctattattcagtaacccagtggtaaaattcacataggaaaaataagataaatgcgtgattcttcartttttagtttgctgacttttctaaaggggaccaattcattttctgtcttttaaattattatttacaatagatttaaccatatttggtgggattcaatacattgcaattccttgttctgaagctcatattgcctcatttagagtctcatgtactccactgtctttaacagttagatctttagcagttgtaagaaggttcaggctcatcttgcacattttctgctttgtaaatggatttagccatttccttaagaaggaggtaacattgtgaaataacttggaaaagaagcattttaagaccacaagatatttggatgctagagattctcatgatattgtgttggttgttgcttctaggccttttgagtggccaggctagaaaacataacggttaattcatacatattaaaacatacacatatacagttatcatacatatatacgtatatatgataaattcaagttcatactgataagtcaaatttagaactatggagttttttttcttaatctcttctatattacttctatatctcctttcttccacactaagaaacctactttttaaggacacaggggatggctgaatcagactatcccgtaattattcatttactttatctctcattacacacacactcatctgagaataactgtactaatattatccctgtcaacataacatttctttaaatatgcattctccattctttccccattgtaatagttttaccatacccacattacctgaacatatagccatttcatattatattctttgcctcttagccctcagctagtcttccttctgcaagtagccttatcaccacccagccttatgtcagtcaagcttgtatggaattcagtctctgtaagatttgtaagaaagattcacagaaaaaatattcggtgggttcttacatgttgatatacatttgggtccatattttgaaagtcaattttgctggatacaaaaccatttatgcatattttaatttggggggattactttagtttgtaactgttttattctaacataaaatgtcactgttgaagtgcttaatgatgacctaattcttccttactttgtaaatcactaaatgtttttgccagaggaaagaatctttctttctttctaaagcacatttagtaattttagtaaaatatctttttattagtttcaggtatgtgatttgctttttcaatatggagtttctttattttaatttcaaaaatgctttcatgattttagtttttattctgttctcttgcagactcctgtttccatacgttagatttttatctattgttaacatttgccctttctttccagtctttcataccttttgctttatttctttttgattaaaaaaaatctttcatcttgtacttctcttaaggcaccatattctttgtattccttcttgtgttccctctaatttagtctttattcaaaaattgttttttttctttctgttccaatttttttcttatagttctatcatctttctgagtttttctaattttgagttttgttattctttaatgtgttgaatcatttcataaatgtctttcaactcattctgaaatggaatgttgtagacctccaatcggtggacatgtctttctggtgttttgtaatcgttagtagggattttattttgctcttcattctctccctcttttctgtggtaacactgttcagatttgattttgatatttttctgttgctcatttttatgtgaagtcagtttcctaaaattttagaagaaagcatggtttaaggtagcttctctcacttcatagacatcttctgttgtttttgtgaaatgttcaaaattatgatggcttgcttacatttctggttcttttcctcatcctgtccctatcccctgcccagtcactttcatcagcatattattattattttttttttcagagtttcactctgtcacccagactggagtgcagtggcacaatcttggatcactgcaacctccaccttccaggttcaagattctcgtgcctcagcctctgtagctggaactacaggcatgcgccactgtgtctggctaatttttgtacttttagtagagatggggtttcaccctgttggcaaggctggtctccaactcctgacctcaggtgatccgcgtgccttggcctcccaaagtgctgggattataagcttgagccactgctcctgtcctatcaacacattctcttcctctcctctaattggcccctttcctgctccactttaattttacaccatcagtttcttcccggtgtaaatcctggttctggaagagagccaagctggccagtttcaaggatttgtaagatctagacttcttctttttgcagacttacctcaggcccttagcactgattggttcctggattgggcaacacctctcctgttttaaacagctgttatcaaattggaccaatgcgatttccaataagcacctgcaggatattttaagattattctgttctcaccggcatcccttgctctgttgcttccacacagatattaataccatgcaagtctcctggctgttggtgattcacctcacctgcttaaatac

SEQ ID NO: 713811 - DNA, 2876 bp, Homo sapiens
tctcaagactgtggggtgacgtgttttcccactgggggctcataatgcctagttgtcccacttactgtataattagcagctgctgatgctctatgattcatttattcactgacagttgcaaaatggtgatattccagctctataattcctttctcatgtattaattggactaattgcatgtattgtatggatttttataaaaagatgcttccctcatctattattcagtaacccagtggtaaaattcacataggaaaaataagataaatgcgtgattcttcagtttttagtttgctgacttttctaaaggggaccaattcattttctgtcttttaaattattatttacaatagatttaaccatatttggtgggattcaatacattgcaattccttgttctgaagctcatattgcctcatttagagtctcatgtactccactgtctttaacagttagatctttagcagttgtaagaaggttcaggctcatcttgcacattttctgctttgtaaatggatttagccatttccttaagaaggaggtaacattgtgaaataacttggaaaagaagcattttaagaccacaagatatttggatgctagagattctcatgatattgtgttggttgttgcttctaggccttttgagtggccaggctagaaaacataacggttaattcatacatattaaaacatacacatatacagttatcatacatatatacgtatatatgataaattcaagttcatactgataagtcaaatttagaactatggagttttttttcttaatctcttctatattacttctatatctcctttcttccacactaagaaacctactttttaaggacacaggggatggctgaatcagactatcccgtaattattcatttactttatctctcattacacacacactcatctgagaataactgtactaatattatccctgtcaacataacatttctttaaatatgcattctccattctttccccattgtaatagttttaccatacccacattacctgaacatatagccatttcatattatattctttgcctcttagccctcagctagtcttccttctgcaagtagccttatcaccacccagccttatgtcagtcaagcttgtatggaattcagtctctgtaagatttgtaagaaagattcacagaaaaaatattcggtgggttcttacatgttgatatacatttgggtccatattttgaaagtcaattttgctggatacaaaaccatttatgcatattttaatttggggggattactttagtttgtaactgttttattctaacataaaatgtcactgttgaagtgcttaatgatgacctaattcttccttactttgtaaatcactaaatgtttttgccagaggaaagaatctttctttctttctaaagcacatttagtaattttagtaaaatatctttttattagtttcaggtatgtgatttgctttttcaatatggagtttctttattttaatttcaaaaatgctttcatgattttagtttttattctgttctcttgcagactcctgtttccatacgttagatttttatctattgttaacatttgccctttctttccagtctttcataccttttgctttatttctttttgattaaaaaaaatctttcatcttgtacttctcttaaggcaccatattctttgtattccttcttgtgttccctctaatttagtctttattcaaaaattgttttttttctttctgttccaatttttttcttatagttctatcatctttctgagtttttctaattttgagttttgttattctttaatgtgttgaatcatttcataaatgtctttcaactcattctgaaatggaatgttgtagacctccaatcggtggacatgtctttctggtgttttgtaatcgttagtagggattttattttgctcttcattctctccctcttttctgtggtaacactgttcagatttgattttgatatttttctgttgctcatttttatgtgaagtcagtttcctaaaattttagaagaaagcatggtttaaggtagcttctctcacttcatagacatcttctgttgtttttgtgaaatgttcaaaattatgatggcttgcttacatttctggttcttttcctcatcctgtccctatcccctgcccagtcactttcatcagcatattattattattttttttttcagagtttcactctgtcacccagactggagtgcagtggcacaatcttggatcactgcaacctccaccttccaggttcaagattctcgtgcctcagcctctgtagctggaactacaggcatgcgccactgtgtctggctaatttttgtacttttagtagagatggggtttcaccctgttggcaaggctggtctccaactcctgacctcaggtgatccgcgtgccttggcctcccaaagtgctgggattataagcttgagccactgctcctgtcctatcaacacattctcttcctctcctctaattggcccctttcctgctccactttaattttacaccatcagtttcttcccggtgtaaatcctggttctggaagagagccaagctggccagtttcaaggatttgtaagatctagacttcttctttttgcagmcttacctcaggcccttagcactgattggttcctggattgggcaacacctctcctgttttaaacagctgttatcaaattggaccaatgcgatttccaataagcacctgcaggatattttaagattattctgttctcaccggcatcccttgctctgttgcttccacacagatattaataccatgcaagtctcctggctgttggtgattcacctcacctgcttaaatac

SEQ ID NO: 713812 - DNA, 1724 bp, Homo sapiens
ggactcaatacactattgatgcctcattattaaactcaatttgaaaaggactggttatttgggttctagaaccctttaaatrttggagtacagtattaaatattgaaatactttaaatactaagagcatctctctttattgccaacttgctaatgacacttccatatttgaaattaaaaaaatagaaggttgactcaagagatctttgccaaatgtttcatctagtttcaattaggctctttctttagactggatctatgccccatgtacctcctttatgctgaaagacgtagatggaaatcacaggagctcagtacagttaaggtgtaggtgggcaaaaagttcatgggcagatttcaggctctgtttcagaacaaaagacacagatatggcctgaaggaagaaagcaaggctcaatgaatgctctgaaaaccaatagataaagactaaatgtcttgggagtttcatacctctgttagcagtaggaaagaagtctgagaactagaaagtcaagcagaggggcaagggactccaaagtgagttaaacattcactcaatgcacatttgctgagtctaggaataagcgtaacctgccttcaaagcctaggctagtgtctatcattatccgtgagatgcaggtcaaacatttaaaattttgcatgagaagaggagattgatggtcttaaaaaaggcttcaaatttagtatgttaaaaatgtagaacaataaagcaatgattagaataaatgactataatattatataaccagaaacatcaaagttaagaataaatggtcccttcttgtccttcatataacttgtacctaatctacattcacttatacttgaaaagtaagaacacgacgtattcctgagactagaactttgattgtaacttttatcctagtttcttagacttaaacagtcatttggtaccatgttgctcttgtgtaatttcatggtgcatattccttagctccttaagtagctgatggtttttaaactcaatatgtaattgtttaggaatttataaaggttgcattgctcataaaaaaagcacttccaccttttcactgtattttactgaagtcttcgtcttcattcataaatatttaggtcacactggaagaaaaaaaggcccttgctttataagtctatcttgagaatcagtactttcatttttttcattcattcattaaaaattgatattatggacagcctatttgtaatagattctgttcctaaactttcggcaatagagggtcataaggagacaataggtatatatgaagtaaatagaaaagagatgttagattgcactatatgctatgaaagaaataatgtaatatgatagagagtaaagaagagaggtactcagagaaaaatgaagaaaaacatgggaaaaagataaaagtaatagaaacaacaacagggagaagaaagggagttatatggcaggttgaatcaccgaatagtaattcatcctgtgactaggtgaatggggcagagaaagttcttagagaatagacaaagaatgttttcatgaaagaggcaaataacccaaaaggggagtgcttcttacaatggactctcaagaagttcatgcttattcttcttaagttccaaatatttggaatctatttacagcgaattgcagtaggttacgggtggctttctagaggattgagacataagcacagagccgagggtgagatttcactgata

SEQ ID NO: 713813 - DNA, 1724 bp, Homo sapiens
ggactcaatacactattgatgcctcattattaaactcaatttgaaaaggactggttatttgggttctagaaccctttaaatgttggagtacagtattaaatattgaaatactttaaatactaagagcatctctctttattgccaacttgctaatgacacttccatatttgaaattaaaaaaatagaaggttgactcaagagatctttgccaaatgtttcatctagtttcaattaggctctttctttagactggatctatgccccatgtacctcctttatgctgaaagacgtagatggaaatcacaggagctcagtacagttaaggwgtaggtgggcaaaaagttcatgggcagatttcaggctctgtttcagaacaaaagacacagatatggcctgaaggaagaaagcaaggctcaatgaatgctctgaaaaccaatagataaagactaaatgtcttgggagtttcatacctctgttagcagtaggaaagaagtctgagaactagaaagtcaagcagaggggcaagggactccaaagtgagttaaacattcactcaatgcacatttgctgagtctaggaataagcgtaacctgccttcaaagcctaggctagtgtctatcattatccgtgagatgcaggtcaaacatttaaaattttgcatgagaagaggagattgatggtcttaaaaaaggcttcaaatttagtatgttaaaaatgtagaacaataaagcaatgattagaataaatgactataatattatataaccagaaacatcaaagttaagaataaatggtcccttcttgtccttcatataacttgtacctaatctacattcacttatacttgaaaagtaagaacacgacgtattcctgagactagaactttgattgtaacttttatcctagtttcttagacttaaacagtcatttggtaccatgttgctcttgtgtaatttcatggtgcatattccttagctccttaagtagctgatggtttttaaactcaatatgtaattgtttaggaatttataaaggttgcattgctcataaaaaaagcacttccaccttttcactgtattttactgaagtcttcgtcttcattcataaatatttaggtcacactggaagaaaaaaaggcccttgctttataagtctatcttgagaatcagtactttcatttttttcattcattcattaaaaattgatattatggacagcctatttgtaatagattctgttcctaaactttcggcaatagagggtcataaggagacaataggtatatatgaagtaaatagaaaagagatgttagattgcactatatgctatgaaagaaataatgtaatatgatagagagtaaagaagagaggtactcagagaaaaatgaagaaaaacatgggaaaaagataaaagtaatagaaacaacaacagggagaagaaagggagttatatggcaggttgaatcaccgaatagtaattcatcctgtgactaggtgaatggggcagagaaagttcttagagaatagacaaagaatgttttcatgaaagaggcaaataacccaaaaggggagtgcttcttacaatggactctcaagaagttcatgcttattcttcttaagttccaaatatttggaatctatttacagcgaattgcagtaggttacgggtggctttctagaggattgagacataagcacagagccgagggtgagatttcactgata

SEQ ID NO: 713814 - DNA, 1724 bp, Homo sapiens
ggactcaatacactattgatgcctcattattaaactcaatttgaaaaggactggttatttgggttctagaaccctttaaatgttggagtacagtattaaatattgaaatactttaaatactaagagcatctctctttattgccaacttgctaatgacacttccatatttgaaattaaaaaaatagaaggttgactcaagagatctttgccaaatgtttcatctagtttcaattaggctctttctttagactggatctatgccccatgtacctcctttatgctgaaagacgtagatggaaatcacaggagctcagtacagttaaggtgtaggtgggcaaaaagttcatgggcagatttcaggctctgtttcagaacaaaagacacagatatggcctgaaggaagaaagcaaggctcaatgaatgctctgaaaaccaatagataaagactaaatgtcttgggagtttcatacctctgttagcagtaggaaagaagtctgagaactagaaagtcaagcagaggggcaagggactccaaagtgagttaaacattcactcaatgcacatttgctgagtctaggaataagcgtaacctgccttcaaagcctaggctagtgtctatcattatccgtgagatgcaggtcaaacatttaaaattttgcatgagaagaggagattgatggtcttaaaaaaggcttcaaatttagtatgttaaaaatgtagaacaataaagcaatgattagaataaatgactataatattatataaccagaaacatcaaagttaagaataaatggtcccttcttgtccttcatataacttgtacctaatctacattcacttatacttgaaaagtaagaacacgacgtattcctgagactagaactttgattgtaacttttatcctagtttcttagacttaaacagtcatttggtaccatgttgctcttgtgtaatttcatggtgcatatwccttagctccttaagtagctgatggtttttaaactcaatatgtaattgtttaggaatttataaaggttgcattgctcataaaaaaagcacttccaccttttcactgtattttactgaagtcttcgtcttcattcataaatatttaggtcacactggaagaaaaaaaggcccttgctttataagtctatcttgagaatcagtactttcatttttttcattcattcattaaaaattgatattatggacagcctatttgtaatagattctgttcctaaactttcggcaatagagggtcataaggagacaataggtatatatgaagtaaatagaaaagagatgttagattgcactatatgctatgaaagaaataatgtaatatgatagagagtaaagaagagaggtactcagagaaaaatgaagaaaaacatgggaaaaagataaaagtaatagaaacaacaacagggagaagaaagggagttatatggcaggttgaatcaccgaatagtaattcatcctgtgactaggtgaatggggcagagaaagttcttagagaatagacaaagaatgttttcatgaaagaggcaaataacccaaaaggggagtgcttcttacaatggactctcaagaagttcatgcttattcttcttaagttccaaatatttggaatctatttacagcgaattgcagtaggttacgggtggctttctagaggattgagacataagcacagagccgagggtgagatttcactgata

SEQ ID NO: 713815 - DNA, 1724 bp, Homo sapiens
ggactcaatacactattgatgcctcattattaaactcaatttgaaaaggactggttatttgggttctagaaccctttaaatgttggagtacagtattaaatattgaaatactttaaatactaagagcatctctctttattgccaacttgctaatgacacttccatatttgaaattaaaaaaatagaaggttgactcaagagatctttgccaaatgtttcatctagtttcaattaggctctttctttagactggatctatgccccatgtacctcctttatgctgaaagacgtagatggaaatcacaggagctcagtacagttaaggtgtaggtgggcaaaaagttcatgggcagatttcaggctctgtttcagaacaaaagacacagatatggcctgaaggaagaaagcaaggctcaatgaatgctctgaaaaccaatagataaagactaaatgtcttgggagtttcatacctctgttagcagtaggaaagaagtctgagaactagaaagtcaagcagaggggcaagggactccaaagtgagttaaacattcactcaatgcacatttgctgagtctaggaataagcgtaacctgccttcaaagcctaggctagtgtctatcattatccgtgagatgcaggtcaaacatttaaaattttgcatgagaagaggagattgatggtcttaaaaaaggcttcaaatttagtatgttaaaaatgtagaacaataaagcaatgattagaataaatgactataatattatataaccagaaacatcaaagttaagaataaatggtcccttcttgtccttcatataacttgtacctaatctacattcacttatacttgaaaagtaagaacacgacgtattcctgagactagaactttgattgtaacttttatcctagtttcttagacttaaacagtcatttggtaccatgttgctcttgtgtaatttcatggtgcatattccttagctccttaagtagctgatggtttttaaactcaatatgtaattgtttaggaatttataaaggttgcattgctcataaaaaaagcacttccaccttttcactgtattttactgaagtcttcrtcttcattcataaatatttaggtcacactggaagaaaaaaaggcccttgctttataagtctatcttgagaatcagtactttcatttttttcattcattcattaaaaattgatattatggacagcctatttgtaatagattctgttcctaaactttcggcaatagagggtcataaggagacaataggtatatatgaagtaaatagaaaagagatgttagattgcactatatgctatgaaagaaataatgtaatatgatagagagtaaagaagagaggtactcagagaaaaatgaagaaaaacatgggaaaaagataaaagtaatagaaacaacaacagggagaagaaagggagttatatggcaggttgaatcaccgaatagtaattcatcctgtgactaggtgaatggggcagagaaagttcttagagaatagacaaagaatgttttcatgaaagaggcaaataacccaaaaggggagtgcttcttacaatggactctcaagaagttcatgcttattcttcttaagttccaaatatttggaatctatttacagcgaattgcagtaggttacgggtggctttctagaggattgagacataagcacagagccgagggtgagatttcactgata

SEQ ID NO: 713816 - DNA, 639 bp, Homo sapiens
gaaacatagttagcctcagcatatgctattattattctaattcccctgataagtattaatggtattactcccttagacttttcagttactgtggaaatgaatagctgaggtgctgacgaggtgctgatgaggcctagatacatactccactggacccaaaacaattgaaggatcttttaatacttctcagtccttactcttataattgtttgcaaagcattgtttagaaacaattccaatatacaatttctctgtattactttgtataaacaaagtcataatactaaattcctccttattattaaactgttcacatattgtgctttgtggaatcacaggatccatgccttatttatcagtgagccctttcacagcacttagcagggtacctggtatgaagtggatattcagtaaatatttgattgactatgttctttatagaaaaggtttgcactctactttgttttcttgctttcttgttgcaaatctgtaatacttacctattcttgattgccatggactaagaactgtggacaaagcaaagcaacacctgcccccatcaacaggaatgtacrctatttatatcaatacaaagtgcacacatatagggatatattcagttaataaaagtgattaatg

SEQ ID NO: 713817 - DNA, 593 bp, Homo sapiens
attggtgtgacttcagcccaacactgcaattcgtgacagctgtaacagcaagcctgcgctgaggacacgggacgtggtggctggtgccgaggtcggctgctcaggacacagctggcatgaattgcagggagagaaaagcagagaggtcatgtaacacaggccacaggctggctgtgaggcccaggagcctggtaacctaagctgggaggaagccacaggggctcagttatcatcatcacctcctagagtttccaggagctcagggcgccttgcaatcaacatcatagaatagtggagctgacatttcatctcctggcacagaaacactctcatttacasctggggaggctgagacccaaagcagttgagtgacctcacaaagctaccctgaagccctggagggagggctggcctgggtgcgggtgcagtgcatccaagcccctgtctgtgcccttggcaagtcaggaagcttggtgtgggctcctgcctcatcctcagccactcacgcaaaccaaacctgtgctgggcacgaaggcagcttgtggcctccttcgggactgaagaccaagcgagggctgactgagctttatctt

SEQ ID NO: 713818 - DNA, 593 bp, Homo sapiens
attggtgtgacttcagcccaacactgcaattcgtgacagctgtaacagcaagcctgcgctgaggacacgggacgtggtggctggtgccgaggtcggctgctcaggacacagctggcatgaattgcagggagagaaaagcagagaggtcatgtaacacaggccacaggctggctgtgaggcccaggagcctggtaacctaagctgggaggaagccacaggggctcagttatcatcatcacctcctagagtttccaggagctcagggcgccttgcaatcaacatcatagaatagtggagctgacatttcatctcctggcacagaaacactctcatttacacctggggaggctgagacccaaagcagttgagtgacctcacaaagctaccctgaagccctggagggagggctggcctgggtgcgggtgcagtgcatccaagcccctgtctgtgsccttggcaagtcaggaagcttggtgtgggctcctgcctcatcctcagccactcacgcaaaccaaacctgtgctgggcacgaaggcagcttgtggcctccttcgggactgaagaccaagcgagggctgactgagctttatctt

SEQ ID NO: 713819 - DNA, 1143 bp, Homo sapiens
tggtctgtgtggggttgagttgagcccatgctgactcaacacacttccagtggtggggtgaagactatggttcaatgctcactgtggcccgctccccagggaccttccggactcgaatgtagaggcccctgcatttgcccagagatggccgctctgagacacagggacactggtggctggacctcagctgtgggactctccctcrtcccatggccaaccataacactgcccctctgctcctcacccactaaggaccatctcagagttctgcttaagggtctaccacgttgttttaattctccacttgcactcagtcccaccattattcatcttatttgtttgtttacagattgtccgtctttctccactggactccaagcccaggagggaagggaccgggttggtctgtcctctgtggccccagtgcctagcatggtgcctggcatatggtaggaacctagtgagttctcagggaaggggtgagagatgccccagcacaacaactctgttagccgcagaagtttatttttcaggttgatatagactcctcgtaaacaaagcagatctgagtggagcagctctgtttggcttgaaggcatgtgggggcccagggacccctgctgtgctgaacttcctccataagcagcccctgcaagtcccattcacagcccccagggttcaaagaacacagtttgaggaaccactggtctgggacaagctcctcattttccagtggataaatagaggcagagaggtaaggtcatgtgctccaggtcacgcagtgagagacatgctgagaagagtacagggtcccctattcttgctgtcacccacgtgggtgtttaatcagctgtcaggcccaggaccctctttggactggccatcccaacacctgcccggtctcccggctctcagatggaggccggaagtgagccccagacctagcctccccgctggaatgcactccaaaaggcatcctggtaaagaacgaaggggcaggagaaataccgtctctgtgctgtgcatcccacaaaggcctggcctctgccttgccaatcagcatggccccatctgctgcactgcatcaagtaagtttaccatcccaaaaagaacccaggtgtatctatttttatctacttggta

SEQ ID NO: 713820 - DNA, 1143 bp, Homo sapiens
tggtctgtgtggggttgagttgagcccatgctgactcaacacacttccagtggtggggtgaagactatggttcaatgctcactgtggcccgctccccagggaccttccggactcgaatgtagaggcccctgcatttgcccagagatggccgctctgagacacagggacactggtggctggacctcagctgtgggactctccctcatcccatrgccaaccataacactgcccctctgctcctcacccactaaggaccatctcagagttctgcttaagggtctaccacgttgttttaattctccacttgcactcagtcccaccattattcatcttatttgtttgtttacagattgtccgtctttctccactggactccaagcccaggagggaagggaccgggttggtctgtcctctgtggccccagtgcctagcatggtgcctggcatatggtaggaacctagtgagttctcagggaaggggtgagagatgccccagcacaacaactctgttagccgcagaagtttatttttcaggttgatatagactcctcgtaaacaaagcagatctgagtggagcagctctgtttggcttgaaggcatgtgggggcccagggacccctgctgtgctgaacttcctccataagcagcccctgcaagtcccattcacagcccccagggttcaaagaacacagtttgaggaaccactggtctgggacaagctcctcattttccagtggataaatagaggcagagaggtaaggtcatgtgctccaggtcacgcagtgagagacatgctgagaagagtacagggtcccctattcttgctgtcacccacgtgggtgtttaatcagctgtcaggcccaggaccctctttggactggccatcccaacacctgcccggtctcccggctctcagatggaggccggaagtgagccccagacctagcctccccgctggaatgcactccaaaaggcatcctggtaaagaacgaaggggcaggagaaataccgtctctgtgctgtgcatcccacaaaggcctggcctctgccttgccaatcagcatggccccatctgctgcactgcatcaagtaagtttaccatcccaaaaagaacccaggtgtatctatttttatctacttggta

SEQ ID NO: 713821 - DNA, 1143 bp, Homo sapiens
tggtctgtgtggggttgagttgagcccatgctgactcaacacacttccagtggtggggtgaagactatggttcaatgctcactgtggcccgctccccagggaccttccggactcgaatgtagaggcccctgcatttgcccagagatggccgctctgagacacagggacactggtggctggacctcagctgtgggactctccctcatcccatggccaaccataacactgcccctctgctcctcacccactaaggaccatctcagagttctgcttaagggtctaccacgttgttttaattctccacttgcactcagtcccaycattattcatcttatttgtttgtttacagattgtccgtctttctccactggactccaagcccaggagggaagggaccgggttggtctgtcctctgtggccccagtgcctagcatggtgcctggcatatggtaggaacctagtgagttctcagggaaggggtgagagatgccccagcacaacaactctgttagccgcagaagtttatttttcaggttgatatagactcctcgtaaacaaagcagatctgagtggagcagctctgtttggcttgaaggcatgtgggggcccagggacccctgctgtgctgaacttcctccataagcagcccctgcaagtcccattcacagcccccagggttcaaagaacacagtttgaggaaccactggtctgggacaagctcctcattttccagtggataaatagaggcagagaggtaaggtcatgtgctccaggtcacgcagtgagagacatgctgagaagagtacagggtcccctattcttgctgtcacccacgtgggtgtttaatcagctgtcaggcccaggaccctctttggactggccatcccaacacctgcccggtctcccggctctcagatggaggccggaagtgagccccagacctagcctccccgctggaatgcactccaaaaggcatcctggtaaagaacgaaggggcaggagaaataccgtctctgtgctgtgcatcccacaaaggcctggcctctgccttgccaatcagcatggccccatctgctgcactgcatcaagtaagtttaccatcccaaaaagaacccaggtgtatctatttttatctacttggta

SEQ ID NO: 713822 - DNA, 656 bp, Homo sapiens
tcccccagcaccacgtccgcccattcagactgattgccttcactttttactgaccaaacagcacagatttgcaatgtcacataaaattgactaatgagaacattcttttccatccaaagtctaaagcccttttccttcttgtctcttaaaaaaaaaggaagaggacaaaattaaacacagcatttggggggcatattttcccttttgactacctgtgtaccttagaaaagcacagaaatgctgtaaagcagcaaggggaaggcatcctgctcccaccgcggcccggtggctgggcttccccactctccctggccccctgccccagtgtcctctttctcactctccctgtacattgattaacttcatgttcctgcccatgttccccaaaagaagttgcctgatgatcyctggactcaggctcaggggaagtccccataccctcctttctcctcaggagcccacagacattttgtgactaataacctgcccttcattaggcaccgggtcacttagttctggttgatggattgcctgcttggctctccccagctgatccccagtctatctatgactagaccctgaaaggcagggaccagaccatgtcacctcctccaggaagccacccttgactaccaagtcccccagcatacctcccc

SEQ ID NO: 713823 - DNA, 646 bp, Homo sapiens
tgtgattacaggtgtgagccaccatgcccgacctacggcaaacatttttaaagtgagaatcaatcaaacaatatacacaggataaactccattcacttatttaacaagtatttattaggtagctacatccaatatgctaagcctttttctaagcagtgaagatatggtagtgaaaaataaaaaccctattcatgacagtgagaaaaacacacaataacaacagacagataaggcaaaatatacggtatgttagaggagaaaaactaaagcaggaaaatgaaatgtttatgtgtttgatggggagggtggtgggaaagttgagatggccagaagagtccctgctgagaaagggttttttttttctaatacaaaaaaccttttatttgtatatcaaagactctaagaaacgatgacataaggttaacagcgytgatgtcaagatacaaataggtttgaagttagagatgataaatcactttgtttcattgaaccttgccttgattaccttagagagcattccttgtatgctcccaattgcatcttaagcatgatgtgtctgggtagtacacggctcttcctcagaaagtggatgttccttaatgtgtttctttttacccttttcttcttcttagaaaggtggttttaa

SEQ ID NO: 713824 - DNA, 597 bp, Homo sapiens
tcctaaaattggaacaatacggggaaagttagcgtggcttctgcataaggaggcagcacagatctttgaagcattccatattttgtgcagtcactggaaggtcatttgactatttgctgactagctctgaggaaatagtgtgaatcaaagcaaaatgggtgccacccaaatattgaaattgtgatttstgctgcaaaaatagtcatgtaagatggtctatgagatgacttagacctgaataacatgttcggtgcaaaatatattgttagtatgtatgtcgaaaattacagaatgtcagcttgctacttctccgtggaaactaaaataaataaaagtagacttttggtctcccatgtcagctggaattgaacatcaatataaagcattatcctaacagacatctactggctgagagtttgagtctgtagagaaggatcgttggtccaagtcaggtcttaacatccattggtttttctgcccttggtgtgattgatcaactccgtaatagtggacatcacattatctactttaatgagatattatgaataaatgtagttataactatgacatagttgagatgccctgaattataagcca

SEQ ID NO: 713825 - DNA, 597 bp, Homo sapiens
tcctaaaattggaacaatacggggaaagttagcgtggcttctgcataaggaggcagcacagatctttgaagcattccatattttgtgcagtcactggaaggtcatttgactatttgctgactagctctgaggaaatagtgtgaatcaaagcaaaatgggtgccacccaaatattgaaattgtgatttctgctgcaaaaatagtcatgtaagatggtctatgagatgacttwgacctgaataacatgttcggtgcaaaatatattgttagtatgtatgtcgaaaattacagaatgtcagcttgctacttctccgtggaaactaaaataaataaaagtagacttttggtctcccatgtcagctggaattgaacatcaatataaagcattatcctaacagacatctactggctgagagtttgagtctgtagagaaggatcgttggtccaagtcaggtcttaacatccattggtttttctgcccttggtgtgattgatcaactccgtaatagtggacatcacattatctactttaatgagatattatgaataaatgtagttataactatgacatagttgagatgccctgaattataagcca

SEQ ID NO: 713826 - DNA, 597 bp, Homo sapiens
tcctaaaattggaacaatacggggaaagttagcgtggcttctgcataaggaggcagcacagatctttgaagcattccatattttgtgcagtcactggaaggtcatttgactatttgctgactagctctgaggaaatagtgtgaatcaaagcaaaatgggtgccacccaaatattgaaattgtgatttctgctgcaaaaatagtcatgtaagatggtctatgagatgacttagasctgaataacatgttcggtgcaaaatatattgttagtatgtatgtcgaaaattacagaatgtcagcttgctacttctccgtggaaactaaaataaataaaagtagacttttggtctcccatgtcagctggaattgaacatcaatataaagcattatcctaacagacatctactggctgagagtttgagtctgtagagaaggatcgttggtccaagtcaggtcttaacatccattggtttttctgcccttggtgtgattgatcaactccgtaatagtggacatcacattatctactttaatgagatattatgaataaatgtagttataactatgacatagttgagatgccctgaattataagcca

SEQ ID NO: 713827 - DNA, 597 bp, Homo sapiens
tcctaaaattggaacaatacggggaaagttagcgtggcttctgcataaggaggcagcacagatctttgaagcattccatattttgtgcagtcactggaaggtcatttgactatttgctgactagctctgaggaaatagtgtgaatcaaagcaaaatgggtgccacccaaatattgaaattgtgatttctgctgcaaaaatagtcatgtaagatggtctatgagatgacttagacctgaataacatgttcggtgcaaaatatattgttagtatgtatgtcgaaaattacagaatgtcagcttgctacttctccgtggaaactaaaawaaataaaagtagacttttggtctcccatgtcagctggaattgaacatcaatataaagcattatcctaacagacatctactggctgagagtttgagtctgtagagaaggatcgttggtccaagtcaggtcttaacatccattggtttttctgcccttggtgtgattgatcaactccgtaatagtggacatcacattatctactttaatgagatattatgaataaatgtagttataactatgacatagttgagatgccctgaattataagcca

SEQ ID NO: 713828 - DNA, 597 bp, Homo sapiens
tcctaaaattggaacaatacggggaaagttagcgtggcttctgcataaggaggcagcacagatctttgaagcattccatattttgtgcagtcactggaaggtcatttgactatttgctgactagctctgaggaaatagtgtgaatcaaagcaaaatgggtgccacccaaatattgaaattgtgatttctgctgcaaaaatagtcatgtaagatggtctatgagatgacttagacctgaataacatgttcggtgcaaaatatattgttagtatgtatgtcgaaaattacagaatgtcagcttgctacttctccgtggaaactaaaataaatraaagtagacttttggtctcccatgtcagctggaattgaacatcaatataaagcattatcctaacagacatctactggctgagagtttgagtctgtagagaaggatcgttggtccaagtcaggtcttaacatccattggtttttctgcccttggtgtgattgatcaactccgtaatagtggacatcacattatctactttaatgagatattatgaataaatgtagttataactatgacatagttgagatgccctgaattataagcca

SEQ ID NO: 713829 - DNA, 597 bp, Homo sapiens
tcctaaaattggaacaatacggggaaagttagcgtggcttctgcataaggaggcagcacagatctttgaagcattccatattttgtgcagtcactggaaggtcatttgactatttgctgactagctctgaggaaatagtgtgaatcaaagcaaaatgggtgccacccaaatattgaaattgtgatttctgctgcaaaaatagtcatgtaagatggtctatgagatgacttagacctgaataacatgttcggtgcaaaatatattgttagtatgtatgtcgaaaattacagaatgtcagcttgctacttctccgtggaaactaaaataaataaaagtagacttttggtctcccatgtcagctggaattgaacatcaatataaagcattatcctaacagacatctactggctgagagtttgagtckgtagagaaggatcgttggtccaagtcaggtcttaacatccattggtttttctgcccttggtgtgattgatcaactccgtaatagtggacatcacattatctactttaatgagatattatgaataaatgtagttataactatgacatagttgagatgccctgaattataagcca

SEQ ID NO: 713830 - DNA, 966 bp, Homo sapiens
gcaggaccagacaagaattgtgatgttttacaatagcttgtgtaccgaacatctacttgtgtcactttagagtctgagacatcacacagcagatacgatttgcttcagatcgggtaactaattacagaagatcattcaactaccagcaaaataaaaagttctatgaaagcttgaactggggactgccatgttcaatgctgtacccccagcacctagccagagctgagcacacagtaggtgtctaatcaactgatgccaaagaaacagagctaccatctatagaggtcttattctgcttaaagcatatgacacgtgttatctctaggagcaatcattcaacattttcatcaattggagtatttgactttacattaagcttagaatctcattcagtaggcaatggtatttttttatatatctgatagtaatagaactttatttgctttctcctagaacttgaagatacaagtgaaaatgttttgtttactattccaccaaagccataaaacagggccaaatctggtctaccgcctatttttgtacggtctgtgagcttagaataatatttacattcttaaatggtttttaaaaaatattttgtgacatgtacaaattacataaaattccaattttcatgttcgaaaataaaaattgtacttgaatgcagccacaccctgttgttgacctattctctatggctgctttcatcctgcaacagcacagctaagtagctgcagcgatgcatatacrgctcaaaaagcttacaatgtttactggctggctcttttcagaaggttttctgaccactgctctagagtgcacgaagagcaaccagttggaagaaaggaatcaatcctaaaacaaaatttattgattttgataatatttcatcactgactttcaaaatatttgatgtaaattaaacttgaggatggccaataaaagcagctctattttctattatgt

SEQ ID NO: 713831 - DNA, 1123 bp, Homo sapiens
gcccgcctcagcctcccacagtactgggattacaggcaggagccactgtacccggccttgattatttttttttttattacaaatacagctgctatgaacatcttgtacaaatctttttgtgaacaaatgttttcatttcttttgggtaaatacctaaaaatgggcttgatgtatcataggtttaactttgtaagaaactacctcacctgtaatctcagcactttgggaggccaaggtgggaagactgcttgggtccaggagttcaagaccagtctgggcaacatggcgaaacactgtctccttttgtaaatgtcagtttaagtcttttgcctattttttattgggttgtctttttattactgatttggagttctttatatattctggatacaaatactttgaaggatatataaatatatataaagtatatatatataaaacaggtattttctcccagtctttggcttgtttttacattttcttattatatttattattatttaaggcctttattagcagtttgcagtttggctttttaaaaaccagatgctgcactgataatgcaattagttctagttatctggttaacaggcaaaaaataaataaataaatcacccccaccctgcccagcctcaggatccaaggcattctcagctggtggatcccttgcttttgtctctgccacagtggggtttaggattttctggacatctacatctgtaactgaagttgcagttgttgaccttgtgtctcatcttgattttccttytcctcttcattgctgacctctctgtctttggtgagaaggggccctggagaattgtggtgtaggattgtgtcactggtccaccttgttctcctgcaccctggttatcagtacctccatcacttctccctgcaccggacggctgcaatagtgtgggcacctggccgtcacagccacaatagtggtgcaccacaataatgtgggtacccacagggtcgccacaggctagaagcccatgcctgggccagctgttgagcctggccttcaggaacactctctgacctttggtcatttccccactctcactgttctgataattcggctggtgagtgagtggaggactggccctacaatgcg

SEQ ID NO: 713832 - DNA, 1123 bp, Homo sapiens
gcccgcctcagcctcccacagtactgggattacaggcaggagccactgtacccggccttgattatttttttttttattacaaatacagctgctatgaacatcttgtacaaatctttttgtgaacaaatgttttcatttcttttgggtaaatacctaaaaatgggcttgatgtatcataggtttaactttgtaagaaactacctcacctgtaatctcagcactttgggaggccaaggtgggaagactgcttgggtccaggagttcaagaccagtctgggcaacatggcgaaacactgtctccttttgtaaatgtcagtttaagtcttttgcctattttttattgggttgtctttttattactgatttggagttctttatatattctggatacaaatactttgaaggatatataaatatatataaagtatatatatataaaacaggtattttctcccagtctttggcttgtttttacattttcttattatatttattattatttaaggcctttattagcagtttgcagtttggctttttaaaaaccagatgctgcactgataatgcaattagttctagttatctggttaacaggcaaaaaataaataaataaatcacccccaccctgcccagcctcaggatccaaggcattctcagctggtggatcccttgcttttgtctctgccacagtggggtttaggattttctggacatctacatctgtaactgaagttgcagttgttgaccttgtgtctcatcttgattttccttttcctcttcattgctgacctctctgtctttggtgagaaggggccctggagaattgtggtgtaggattgtgtcactggtccaccttgttctcctgcaccctggttatcagtacctccatcacttctccctgcaccggacggctgcaatagtgtgggcacctrgccgtcacagccacaatagtggtgcaccacaataatgtgggtacccacagggtcgccacaggctagaagcccatgcctgggccagctgttgagcctggccttcaggaacactctctgacctttggtcatttccccactctcactgttctgataattcggctggtgagtgagtggaggactggccctacaatgcg

SEQ ID NO: 713833 - DNA, 670 bp, Homo sapiens
gagagggcggcatgatcctagtgggccgaggtcaaccgccagggtcaaacggaacacaacccactctcaggaagacatccctaacacaaatccagggactttgtttcttaaccttaaaattggaaacacttcttgctaccagggatggggggtggggctcagcgtttggggaamcggagtgggagtcttttgctgaacagacttttgttttcttaagttttgaactacatgaatgtatttccttttttgaaaggaaaattgaaataggaaaaaattttaagtcttttggaaagaattaatcattttcatggaactgcttccctataggggcctgttttcgtatctgccaacttccactgaaacacgcagatggagaaccctccagtgctcccgagaagggagacagtcttaacccagaggacagcatccaccagcctgcaagcacggaccccgtgctggtgtgtgagtgcagcacacactgggctaaccatcaccacagtgagactggcaccctctggggtagggtagactcaggaaggtgaaaatcaggatgtctgccaggagctgacaaatccctctgggactctcatacttcagaggctctccagtttggctattgctaaacttggactagcccctactaccgatcttaatacccatgtaccaatca

SEQ ID NO: 713834 - DNA, 608 bp, Homo sapiens
ccatcctaaccaacatggtgaaaccccatatctactaaaaatacaaaacttagccaggcgtggtgttgggtgccagtgaccccagctactcgggaggctgaggtgggagaatctcttgaacccrggaggcggaggttgcagtgagccgaaatggcgccactgcactccagcctgggcgacagagcagattctgtaaaaaacaaaacaaaacaaaacatgttaaagatacccattcacttctgttgacaccccagtggccacactaagctataagagaggctgtgaaatggagtcttgattctgggcagctgggttccagctaaaagtccagagttctgttcgtaagcgtgagcgggacacccgacaggaagagagaagtagaagcctgtttgcagctttgcaggaactatggcccgaccctctggggaaatggaggctcttcccaagctgaccagctgctgctcctattacaatggggatgtagtaattggagagagggtggaattcatgggggcagttggttctttgtggagttgtggggataggacgtgaggtttttccctaacgcttgagcacagtgtgtgtggctgtgataagtgctcagttca

SEQ ID NO: 713835 - DNA, 650 bp, Homo sapiens
ttttcctgactcagcctcccaagtagctgggattacaggcacccgcccccacctcagctaactttttttgtatttttagtagagacgggtcttcaccatgttggacaggctggtctcgatctcytgacctctggttatctgcccacctcggcctcctaaatccatgcctgggattacaggcgtgagccaccacgccctgccttatgttattttttaactacactttactgttcttctggaaagcatatggtaaaagacgacttcagaagtaagagaatttagaacaatgtaagtgaattactaatgaataagaaggaaacattaagaaaatttcatgaaatgtccctggaaattacattttttacattataatattttcacaattggtcttctgtacagtaataaaatgagctacatgagacagtgatgtggtttttcagttgctggagaagggaaaaggaagtttcctccagttgagctttgctaggtgagacaaggcaacataagttcttttttatttcagctttattaaggtataattgacaaattaaaattgtatatatttattgtgtacaatgtaatattttgatatacatatctacgcacatattgtgaatgattaaatcaagctaatgaacatatctatcacc

SEQ ID NO: 713836 - DNA, 650 bp, Homo sapiens
ttttcctgactcagcctcccaagtagctgggattacaggcacccgcccccacctcagctaactttttttgtatttttagtagagacgggtcttcaccatgttggacaggctggtctcgatctcctgacctctggttatctgcccacctcggcctcctaaatccatgmctgggattacaggcgtgagccaccacgccctgccttatgttattttttaactacactttactgttcttctggaaagcatatggtaaaagacgacttcagaagtaagagaatttagaacaatgtaagtgaattactaatgaataagaaggaaacattaagaaaatttcatgaaatgtccctggaaattacattttttacattataatattttcacaattggtcttctgtacagtaataaaatgagctacatgagacagtgatgtggtttttcagttgctggagaagggaaaaggaagtttcctccagttgagctttgctaggtgagacaaggcaacataagttcttttttatttcagctttattaaggtataattgacaaattaaaattgtatatatttattgtgtacaatgtaatattttgatatacatatctacgcacatattgtgaatgattaaatcaagctaatgaacatatctatcacc

SEQ ID NO: 713837 - DNA, 610 bp, Homo sapiens
caaaaattttctggccatggtggtgtgcacctgtagtcccagctactctggaggctgaggcaggaggatcgactgagccctggagttggaggctataatgaggtaggattataccactgtcctccagcctgggaaacagagcaagaccctctctctttttttaaaaaaaaaaaaagtctaaacttttaatgctaacagcaagactagatgagacctcccactccacacacacattggcaawgtagactctgcttggaaagtaatcattatttcctctacttttatggaagttggtcgcttagtggaacagaagagagatttttttccaagcagacacaaagactccctcccctcatgcttaatgagacaacctacttcaacactgaggcttggcccccaccacgcagagacattgccacatcaaagacatgaatctctgtggcaggagtgtgcacctcttccttctccatgcaaaccctgatgcgagaggcaactaccattcccacctgaacacttacttatcttcccacacactcaaaaggtagcggactgggtttcttctgcattattctgagaaagtggttaagcagaaaacagccctgacaaaggc

SEQ ID NO: 713838 - DNA, 630 bp, Homo sapiens
cttcaacattttaaggctgaatcacaaaataaaaggagttcattgaaaaaggataacaagccactggcactatgctaaaagcttaatagtaacaggaaaaaagttgtttatcagtaccttgtcatggtaaggccccagcacgatccatccacagaagcagtaacctaagtaaatcatagctgcacagcagcagaacctgatgacattgggcagcgctgcctgaagggtcaaaatgaggagctgggaaagtaagagaggccattagaatggttttgtcctttagccaaagcagtgcaataactttgagagaaataccaacagcatggagatccgtggaattccttacgttgtactttgcaaagaaaccgaggtatcggatgactccaagccacacragcatggtagaagtcccaagaagtatgctacagacatcataactagttagactctaagagagagtggaaaaatataatcagattataaagcagaaattcatttggcaataaatattgaggtaagtatgagtaaggcactgttttaggtgctaaggataaagcagtgaacaaacaaaagtctctgctctcataaagcttacattctagtggagggaagaaagagacaacagaaata

SEQ ID NO: 713839 - DNA, 630 bp, Homo sapiens
cttcaacattttaaggctgaatcacaaaataaaaggagttcattgaaaaaggataacaagccactggcactatgctaaaagcttaatagtaacaggaaaaaagttgtttatcagtaccttgtcatggtaaggccccagcacgatccatccacagaagcagtaacctaagtaaatcatagctgcacagcagcagaacctgatgacattgggcagcgctgcctgaagggtcaaaatgaggagctgggaaagtaagagaggccattagaatggttttgtcctttagccaaagcagtgcaataactttgagagaaataccaacagcatggagatccgtggaattccttacgttgtactttgcaaagaaaccgaggtatcggatgactccaagccacacgagcatggtagaagtcccaagaagtatgctacagacatcataactagttagactctaagagagagtggaaaaatataatcagattataaagcagaaattcatttggcaataaatattgaggtaastatgagtaaggcactgttttaggtgctaaggataaagcagtgaacaaacaaaagtctctgctctcataaagcttacattctagtggagggaagaaagagacaacagaaata

SEQ ID NO: 713840 - DNA, 569 bp, Homo sapiens
tgaagatgttttcttttctaaagagtaaatgttcaaaatagtaagagaacactattagaacttaatagcctaatccatcaaaaaataaaaaaaaggccatttaatttccctttaacacaggaactaaatctttttgaaaccttgtgtatgtcaggctgtctttgcattataattccagcaaggtgatcttgctaagaatttgttgcaaatagctttggtccttaatgtcacaacctccctcctgcgtgactgagatagtaagcacttaaaaaatcaaggcygggaatgattatcctttgtgtattctttcattacttcattaaaaaaaaatagttttctctatttcaatttcctgtgcctttatatggtttttgtctttcttatagtctctgacctaaaaagcaggaagtaaaaatgttcaaacgatctggaataagtacaagttcagaacaaaaataatttttgccctttaactgactatgaaccacatagtttgaattttagaatttgaatttaatgctcttccgactccatatatttattcactaaaaatattaaattactcatat

SEQ ID NO: 713841 - DNA, 614 bp, Homo sapiens
tatacttttgatgtcaagactcattcagaaaaaaagacataaatccaaatcttagctagcttgactacttgagatctcttttctgtaaattttttacaactttcttatatccatccaggtgattttgtttgtgtgtgtttgtttactacattttcctctttcttgttctggttctactttaggttctactgggttctactttcatgtaaaattactttttttttcttgaacaaaagcacattcttcaaacctcatacttttcctgcaaagtttattttcacccttattatttctaatagctttaattaaatatgttgattaaatttctttttttttttttttttttttttttttgagacggagtctcgctgtcscccaggctggagtgcaggggcgcaatctcggctcactgcaggctccgccccctggggttcacgccattctcctgcctcagcctcccgagtagctaggactacaggcgcccgccacctcgcccgggtaattttttgtatttttagtaaaaacggggtttcaccgggttagccaggatggtctcgatctcctgacctcgtgatccgcccgcctcggcctcccaaagtgctgggattacaggc

SEQ ID NO: 713842 - DNA, 614 bp, Homo sapiens
tatacttttgatgtcaagactcattcagaaaaaaagacataaatccaaatcttagctagcttgactacttgagatctcttttctgtaaattttttacaactttcttatatccatccaggtgattttgtttgtgtgtgtttgtttactacattttcctctttcttgttctggttctactttaggttctactgggttctactttcatgtaaaattactttttttttcttgaacaaaagcacattcttcaaacctcatacttttcctgcaaagtttattttcacccttattatttctaatagctttaattaaatatgttgattaaatttctttttttttttttttttttttttttttgagacggagtctcgctgtcccccaggctggagtgcagkggcgcaatctcggctcactgcaggctccgccccctggggttcacgccattctcctgcctcagcctcccgagtagctaggactacaggcgcccgccacctcgcccgggtaattttttgtatttttagtaaaaacggggtttcaccgggttagccaggatggtctcgatctcctgacctcgtgatccgcccgcctcggcctcccaaagtgctgggattacaggc

SEQ ID NO: 713843 - DNA, 855 bp, Homo sapiens
ttttttcatgtgtcttttgtctgcataaatgtcttcttttgagaagtgtctgggtgaagtaattttaaagctgcaggggcaatccggagcaataaacttgagttccctaatcatttaccatcttgctataatcacctttgcagtgatctatggtgataaatcaggaaagctagctaaggcagctactcctggggaagacaagattaataccagagctttgcaagtaaktgtacccattcatagaatgaaaacatccttccacactggaaaataatggacattcaagaaattagagaactatgcaagtcttggtgtagaacaactagttgacattactagaaaaaaaaaaacttttttttaagggagaaaagcatattcaatctttggattcaccgttctggagaagatggtgtctctttagccctggaaagagtgacaaaaaagctccaaagtgaaatcattaaaatgttagctttatctgcaaatcagattttatgcagctctgaatataattccagtgtatatatatacattattgaacgctttttgccatgatattagctactgcaatagactttaccatataggggaatagagtacaaaatggtcttggttttcctatataaagtaaactataaaattaaattatgatcatagaaccttgttagtttattcagttgaacctagcaaggaacttgtcttaatttactcataaaaatggataaatacttattaagtatttgctttactctaagaactcttttaggagtttgggatatagagttgaataagaaattgctatagtatatgtaggtaactgtcataagctaataattacaagtgaagtaataacta

SEQ ID NO: 713844 - DNA, 1944 bp, Homo sapiens
atctcaaagattgcattatttgatattgacatagctatacctatgtatttagctagtgtttatttagtatttcttttcctttttttttattttctgccttctttttctctgagattttaattctgtgtctttaaagcaacatgtaactggttgaacttttaatgcatttttttctattggaatgtctagtaaacacttgcatgtgaaacaaggacactattaccaggttaaaattcaagccgaagactgggagacattattgtctacatgtatagtagaaaatctgcagaagccctacaaataaaaagatagacaaataccctagtgggaacatgagcaaagtaaatgaacaggtacattgaagatataattcaaatggccaacaagcaaaagtcaagtagctttagtagtaatcagagaaatgctgatggtgtgtaaaaaattacactggaaagcattgtgaaaataccgaagaaatttgtagatgcacattacctaggaaaataattctacttcctgytacccatcctagaaaaattcctatgcactaataagggagccttaggtgaaaaggattttcaccatttcatttgtaatagtatgatatttgaaacaaacttattgttcattaatacggaagtgggtaaacagaggatcaataaatggaatacagtattgaaactgtaaacactgcacctaaatgcatcaatacatcaacaaggataaatctcacaaaataatattataaataaagaaaaaagttcttacagcattagggccatacggcactatttatgtagattttgaaaatgcccaaaacatttctttgtattatttgaatatatatatatgttattaaaaatatggatttgaatactcaccaaattaaggaggctggttgaatccaggaaaaaaattaaggttgggatttagctatatctacaaaattttattaattctttctgagggggaagaacatatcaagaaaatatagcaaatcaagagcaatttttaaatctgaatgaagtgtctgtagaagtaaggattcttatttttcttactgttttgaatgtttgaaatattttacaattaaatatttttaaaaaaataatttttggcatttatgggttttcagaatgaagtacacatataaaatggacaaagataattgtagatataaagttaatttcgagtctaacctgaacatttacacagtacaaacttgaccctatttttacattttgtattcatgtcactattatttgaaagatagctgatggagcatccattaatgtatagtcatgcaaatgtacagttagatatttaaacaaataaaactgactaaaaaatgggttcaacttaaaagaagtaggggcatttggacactaaaattgaaaatattgctttaattaggcaatacctttgtctaaaagatttttagccactgatacaatttggaaaatgggcatcattgaatagattctgttttaggaaaataggaagcctgaatatttgcagaaacagaattttttgtaaaattaaattcaggtttactttatctcgtgtttatcctcataaaatttatgaagcaacctaacaatattttcaactgcaatttcttgaaagctaaagaaagcctagtctgtaaaatacttgttttatagactctcagcaatctcattactaaggtcaacatgattacaaatatttcatcttctccttacaaagtttcacttgttcctttacttacaagtaatctaaatttgggagaatattttttaaaaatgtgctaagggtctttcccatgagttctcatagaacactgcacatttctaatcactgcatttacttcactgcaatttcctgtttacttgtgggcctttgccctaatcttggtcactcttttattccagtgcccagcactgtgccagtcacatagtttgt

SEQ ID NO: 713845 - DNA, 595 bp, Homo sapiens
ttccaatatatggaaaggacataaatccatttctattaaatataatgggaaaaatcaaggcaaataaaaacaaatatctttgtgtttataaagattatttgctgcctggtcacatatggggtttattgattcagtccaaggctggactgctatatttgctgtgartatctgctggcaaaattttctcgcctcattattttgtgatattatgcattctctgcagcacatttatattcagcatgtgaggtacccgccatgcttccatatatacccttttgtacctatacttctttattacttgtttaataaaaccatcgcagaaacaagcagagcagacaaaataaacaagagttcttcataaaaatgacttgcaaattcaatacatagttatacctgctggcaatatgactctattcacatatgcacctgtgtttcttaaaaggtggtgggtctgcagttaaagtgggcttaattacaaaaggaatatgagaatattaggaaacccaccacaaaagccctctagaatcaaaatcagtatgttcgtttatggtgtcagattactttagtagaatgaacagatctgggtgaaacatta

SEQ ID NO: 713846 - DNA, 595 bp, Homo sapiens
ttccaatatatggaaaggacataaatccatttctattaaatataatgggaaaaatcaaggcaaataaaaacaaatatctttgtgtttataaagattatttgctgcctggtcacatatggggtttattgattcagtccaaggctggactgctatatttgctgtgagtatctgctggcaaaattttctcgcctcattattttgtgatattatgcattctcwgcagcacatttatattcagcatgtgaggtacccgccatgcttccatatatacccttttgtacctatacttctttattacttgtttaataaaaccatcgcagaaacaagcagagcagacaaaataaacaagagttcttcataaaaatgacttgcaaattcaatacatagttatacctgctggcaatatgactctattcacatatgcacctgtgtttcttaaaaggtggtgggtctgcagttaaagtgggcttaattacaaaaggaatatgagaatattaggaaacccaccacaaaagccctctagaatcaaaatcagtatgttcgtttatggtgtcagattactttagtagaatgaacagatctgggtgaaacatta

SEQ ID NO: 713847 - DNA, 671 bp, Homo sapiens
ttgtaatgatttatgaaataattattaaatgatacttttattttaaacttatacattcagttttaggatgaagttactttgtaaagtaagttatgcctatctattttctttccataaatacaccccagctactgagcttggcactagagttttgatagagagaaaaacagacatgttccctcatcctcaaagtttgtggattagaggaaaggacagatacaaaattgcctcctaaattcttgccttccccgttgcctccctcaagacctcctcaattctcttacctctgcaggaaatgcattttctctgtcataagccctaccaacccctcacattttcgagtcttagtatgaaagctaccttctcagagagctctttcctgattcctaaagcaagtcttcccacaaaccccttcttcccttgcactgaactctgttttcttcaaaaaagttattacaattcaaaatgtacatatatttttgtggtgttcagtgatttttcatctttcctatgagattataggctctgtagctrcatagaacttgtctcttgttcaccaatgtttactatcaccttaccatgtgcctcgcacacagtaagtgttcaataaatatttgttgaatgagggcaaaaaataatcgctaaaataaatgtaaatatctgactgagat

SEQ ID NO: 713848 - DNA, 1150 bp, Homo sapiens
ttttactcttactttctcattagtgggctaagagtgtgcaaaagccacacacgtgacctgtgatttcataacaaattgagtgcagaagtaggtgagaaaatccagctgtattctattaggccagaaaggaaggtctttgcaaaaatgtcaaacaaagccacttttctcattatgattttgttttggaaagcatagttatttttttaccaaaatatgttatttctgttaacatacaatggagctattattgttattttaaatataaattcatacataaattttttcatttctcaatttaaatttctaatattataaatattgataaatataacccacatagacaaaagctctttggtgtcctcaaagatttttttcatgtaaagaagtccaaatatttmagaattactaatataagctattatgactatcagtttctcccacctgtaagttttgcgtttttctcctgcaaactgcctgcctagtgaaatgttgtcttcacatctctcccttaaaaaaagatctgatttttttgtctgtttgtttttacaggattttgggggacagtaatttttaaatcaccagacacaaccaaccaaatgtatttacaattctgattcctgggctctacctccagaaatcctgattccaaaagtttagatgagacccaagaacctggatgtttaaactctaagtgatgctgagatattaccatgtattttaaaggcaatcttgcccaaggatctccatattcatctccgcagatttaacacagtctctgcattcaactgttcttcctgctcaatgtgagcttaccacatttcctcactgaagggtgagcagtctttgtagctgagagatgtcatcaaaatgcacagtagatacctcccagacttctatgggcgatttgcaactttgaggattgcgaaaactatctaccagctttctagatgtctgcatagcccagtaggaattaactttgcagccataagtagctccttcaactgcaaatttcctccaggctcatttaagctctgaggatgatggaggtaaaagagaaagtatagggagaagactggttgtggggaagatccgagaaaggctgaggatggacccagctagcttgtagagtgaatcagactcctggcctgag

SEQ ID NO: 713849 - DNA, 1150 bp, Homo sapiens
ttttactcttactttctcattagtgggctaagagtgtgcaaaagccacacacgtgacctgtgatttcataacaaattgagtgcagaagtaggtgagaaaatccagctgtattctattaggccagaaaggaaggtctttgcaaaaatgtcaaacaaagccacttttctcattatgattttgttttggaaagcatagttatttttttaccaaaatatgttatttctgttaacatacaatggagctattattgttattttaaatataaattcatacataaattttttcatttctcaatttaaatttctaatattataaatattgataaatataacccacatagacaaaagctctttggtgtcctcaaagatttttttcatgtaaagaagtccaaatatttcagaattactaatataagctattatgactatcagtttctcccacctgtaagttttgcgtttttctcctgcaaactgcctgcctagtgaaatgttgtcttcacatctctcccttaaaaaaagatctgatttttttgtctgtttgtttttacaggattttgggggacagtaatttttaaatcaccagacacaaccaaccaaatgtatttacaattctgattcctgggctctacctccagaaatcctgattccaaaagtttagatgagacccaagaacctggatgtttaaactctaagtgatgctgagatattaccatgtattttaaaggcaatcttgcccaaggatctccrtattcatctccgcagatttaacacagtctctgcattcaactgttcttcctgctcaatgtgagcttaccacatttcctcactgaagggtgagcagtctttgtagctgagagatgtcatcaaaatgcacagtagatacctcccagacttctatgggcgatttgcaactttgaggattgcgaaaactatctaccagctttctagatgtctgcatagcccagtaggaattaactttgcagccataagtagctccttcaactgcaaatttcctccaggctcatttaagctctgaggatgatggaggtaaaagagaaagtatagggagaagactggttgtggggaagatccgagaaaggctgaggatggacccagctagcttgtagagtgaatcagactcctggcctgag

SEQ ID NO: 713850 - DNA, 1150 bp, Homo sapiens
ttttactcttactttctcattagtgggctaagagtgtgcaaaagccacacacgtgacctgtgatttcataacaaattgagtgcagaagtaggtgagaaaatccagctgtattctattaggccagaaaggaaggtctttgcaaaaatgtcaaacaaagccacttttctcattatgattttgttttggaaagcatagttatttttttaccaaaatatgttatttctgttaacatacaatggagctattattgttattttaaatataaattcatacataaattttttcatttctcaatttaaatttctaatattataaatattgataaatataacccacatagacaaaagctctttggtgtcctcaaagatttttttcatgtaaagaagtccaaatatttcagaattactaatataagctattatgactatcagtttctcccacctgtaagttttgcgtttttctcctgcaaactgcctgcctagtgaaatgttgtcttcacatctctcccttaaaaaaagatctgatttttttgtctgtttgtttttacaggattttgggggacagtaatttttaaatcaccagacacaaccaaccaaatgtatttacaattctgattcctgggctctacctccagaaatcctgattccaaaagtttagatgagacccaagaacctggatgtttaaactctaagtgatgctgagatattaccatgtattttaaaggcaatcttgcccaaggatctccatattcatctccgcagatttaacacagtctctgcattcaactgttcttcctgctcaatgtgagcttaccacatttcctcactgaagggtgagcagtctttgtagctgagagatgtcatcaaaatgcacartagatacctcccagacttctatgggcgatttgcaactttgaggattgcgaaaactatctaccagctttctagatgtctgcatagcccagtaggaattaactttgcagccataagtagctccttcaactgcaaatttcctccaggctcatttaagctctgaggatgatggaggtaaaagagaaagtatagggagaagactggttgtggggaagatccgagaaaggctgaggatggacccagctagcttgtagagtgaatcagactcctggcctgag

SEQ ID NO: 713851 - DNA, 1150 bp, Homo sapiens
ttttactcttactttctcattagtgggctaagagtgtgcaaaagccacacacgtgacctgtgatttcataacaaattgagtgcagaagtaggtgagaaaatccagctgtattctattaggccagaaaggaaggtctttgcaaaaatgtcaaacaaagccacttttctcattatgattttgttttggaaagcatagttatttttttaccaaaatatgttatttctgttaacatacaatggagctattattgttattttaaatataaattcatacataaattttttcatttctcaatttaaatttctaatattataaatattgataaatataacccacatagacaaaagctctttggtgtcctcaaagatttttttcatgtaaagaagtccaaatatttcagaattactaatataagctattatgactatcagtttctcccacctgtaagttttgcgtttttctcctgcaaactgcctgcctagtgaaatgttgtcttcacatctctcccttaaaaaaagatctgatttttttgtctgtttgtttttacaggattttgggggacagtaatttttaaatcaccagacacaaccaaccaaatgtatttacaattctgattcctgggctctacctccagaaatcctgattccaaaagtttagatgagacccaagaacctggatgtttaaactctaagtgatgctgagatattaccatgtattttaaaggcaatcttgcccaaggatctccatattcatctccgcagatttaacacagtctctgcattcaactgttcttcctgctcaatgtgagcttaccacatttcctcactgaagggtgagcagtctttgtagctgagagatgtcatcaaaatgcacagtagatacctcccagacttctatgggcgatttgcaactttgaggattgygaaaactatctaccagctttctagatgtctgcatagcccagtaggaattaactttgcagccataagtagctccttcaactgcaaatttcctccaggctcatttaagctctgaggatgatggaggtaaaagagaaagtatagggagaagactggttgtggggaagatccgagaaaggctgaggatggacccagctagcttgtagagtgaatcagactcctggcctgag

SEQ ID NO: 713852 - DNA, 1150 bp, Homo sapiens
ttttactcttactttctcattagtgggctaagagtgtgcaaaagccacacacgtgacctgtgatttcataacaaattgagtgcagaagtaggtgagaaaatccagctgtattctattaggccagaaaggaaggtctttgcaaaaatgtcaaacaaagccacttttctcattatgattttgttttggaaagcatagttatttttttaccaaaatatgttatttctgttaacatacaatggagctattattgttattttaaatataaattcatacataaattttttcatttctcaatttaaatttctaatattataaatattgataaatataacccacatagacaaaagctctttggtgtcctcaaagatttttttcatgtaaagaagtccaaatatttcagaattactaatataagctattatgactatcagtttctcccacctgtaagttttgcgtttttctcctgcaaactgcctgcctagtgaaatgttgtcttcacatctctcccttaaaaaaagatctgatttttttgtctgtttgtttttacaggattttgggggacagtaatttttaaatcaccagacacaaccaaccaaatgtatttacaattctgattcctgggctctacctccagaaatcctgattccaaaagtttagatgagacccaagaacctggatgtttaaactctaagtgatgctgagatattaccatgtattttaaaggcaatcttgcccaaggatctccatattcatctccgcagatttaacacagtctctgcattcaactgttcttcctgctcaatgtgagcttaccacatttcctcactgaagggtgagcagtctttgtagctgagagatgtcatcaaaatgcacagtagatacctcccagacttctatgggcgatttgcaactttgaggattgcgaaaactatctaccagctttctagatgtctgcatagcccagtaggaattaactttgcagccataagtagctccttcarctgcaaatttcctccaggctcatttaagctctgaggatgatggaggtaaaagagaaagtatagggagaagactggttgtggggaagatccgagaaaggctgaggatggacccagctagcttgtagagtgaatcagactcctggcctgag

SEQ ID NO: 713853 - DNA, 555 bp, Homo sapiens
atgctgttttttgtgaaaaatcccttacccaaacttgaaatgtcccttcattagcccctttcgtctggctaccttggtagagtctttttctccatccctttaatctgggctgagttatgacttgctttgccagtagaatatggggaacatgtcactgtgtgatttccagagtttaggccttaagaagctttgaatcccccattatcactctcctataacygtgagaatacctgctgtgcagaagcccagtctagcctgctggaggacaaaaggccacgtagagatggaccaaggtgccttggccaacagccagcacccactgccagatatgagagagaggccatcttggacatcctagtcctgttgaactcagatgactgcagccacaggagtgatcccaggtaagactagccaaagaactgtccaggctgcctgcccacagaataagtatcagtcattatcaccggttaatgcacagaaatagaaatttttaacctgactaagcaaaacaacaaataaacttacttgctataaggaatcaattccacctccttt

SEQ ID NO: 713854 - DNA, 915 bp, Homo sapiens
tgtggggtttcctgcagctaggaccccagagggcaatggcaggtgtgcagcattccacagttatttcactctcctcttccttgggaactgttcagggccagaaatgagtcytggcacttggcaacactatgcatggttcacagcttcctctctcatcagccttggcatctgtgttgtctctcctttcactttaaatgcattttctcagaagatctgtttggactatgtcagtctactcaatattctactctctcagtaggagaagcccttcctggctacttcaaatctgccatcttggatctatatatcccttggacttttaatgcttaagacattagagatatttttcaaaagacataagagtcacatgtagctaatctcaggcatcttcctgctattctatatcatatttctttcttaggtactaaaccacccaaatgagttttttttttttcttttagagattgtgttggtttctaaagttgcataatacattaccacaaaattggtggcttaaaacatcagaaacctgatgttttactatttctgatcctaaatatgtcccttttctgtccctttcagtactgtttgacagtttttctgctgttataacattgccaaaaaccttgtttgtcttctttcaatataaaggcaagacatgacattaaacattagcgttctgtacaaatccttcctggataactttgtttctatttctagatcctactgagatggttgttagatccataagacacacatctacttatatgcctaaactatcttagtatacaattgtgcaactacacccttgacccaatttccagagcattttatttggatggactgagaactttcaaaataatcagtgctcattcatttttacttaatagtttatatcctaatttatctctttcc

SEQ ID NO: 713855 - DNA, 623 bp, Homo sapiens
ctctggggaccataattctagcaacaatttgcctacaagtttttgcctttctgccctaactcaaattgaataacattcattttaaagcaaaattgtcctagaaacaatcctcattaacagtgaaaataatacaagaaactaatgagaatatgagcctgatatgtaagcagaaaatctgctatccgggaagatgacaaaatatatcagcctcttaagacatcaatataataacttgctttgtgaaagtataatgcacaaggaaccttctacaatcgaaatatatatatatatatatatacacacacacacagcaggagactgttgtggcagaaatgaacaatcgtgtctccttttttcaggggaaccgaagggttttcaaggctaactaawgacaagagaaatggaaagccttcttttttggttatctcctccacaggcatatcccagccagactgggctcctccccttcagcctccaggaaaaggagccattctagacaaaggaagggctcaaggttccaagggatgacccagatgccaaaggactcagcctgtctgtggaacactggcttattctaccagatgacctgctgaggctgccatatggcctgcatgtgacattct

SEQ ID NO: 713856 - DNA, 1854 bp, Homo sapiens
tcaaataagaaaactccaaggccacttgctcttcgctctggcctccactgccttggttttataatgtagcaaacccttcttccacaagacgcctgagccctgggtgaagctgttttcaaggaacagggtcacacatggctgcccggcctggcaggcctgcaggcttgctggctaaggccaactataaacaaacctggattagcattttaaaacaggtttcaccaaaaggataactatttgtcatagaagaaaatactactgattggagcacactcagactgcctttagacattctcccatgcctgtgtcctactttcctggggcagtattacaatatttaccataaagctgagcatgagcgtggggtctgtgaagttctgagtttactggcatactgtctttcttccactgcaagagattaagaaactggagctgaaaatgaaaatgttcactcacattttctacaccagcacaccagaggagacagcaatagcttcttcctttttctttttcttaaataaatagcacaaagaattgcagccagccagctcagcttgggccaactttaaaagcccaccaccagatccccaccaagataagcagcccccacacggaggtgatccaccatcatctctgagagataactaggaaaaaaaggagagatgcttttacaaaaatatcatgatttggctcctggagaaaaggaagggcaaaatgcaagtggtgttccttcttctcaccttggtggcttccccaagtagaagaattaataggcttagggcttattaaggtgaaatcaaaaggagagaaagacagagaaactgtaataacaatggtgctagagactctgagggtttccagcaggctcatttgtttcaaggaagaacatttagggagaggtggatccccctctgtcttcattcagcttcaaatggaagaagaaaagcaggaagtatatagctaatatagaaggtatgatccaaaatgttgaaaacaattccaccttttcttgcataaacatttattgaatgtgtattacgtggccaacactgtgattgatatgggtgatattaatgagattcaatcattgagcttatctttgtgaaagaagcccttccacttgctgaactgctgagacagcctctgacgattcgaatgaatcagatgctagccacagttcaaatgtcctgttgtggaccatttctgagcctctgtaatggagttgcggcagtgatttcagaatcaagctaacctactctaattttggaagcatttatcttagcctttccacccccctccccactttctacatctgaattgtttgyaccacactgatatcacttatgtgaaatgctaaccaaatttctttcccacattcgacctcagtttctccatatgtgttgttataaaatcatctggttctgagtcattcagtctcttggcagatgctcagtgcacttgaagctagtacgtgcttgtttgaagtccttatggttcagtcctccctgtctgtcagtcaagtgtatctgcttaatatctctatacgttatctctataaacacgcctgttgaaaaaataatctcctgaaataccaagctgatagtatcttttccagctattgggcattgttttctgtttaatgaataaaaagttttcagaaatgtgcattttaatttacgtccaggacagactgctgtcagaaagatctgctggaatgctttcctttgaaaaagaagctggcaatgtaatacaacaagcagctgtaggcggccacattatctgccttgtctttttcaagcctagccatggggtgtgtgtgtgtgtgtgtgtgtgtgtgtgtgtgtgtgtgtgtgt

SEQ ID NO: 713857 - DNA, 595 bp, Homo sapiens
catttttgtacccagttttctgtgtaaatagtaatggaaagtaaaaagcacaaagccaatgaggagaactattagaacccaaatcatacaacaaaaggctatggggaaaagaaatgattcataaaatgaaagagaagcatttaaacccttcctcagtaataagctcagagagattagaaaatatattcacgaaacaagatttgaatgccataaaaagacactgagagaacaagaaaaaagaaaaagcctctgctgattaacatacaattgccaaaagcaaccaaaaaatcaataaaagaattaaagtctgtggtatttctcagaaaatagaagaaaaagacagaaatgggaaaaaaatgcragaaaagataagagacatagggaaaggaaacatccagggagtgcatattggattaataagcttcttagaaagaaagaattaagaaaacaaaaggaagtaaaaaatcaataaaaaaaggaattttctcagagctgcaatactggcaccatccaatggaaaggacttacaaagtgctgattccaaataatagaaataaaccttttctagacacagccttgtgaattcagaacacca

SEQ ID NO: 713858 - DNA, 1031 bp, Homo sapiens
gttctttgtcccctgtacacctcttatttactttaactataatattttctaattatttttctctgggaagttttcattagaatttgcctttcatttcccctattatatcaaatctgcattttaaagatttttatgctaatttattatttatcacatggattaagaatggaaaagatttaactcttgagtaagtgatggggaagaaatagaaaagaaagaagaaagtagagagaaagaaggtgagataaaagctaccagcccgaatatcacgaaaaatcaggtagtgtctacagtggctgagcactggtcatgtgtaaaaagcaagagtatgattctgagctgtgatatttggtgtaaatatagtttctattttatggaagaaaagtttttaaactacttctgtaaggacatttacctagcgtacctaaaagctaaatggatatcatgtttgatattttaaattttttttcttggtaaatacactagaatatgtccatgccatttaaaaaaataatgaaatctgagttgtaagaaaggaagtaagtgttgatggggatataagttgggaaactgtcaaaagccagctgatttaaaagaatgagagaccatatagtatatttcatcatcttcaagcagacttacaagtaaatccccaaagatataaaattcgattaccatgttagaggtgccagaggtagataatatgatccttattataaataagtttacactaacacataaaataaaaaagactgaacaaagcaataaatatagaaaaagtcatgccaatttaaccttctgggagcagttacaggagagactgctgaaatagaaaacagtagtagttacattttaatgattaaagaaatatgttttattttaaaagtcatttgttatattaatgtacagatatctttaaatttctttagaaatttcccagctcaagagaaaaatcttaaaggaatttaatataccrtaatttactttacaatgtcatcattcttttaagatcttttcatatataattgtgt

SEQ ID NO: 713859 - DNA, 831 bp, Homo sapiens
ttaaattgacctcactttttrtaacacaagtttgtattctatgtattgccatctccagaatttactagctgttcaatcttgggcaaatcactaaagctctctctactttgaattcctcatgtataacataggcataataacaaatgaacttcacaaggttggtaggcaaattcaatgaattaaacttttgaagctggtggaagaatgtttggccagtgcttgaaggtttctgcaatacctgttagttcttagaagggttgatattttacaaggaccaccttctggggatggaatgttttccaaaccccttctttttgacaagccatgttttgtctgtccttgctcaaattttgcataagaattgctttttccataaccaaatcttataaattgcttcatttctttaacaacggaaattggttacaatttacaaaattgagcagggatgtggaatttattttttaatctattttttaatggatagaatattgaaagattgcttttagacaaaagtatgcttttatgtaatttaaacaaactatacctaagtattgtagtgatgtagagtaggaaaagttttaaaattttaggagtttaaatcaatcatcatgacttatcactgtagtagcaggtaaaaacaaaagcttggagatattttctaaatttttccttacatttttatctccttaagctaagcttataaatttgattttttaaaatattttcttttgcttgtttcagaagttaataatggggtaggggatgcagtagaaaaagacaaggtctttctgttctcctcagtagtagtgggaatatacaatactctccata

SEQ ID NO: 713860 - DNA, 831 bp, Homo sapiens
ttaaattgacctcactttttataacacaagtttgtattctatgtattgccatctccagaatttactagctgttcaatcttgggcaaatcactaaagctctctctactttgaattcctcatgtataacataggcataataacaaatgaacttcacaaggttggtaggcaaattcaatgaattaaacttttgaagctggtggaagaatgtttggccagtgcttgaaggtttctgcaatacctgttagttcttagaagggttgatattttacaaggaccaccttctggggatggaatgttttccaaaccccttctttttgacaagccatgttttgtctgtcctygctcaaattttgcataagaattgctttttccataaccaaatcttataaattgcttcatttctttaacaacggaaattggttacaatttacaaaattgagcagggatgtggaatttattttttaatctattttttaatggatagaatattgaaagattgcttttagacaaaagtatgcttttatgtaatttaaacaaactatacctaagtattgtagtgatgtagagtaggaaaagttttaaaattttaggagtttaaatcaatcatcatgacttatcactgtagtagcaggtaaaaacaaaagcttggagatattttctaaatttttccttacatttttatctccttaagctaagcttataaatttgattttttaaaatattttcttttgcttgtttcagaagttaataatggggtaggggatgcagtagaaaaagacaaggtctttctgttctcctcagtagtagtgggaatatacaatactctccata

SEQ ID NO: 713861 - DNA, 831 bp, Homo sapiens
ttaaattgacctcactttttataacacaagtttgtattctatgtattgccatctccagaatttactagctgttcaatcttgggcaaatcactaaagctctctctactttgaattcctcatgtataacataggcataataacaaatgaacttcacaaggttggtaggcaaattcaatgaattaaacttttgaagctggtggaagaatgtttggccagtgcttgaaggtttctgcaatacctgttagttcttagaagggttgatattttacaaggaccaccttctggggatggaatgttttccaaaccccttctttttgacaagccatgttttgtctgtccttgctcaaattttgcataagaattgctttttccataaccaaatcttataaattgcttcatttctttaacaacggaaattggttacaatttacaaaattgagcagggatgtggaatttattttttaatctattttttaatggatagaatattgaaagattgcttttagacaaaagtatgcttttatgtaatttaaacaaactatacctaagtattgtagtgatgtagagtaggaaaagttttaaaattttaggagtttaaatcaatcatcatgacttatcactgtagtagcaggtaaaaacaaaagcttggagatattttctaaatttttccttacatttttrtctccttaagctaagcttataaatttgattttttaaaatattttcttttgcttgtttcagaagttaataatggggtaggggatgcagtagaaaaagacaaggtctttctgttctcctcagtagtagtgggaatatacaatactctccata

SEQ ID NO: 713862 - DNA, 831 bp, Homo sapiens
ttaaattgacctcactttttataacacaagtttgtattctatgtattgccatctccagaatttactagctgttcaatcttgggcaaatcactaaagctctctctactttgaattcctcatgtataacataggcataataacaaatgaacttcacaaggttggtaggcaaattcaatgaattaaacttttgaagctggtggaagaatgtttggccagtgcttgaaggtttctgcaatacctgttagttcttagaagggttgatattttacaaggaccaccttctggggatggaatgttttccaaaccccttctttttgacaagccatgttttgtctgtccttgctcaaattttgcataagaattgctttttccataaccaaatcttataaattgcttcatttctttaacaacggaaattggttacaatttacaaaattgagcagggatgtggaatttattttttaatctattttttaatggatagaatattgaaagattgcttttagacaaaagtatgcttttatgtaatttaaacaaactatacctaagtattgtagtgatgtagagtaggaaaagttttaaaattttaggagtttaaatcaatcatcatgacttatcactgtagtagcaggtaaaaacaaaagcttggagatattttctaaatttttccttacatttttatctccttaagctaagcttataaatttgattttttwaaatattttcttttgcttgtttcagaagttaataatggggtaggggatgcagtagaaaaagacaaggtctttctgttctcctcagtagtagtgggaatatacaatactctccata

SEQ ID NO: 713863 - DNA, 831 bp, Homo sapiens
ttaaattgacctcactttttataacacaagtttgtattctatgtattgccatctccagaatttactagctgttcaatcttgggcaaatcactaaagctctctctactttgaattcctcatgtataacataggcataataacaaatgaacttcacaaggttggtaggcaaattcaatgaattaaacttttgaagctggtggaagaatgtttggccagtgcttgaaggtttctgcaatacctgttagttcttagaagggttgatattttacaaggaccaccttctggggatggaatgttttccaaaccccttctttttgacaagccatgttttgtctgtccttgctcaaattttgcataagaattgctttttccataaccaaatcttataaattgcttcatttctttaacaacggaaattggttacaatttacaaaattgagcagggatgtggaatttattttttaatctattttttaatggatagaatattgaaagattgcttttagacaaaagtatgcttttatgtaatttaaacaaactatacctaagtattgtagtgatgtagagtaggaaaagttttaaaattttaggagtttaaatcaatcatcatgacttatcactgtagtagcaggtaaaaacaaaagcttggagatattttctaaatttttccttacatttttatctccttaagctaagcttataaatttgattttttaaaatattttcttttgcttgtttcagaagttaataatggggtaggggatgcagtagaaaaagrcaaggtctttctgttctcctcagtagtagtgggaatatacaatactctccata

SEQ ID NO: 713864 - DNA, 631 bp, Homo sapiens
ttgtctggttttgatattagagtaatgctggcctcagaaaatgagttagtaagtattccttcctcttcaatttccaaggagggttttttaattttaagaattagtatataaccttgttcaaatgtgtttctttaaaaaaatgctttatttaatatatgttgtttatttattaacattgaagtcatggtcaatagtkgtataactcacgcctgaatgaagcttatctcaaatacttatcgtcatcgtaaggcacagccttcttgtgcttagggatactagacagtgtttcagcactatgcatggacgtgcactttaaatagcaaaatcgccaacataaagtataaaatgcaaaaatgtgcattaaagagaccataaaggtgatgtttgcttacactatgacaactaaacatatatatatatttgcattatatatatatgtattcttatctatgcatttcatttcactctcttctctgttttagaaaaaaattggggagtaatagggatagaaagaaaatttttagttgacctatggaaattgttagtttataggaagattaagaacatagttagagtacctacttcaaaattatcaaaggaatatggaaaaccagtttctgtggctacaaaa

SEQ ID NO: 713865 - DNA, 1253 bp, Homo sapiens
atgtggtaaatgcaatgattgagagatttacatagtaatgagtgggagtaactagccaagtcagaatgtttgtaaaagatagggagagggatattagtcagggatataactgagatgtttcttgggagaaattggaatgacaaagatagcatttcctctaaaagtaaagtcctgagcaaaatcatggaggcragacagactaaggggtgaatatggagctataagcagtttgcattctgtaacctggtaaaccaggcagagactgccaggctgaaaaaagcaatgaggcaatgaggtatactttgtgttccattttaaagaaaaaatgttttcctaataagatattaaagaatcgaaatgtttacaagcattggagctacactgttaagatctgtgtgctcattgttccactgcccttccagatccattcttcacccatctcaactctgtgctctgccctggaagagtgacctgtacagactacatcgcgggttctcatgccttctgatttccagttgggtttgggcaatgggaatcctagttggaagatcagaatgaggtcgggagtgaggtcagagtatttatctggcttccacccagcttaagagggcatcaaacacaccagctcaagagggcatcttgagttggtgcatttcttgattattcaaatatctttgcttctttcaaagcagtcagccgtacccatttaattttcccatattccagtaatcaatttcctcacctcatcccataaagccaagaggtcataataccttggtcggactatcacactgtctgttgcggttgccctacatgcaaacctctggaaattgtctctgtatgaaaaaagcttccatgaattgtcctactttaaaatgctcattgtttcctgttggaacctgaactgatatatgttgcatatagataaaccaaactagaggctgtaatgagagtgctttaaaaaaaaagagagaagagatggcccagcaaagacatccatattactggatcaatgatactggaggctgagaagtgaaaaaatgaataagtgcttgaaggtaaaatcagttgaatgtattaattggctgggaagagaggcaaaggagaggggaaagtcaagaattatttccagttttctaattttcaagtttttaattccagtaactagatggattatagtgctaatagagactaaagatggaaggagaaatttatggggaaagataataagtttatttccataaaattttgac

SEQ ID NO: 713866 - DNA, 2076 bp, Homo sapiens
  misc_feature 1974, 1975, 1976, 1977, 1978, 1979, 1980, 1981, 1982, 1983,1984, 1985, 1986, 1987, 1988, 1989, 1990, 1991, 1992, 1993,1994, 1995, 1996, 1997, 1998, 1999, 2000, 2001, 2002, 2003,2004, 2005, 2006, 2007, 2008, 2009, 2010, 2011, 2012: n = A,T,C or G
  misc_feature 2013, 2014, 2015, 2016, 2017, 2018, 2019, 2020, 2021, 2022,2023, 2024, 2025, 2026, 2027, 2028, 2029, 2030, 2031, 2032,2033, 2034, 2035, 2036, 2037, 2038, 2039, 2040, 2041, 2042,2043, 2044, 2045, 2046, 2047, 2048, 2049, 2050, 2051: n = A,T,C or G
  misc_feature 2052, 2053, 2054, 2055, 2056, 2057, 2058, 2059, 2060, 2061,2062, 2063, 2064, 2065, 2066, 2067, 2068, 2069, 2070, 2071,2072, 2073: n = A,T,C or G
ctatggttaattgataaattccttgaattttaaattcaggaggtgagggctgttcatccaactactcattttatagacaaggagatggaccttgtatttgatggatgactcaaatttctcacagtaacaaaagccaacatcatacagcaatctctgggacctagttcttctgaattttaatctagttatcagaccgagaattgatgatctgggcagaccacaagaacaggaataataatcaacctctcaaaccatgctggaacactgaagaacaaccaaaagtaggacctggggaactgcttatggaagactcagatcccaaattcaaggactagacattcttcctgttgaaatagtaaaaacaaacccatgtgggcctatccagactaaaaaccccacaggtagatacctggaaatagagacccaatcaaaaattgccaaatgtattcaaaaaccaatcataaagcatcactggcttcctaaattcacactctagaagaaagtcccacattaagagaagactcaccagtcagattctggctcaaatgccataaactctggctgttttcactgagatttagtagatcttcttgtatgaatattttttcacttaacatatgctcttttctggagactagattaccatagatgattgatgattgttttgtataattttctaagttaaattaygtttgttgtggtaacagtttaccacattagttttttagtggttatcttaataattatatatattagagttaacaaatgcagtttttcctgtcaactttctcttaattgctctagtttttgtttgttttgcttttagttttagttgttctagtggctttctttttaattctaagtattatacactcttaaagtagagaggtattaacaagatatttggggaaattgtgcattcacctactcctacataatgattctttggaaatcagatttagaaactatatagaatgtttctaaacatagccctatagaatattgcagagttttatttcgcctatttttttctggacgagctatctcctttggtcattgctgatatatttttacatgttacagcttatttttaaattttaatttatctgaatgagacattaaaatatgacattaagtcatcatatacttcttcatacatttctaattttacttctgtgttgccaaagccttctggtttgtctctggttttgcatgcacgtggatttcattctccttcacttttcccctacctgaattttaaattttcaaattttttagtgctctgttccttctgcaccttttttctctaggttatatttcatttctgtggttttaaacaatctctaaagatcttcccccacctcaaaggtggtctcttgagccaagattgccaaatgaaaacatgcaactgtcttcttgacacgtacttttgcttaactagaactcatgctttcccacaggtatgctggccctactcttgacatacattcacacatttttttctttggactattatcatatcaaagaataacaaccaaacacaaaatttcacatcccttcttgaaatttttttcatcaagttttaatgtcataaataaaataattttcaaataaaacaattttggagtcattatctttaaaaatgtaggggaaaattaccactgaaatgaccaaatcattttcatccctgctacagtttaatcaaccaacttcaaagaaaattgtcagcttaacatcattttctcagttcatttgttcagtatggcatttgagaaatttataacacatcttttgaccctgtcattccataagggtacattttcaagcttggctgccttttctcaacctgaaatacatttgtccatagctttagcctatggcctcaataaattctcatcaattgtataagcctcaaataccaatcttgaaaaaaacttaaagaatgattttggggcttattgaacactacttgtnnnnnnnnnnnnnnnnnnnnnnnnnnnnnnnnnnnnnnnnnnnnnnnnnnnnnnnnnnnnnnnnnnnnnnnnnnnnnnnnnnnnnnnnnnnnnnnnnnnnctt

SEQ ID NO: 713867 - DNA, 626 bp, Homo sapiens
acatgtaaataattaaaataattgctacttaacttggtggcttaaaaatacatgcatattatagacatagatctcatatccataggtcactttggcagttctgctaatgtaaattaggcttaactgatgttggctgtgtttgtttataggtcaactccttggtgttctggggactgagtrttttaagttgccttcttttgcatatctgacaattgtttggctctcatttgagatcacagatataattgaaccatgttttttttctttgtttaatatactaaaccagctttgttcacatgatgatctttgtgttcccaaagagaaagtggaagtatgcaaggtcccttgaggcctagactgaaaactggcaaagtagtacttctgtctcatcctgttagagaaaacccagactaaaaggaatgggaaatagactacatcatttgatggcaggaaccacagcctcacactacacatgcatagcttaaggttgaaaaataaattgagaggaattttacaatcaatctaccacaccatctaaacagagaagaaaaaaatgtctaatctcagcaaacaccgattttaattgtcagagagaagtggaggaactctccaaggaaattgaaaaa

SEQ ID NO: 713868 - DNA, 637 bp, Homo sapiens
actcacacaaatggtaattattgggaggtgataggggtgttacctaattttactgtggtaatcatttcatatacgtgtgtcaactcttcctattgtacaccttaaatctatacaattttgtataataattttgtataattgaggattatacctcaataaacctggaaaaaaagaaaagtgaatggtcttctggaaactcacatatagtgcaagcctgtagcaatgtcttacagggctaggataatataactcagcatatgtatgtgctccaaatcaacaaccaatatagggcgctctttatcccataaatcatgttcacagctccattagtcaagggggtgaaatkgggagcagattttttcaccattacccctatacaattggacaaaatttaaaaaaaatttcacatcctagtttcagtgcaagaaaggcttcataaggggacatagcaatggtttcattaaattggaagtagaaattgccatactgcttctttggactcttcactctagtaaatgaagaagcagagaagtgagttactctattgaaatagggtaataagtttttctgcagactgaatgattgtatcccccccagaatttatattttaaagttctaactcccagtgccatggtat

SEQ ID NO: 713869 - DNA, 1879 bp, Homo sapiens
cttgaaagttatgttagcattcctcttactatgttgttgagttttaaattgtccttatcattctgttacttataactttagaaaatttaggactatgaagttaggtacagacatgttaattattttatatgtttgtgcatttttattagaatgtaatatctctatcttagaccttttatataatatcatgttgatgtgacagctatatatgcctattgtactatttttctcatctcttcattttcaacctttttaaatcctgtttcagaaaaggatctaatatgttatagataagtggatttttatggccaatatgaacatttygaccttttaatatcaataaagttaacttatttacagttatgtaactactgatctattttaactgatctgctgtcttattttaccttttctccttgctctatttttttcattgtttctaattcccttcttctttgaagtaaccaactctcatttattctcttttcccttatattaataagtatttcagctcattggaaaatatgaattctagttacaatctttagtagctacctacaaattcattctaacttacatgattagtggtgtttttcctacaaaggtaataagttatttagtgtttctcttctcatgcatgagacaggaccattttgcattgtttttattctttctttccatattgaactcctctgttgtaatattgtagaacagaatttcccaaaatccatatggttatgcttgtacaattagccaatctctcttcaacccccacctccccacacacacccttttcagcctctgataaccatcatcctactctctatttccatgagatcaactttttaaactcctacatatgaaggagaatatgtaatatttgtgtttatgcctggcttatttcgcttaacataatgaccttcagttctatccatattgctgcaaatatcagtatttcattcccttttcaatggatgaagagtacttcattgtgtacatataccccattttgtttattcattcattcattgatggacatttaagttgattccatatcttgctattgtgaatggtggtggaataaatatggagatgtaggtatctctttgatataccttgttttttaatacaacatagttacgttgaatatttattagatttgccattaggatattgaacatccttggctaccattgctccttgcatataacttctttgatctgacttaactttttcctcttaattaaatttatgctaggattttttaattaaaaggggatagaactcagcctaaatgtccttaaataaaataggttattttataaaacatttggaatagaatggctttcatgcaggttgatagccatgattaatttttcaactttgcttttacagcatcaaaactcatctcatgtttggaaaaaaaattggggctgtctgctagctaaaacactctccagcagtcttatcagatcagcaatgtatttaatcatttaacaaatatttgataacctactaattgtacaacagaattgcaggcactgtgtgtcggtttaggttttccaagaagcagatgacaagaaacacaggagacctactggagaaatatctgcgtgggataaaatggtgaggaaactagagtagctggggaaagcttaagatcacattgcaggtttgacacacgtgagtgcagaaagacagcaaaggtggattgagtaggaagacctcagtattcagtgcagcataagaaacttttatcttttctcctttgtgaaagatcagtggaatatatttctgtatgcctttttctttattctctattctgttccactcatctgttgatctgctcttttacaaataccaggttgtcttgatttct

SEQ ID NO: 713870 - DNA, 2291 bp, Homo sapiens
tctgaaacatttctatgccattcgagtcttaactattattctagactcacctcatcaaccacaaatgaagccttagctatctcaactgtacttatttctaacgttcccaactttgaacacatacagttgtttcttagtgcccagggggagctggttccaggaccyccatggataccaaaatcagaccattatcaagtcccttatgtaaaatgatgcagtacttgcatgtaacctactcatatcctgccatgtactttaaatcatctctagattccttataatacccaatgaaatgtaaatgctatgtaagtacttattatattgtattgtttagggagccatgacaagaaaaaaatgcgtgtacgtattcagtacagacacaaccatccatttcttttttctctcaaatattttccatccatatttggttgactccatgaatgcaaaccccagagaaatggagggccaattgcatatcatttctttgtcatagaaagtaactgcttaaagtcacagtttgaagttactttctatgatatgcatttctgtatttgatcataacctatcatatgttctgatcagcttacacactaccaacttttgaaaacattctctcttctatctccctcagggatcagtgcctctcctatgtactatccgagtattatattgccactatttatttttctgatagcactttgtatactgcattttactgcaagttccctaaaggaatgcacgttgtatttctcttcagtgtatccccagcatctaacagagtatctagaacagattgctgctccataaatgtttgttgaatgaatgacaactcattttctaaactctagcagcttttaagacaagcaaggacaaaagtgtgtcaaataaataataaatctggactttgaataaagaatttttcatgaagagagacattattcaaaatgattatttacataaggggagggccactatgacagtaaggtgaggggtgttttgcgaaaggaagaaaaagtagggaaagggcttttatgctctgaccataaggaccataaggtctgtgagtgccccaaaggtcaggcagaaaaacacttttcttttctgaaaaggaataaaccaggcaagaaacaatcagggttacgaagtgagatgggcaatgttatgatctgacagttaacattttttcctgaggttagcagatttgggaggagttgttaagaagggcttgttctgagttttgttgcttgctttttccaatgcctggtcaaagtccaagggcctaagggaagaagaaaaactcacgaaagtttggccaagccaagttagtagataattattttgtacgaattggtcactaggtacaaacaattcagtggatcatttataaggcaaagagtgggagtttggagagtgtgtgtctgatttcactatatttaagaaagggcggcatccatgtgtcttatctaagtcataaggggaagggtagttatttgcagtaagcatttcctagaacaggggtcctcaatgcccaggccacagacaggaatccttccatggcctcttaggaaccagggctcagagcaggaggtgagcagcggatgagcaagcgaagcttcatgtgtatttatagccagtctccatagcttgcattaccacctgagctccggtggcattagatttgcataggagtgcaaaccctatcgtgaactgcacatgcaagggatctaggttgtgcactccttatgaaactctaatgcctgatgatctgtcactgtctcccgtcacccccagatgggactacctagcttcaggaaaacaagctcagggtacccactggttctacatcatggtgagttgtataagtcttacattctatattacaatgtaataacaatagaaataaactccacaataaaagtaatgcacttgaatcatcctgaaaccatcacccccacccccaaccccactgccctggtttatggaaagattgtcttccatgaaactagtccctggtgccaagaaggttggggactgctagaacacaacaaagtggggtaatttcttaactgttgctgcattccagaacattcaggcaaagtttaacattgtcaatgtaaagtgaatatttggccccaagtcttgccatttggcaggcactgtgaccatttctgaaaacaacacttctctgactggtcagaaatctaaaggatagcctcaatttggttaatcttataatggggagacaactgttcaagtagaagggaaagcaagtgtgaaaatcttgagaaaag

SEQ ID NO: 713871 - DNA, 638 bp, Homo sapiens
gctgtacttttgtgctggagtacatttattaaggtgaggatttagtaggtgtctctgatctctagttaataaagatatgagtgggatatcgtaattcctttcttaacacartgaatgacaacagtgcagttctcacaaaataccactattgggctgcaactagaacaatgtgtgtgtgtgtgtgtgtgtgtgtgtgtgtgtgtactttgtatttataaatgcatattatttgtatttctaataattatttatttaagtactgtcttatttttattagattctcatttttattagacataaaattgtatatatttaagatgtgcaacatgattatttgctatacatacatattgtgaaataattacagtaatcaagttaacacatctaccaacccatgtaatttttgtgtgtgtgtgcgcatgtgtgtgtgtggctggaatacttaagatttacacatattgtgaactatgttcactatggtatacactaaattatcagacttgttcatcttacaatcaaaagtttgtatccttcatcagcatttccccatttctccgatcccccaggccctggaaaccaccattgtactctctgcttctatgagtttaactattgtagatttcacatataagtgagat

SEQ ID NO: 713872 - DNA, 638 bp, Homo sapiens
gctgtacttttgtgctggagtacatttattaaggtgaggatttagtaggtgtctctgatctctagttaataaagatatgagtgggatatcgtaattcctttcttaacacaatgaatgacaacagtgcagttctcacaaaataccactattgggctgcaactagaacaatgtgtgtgtgtgtgtgtgtgtgtgtgtgtgtgtgtactttgtatttataaatgcatattatttgtatttctaataattatttatttaagtactgtcttatttttattagattctcatttttattagacataaaattgtatatatttaagatgtgcaacatgattatttgctatacatacatattgtgaaataattacagtaatcaagttaacacatctaccaacccatgtaatttttgtgtgtgtgtgcgcatgtgtgtgtgtggctggaatacttaagatttacwcatattgtgaactatgttcactatggtatacactaaattatcagacttgttcatcttacaatcaaaagtttgtatccttcatcagcatttccccatttctccgatcccccaggccctggaaaccaccattgtactctctgcttctatgagtttaactattgtagatttcacatataagtgagat

SEQ ID NO: 713873 - DNA, 936 bp, Homo sapiens
gttatcatatataaaacaccaagaaggccgggtgcagtggctcacgcctgtaatcccagcactttggaaggccgaggaaggtggatcatgaggtcaagagatcaagaccctggccaacatggtgaaaccctgtctctactaaaaatacaaaaattagctgggcgtggtggcacgcgcctgtagtccsggctacttgggaagctgaggcaggagaatctcttgaaccagggaagcagaggttgtagtgagctgagatcgtgccactgcactccagcctggtgacagagtgagactctgtctcagtaaataaataaataaatatataaaacacaaaggagacagcatatgaaaccttattacaaatagctgtatcagttaagaaatacatttttgccttaggtgacaaatacatgatagatcagttggggaaaatggctgtgcttcactcctcacaagctgggtcctggtactttaatcatctctccttacacctgtactttgaaccactccctctccctaggctccttcccaccagtagttaaatctatttgagtttttaccaccttgaaagtaatttctcctccagatttctgcatctttctccaggtactaccttttttttttttcctctttcctcatctcctataaactttaattggtattggtgttattttggaaatatctcaaaaatatagaataatatagaatatccacccagaattaacaattgctaacatttttaaaaatgtagtcacacttgcttcatctattttatgaaataaactaaacattctagataaagatgaagtactctttaaacccacccctagccattatcctttcctctccccagaggcaaccaaatttgatatggtgtgcatcatttctattccttctttatacatacattttcaaacacatctgtatctatgagca

SEQ ID NO: 713874 - DNA, 1029 bp, Homo sapiens
ttagcctttatgacacaataagagaaatattatctgtgaataaatattgaagatatttggcacttcttcattattgtttaggcatgataatggcatacattatatttttaagtagtgtttttaagttgtctttttctctgacagatatattcagcagtatatatgggttaactgataggatgtctggaatttccatgaagctaagctggaggggtgggggaagttagtgggtatagatgaataagattgaccaagagtttatgactgttgaagtggagcgtgatctatatgtaggttctttatcacataatagcttgtcatgtgtctgcttgacagtgtttaaaacagaatgtttttttaaaatgtccaaagccatcacaatatagactgctgaaatcagagtttctggatatggagccagagcattagtatttctaaaactaccttcaaatgagtttaaattaaagtttaaagccaatgatcaacckggcctcattcttttaatttctgtgataagaaggttgaaagtacacgtgtcctgattcagctgctcagagacccacaaaacatcaaggcttccatactgcttcaccattttcaacaagttgactctattgatttcatgcttgtcatagcatggctccaggcatctctgttacattccaagtatcaccattctcttctttcacatctgtcctttttaagaaacagtctttttctacagaagcctcccagacactccctgtacacctcactgggcagaactgggtcccatatccactactagctgcaagggaggttgaaaaccatcattggacaaaggggattgtgatatccatgattagaagaatcttaagggggccccccatgattggacagattgcttccttgaacaaaatcagtgtttttaccacctgatattggtgggaaaggctattgggtcagcaatcaacaaagccagtgagagaggagtagaactcctagaatcaaaaacacagtcaggagcaaggattgaatatggactgaagg

SEQ ID NO: 713875 - DNA, 1345 bp, Homo sapiens
  misc_feature 688, 719, 720, 721, 722, 723, 724, 725, 726, 727, 728, 729,730, 731, 732, 733, 734, 735, 736, 737, 738, 739, 740, 741,742, 743, 744, 745, 746, 747, 748, 749, 750, 751, 752, 753,754, 755, 756, 757, 758, 759, 760, 761, 762, 763, 764: n = A,T,C or G
  misc_feature 765, 766, 767, 768, 769, 770, 771, 772, 773, 774, 775, 776,777, 778, 779, 780, 781, 782, 783, 784, 785, 786, 787, 788,789, 790, 791, 792, 793, 794, 795, 796, 797, 798, 799, 800,801, 802, 803, 804, 805, 806, 807, 808, 809, 810, 811: n = A,T,C or G
  misc_feature 812, 813, 814, 815, 816, 817, 818: n = A,T,C or G
cccttgagctatatgaacagattataaaaatatatcccatgtcacaatatttaaatacagttacgtactgcttaacaatgaggatacaatctaagaaatgcattgataggcaacttcatcattgaacatcatatagagtggacctacacaaacctaggtggtagagcctactacatacctatatagtatagtgtattgctcctaggctacaaacctgcacagcaagttactgtattggaatactgtaggtcattgtaacacactggtaattgtgtgtctaaacataactatatatagaaaaggagtaaaaatatcatatgaaagataatggtgcacctttatagggcacttaccatgaatagggcttgcaggactagaagttgcactggtgagccagtgagtgagtggtgaatgaatgtgatggcctaggatgttactgtacactactgtagaacttataaacactccacacttaggctacactaaatttataaaaactattttttcttcaataataaattaaccttagcttactgtagttctttacctttataaatgttgacatttttaaacttttgactcttgtaataacatttagcttaaaacacaaatacattgtatagctgtgcaaaaaattctttctccatatccttattctataagcttttttcctattttaaaaacattntattttttacttctgaaatgtctttgttaannnnnnnnnnnnnnnnnnnnnnnnnnnnnnnnnnnnnnnnnnnnnnnnnnnnnnnnnnnnnnnnnnnnnnnnnnnnnnnnnnnnnnnnnnnnnnnnnnnngaattctgtcacttatcaaaatcacttctgtgtccaaaatcccattcttcagtactaaaaaatgtataattttaaaaattaaaacaatataatttcctgtgcagtattttagtccatgcaaactttaattactccctgttaatattttttaaaatattctattactccttgatccctaacttttatacaggaaggcaaatgaatttattaagataagggaaaaaatcttgtactttttgtgagttatgcaagaatcttatgtctagagagcaagaaatatatctgtatgaatttttttcattccaactatggaatctttcttgcaactttttagtaaattataattccattactttttattccccaaggatgaaaaaaatgagcttcattttttggcaaarcaaataaacatcctgagttgataaaaatatcaattacaaaagtgtctaccctaaaagtcacattcattttgtttgttattgcaagttattaaaaggcttccaggcatgcatataaaacctgaaaaa

SEQ ID NO: 713876 - DNA, 2016 bp, Homo sapiens
ttgccttagggtgatattgcaaaaggctttgacttcctttttacatggcagctcgatagctattgcagctttatagtccctgtttgactctttaatgtagcttttaaaatttccctacctctcagaccactctcctctaaactaccctagtttgtcaactgctgtttcaaagtattcttcaagagggatcagagcagtccactgttgatcaacatccccatcatgttctatgcacttctttttctttaacttttattttaagttcaggggtatatgtgcaggtttgttatataggtaacccatgtcatgagggtttgttgtacagattattttgttacccaggtattaagggtaatactcagtagttatttttcctgatcctctccctcctctcactcttcactctccagtaggtcgcactgtctgttgttctcctttatgtgtccataagttctcattatttagctctcacttataagtgagaacatgcagtatttggttttctattcctgcgttattttggcaaggataatggctttgaggaatccatgttcctgcaaaggacatgatctcatccttctttatagctgaatagtattccatagtgtatatgtaccacattttctttatccagtctacaatcgatgggcatttaggttgattccatgtctttgctattgtgaaaggtgctgcaatgaacatatgtgtgcatgtgtctttatgatagcataatttatattcctttgggtatataccatgtaacgggattgctgggttgaatggtagttctgattccaggtctttgaggaatcatcacactgctttccacaatgcttgaactaatttacactcccaccaacagtgtaaaagtgttcatggttctaacatgcatagagaattatacagatcgaaactccttttcatgtatgctttaccaactatgcttctagtatttttgtgtgtgtctgtkagtgcttgtttgtttgcttagttttttactcagctatggaaatttatattaatccctagaaattttctcaagaggcccaacttgccaatatctttttgaatccagactttgtcactaaaactattcattgtcccacttagtttcatataatctgcagattcgttaagtatttgttctatattttaatctaaatcattgattaagatgttgtactagacggaaccctgtgccactccactagagaccatcttctatgctaacatcaatttactaatcagcattctttgggttcatttattcacctaactgttgttaattcatctaatggtactattgtttagtccatatttctccatcttgtccacaatgatatcatgataggcctggacaaatgctttgctaaagtccagatgcattatgtctcctgcattcagctgctctcgaaattcactaacgctgtcaaaggaaatgaagcaaatctgactcttcttcaaacacaccatgcactttgatgattctgagactttgctcatgttcttttctctgcccagaatctttttccattccacctgtctactcgactatttctgttgctcagatgtcacctcctcagtgaagctttagtgcttgactccagacataattatttcatgcctggttcatttttccaaagctctttatacatagcatcatgtcccagctgtttgtttatgcttattctcctctccctcactaagaatgagccatgtattatttaatagatgtttgatgacttcaattcaactagatcctggtgcctactaacagtctcttcctttcgaaaatactcataaatcactcattcccaagtccaatctagcaagcacaatgtgctccctaagtaccagttcccaagaaaaggaaccagggcttcttggcaaaatggctgatgccaggtctaggcataaagtgtaaaagatgagcctagaacatcttggcgtgccagtcagtgaggaagctatcaaaagcaaggaagctatcaaagataaagaaactatcgaagacga

SEQ ID NO: 713877 - DNA, 1440 bp, Homo sapiens
aggtaaagaatcatccaaggttcataattgtagtaaggcaagataaagaataactatatccctcctctttgactccatgggacttccctctcagtctaggtttcccctggaaagtggacctagacattcaagctaatttgcaacacctttaaatgaatgagggtgcaagatccaagagcacgtgttgagatgctctgggtcctacagcttctcaggatgaagcagggactctactttgggaagrtttggttttctcaccttcaggaatgccgggtttggacttctttatggccaatgtgttgcaggaagtagattttgctctatttctgaacagcggcactgaatgccagggaaagggaagactgcctcctgccatgttgtaaggctatcttgagggccttccaaagcccagatttcctctgaattaagataaagcagtgctgggattgccagtaaataagagaggggctggagtcttggagttaaatatgagggagctgctggtgggacttacagacgccagcatgttcacacacacccacgcctacacacacactcacacacacaaccccaggtggagtgggaaattagtcagcagagtcctgacaaagtgcttcctacacatgctgttctgtcaggcggcacagcttctcaggcttcagaggtaattacatggattttctgtcttgtacttgcaaaaacacagcccagcaccgtgctgccgctgctggcttgtcgctgacaacgcctttggctctggcaggcagcaggctgcaggagaatgtttacatgttctcttttaagaattcaaaccccgagaaggcacaggaggtaccaggggaagaaagaggtgagagtttacatgagggggagaaagtgtagggaagatattcttggataaccacacaaggcattccaggggagatggggataaacaagatacacaaaaatagggaaactgctgcagagaaggctacaatgatacttgcattaatgaatttcgtttcctttctcttcatccatcagcataattacttggccagtaatactcattctgctttcaaccaatccacccatcaatcaacagttgttagatgctagatgcccaaattttaggctgggcaatttgtgtttttgtgggttggaggacaaagcataaagcacagttcctgcatagaggagcttacaaagaaggtgagaagacagtgactcatttcaggaaaacagaaagaaggtagatgatgacttgtgcccagttgggtatagttagagaagtaaagtgacttgttcaaggtcacaaagccagttagtagccaagtcatgacttgtgcccaattaggtatagagtaccattcctgatgtcaagactctacccattatttgggggatattctcctttctagtctttattttaatggagattagaaccaagaaatggaa

SEQ ID NO: 713878 - DNA, 1618 bp, Homo sapiens
aacgcagaattttaaaaatctgcttttcttaaccatcacagaatctcttggaaaaattttgtttttaaagttttttaacaaattcagttattcttgcaattttagtcatacttgttttcattggttatattcacataaatagagattgaatactttccatttaaaaaattacatccatataaaagaaacccagatcaataaaactagcattctctcatccataccttctccctcaccttcctctttctccttcctttcctgcatttctccctccatacctccatatgtaacacaaaatatctgcctaatattaggtgattatttytgaggaatttgctgttttttaaacctttttttattatgtgaattttataatatatatgtgtgtatatttgcatatttgatatatgcaggtgtatgcatatgtgtgtgtattgtcttacctaaatcatatgaagaagggtgactctttgcaggaggctattttctggaacacaaaagggtgggggtatttcttaaccttccctattttccaggatctatcacaagactcaggagaaatataacattgtcagtacatatgtataatatatatacatgtgtgtatgaacatgtgtacatatatacacatatataatattttatatgagtaaaaaactgcacaataagagctattttaaaatagtcaatgtgaggataagtcaaatagaaataatcacaaagttaaaaataccaaagcagacctctgtttctgggcatattttgagcactgcaatacccaatcagtaagctcacaggcaggattaattaggcattaatatggatactgtttagctactcgtagcttctttatggaaggtgtaactaaaagcgctatgacatgaagtgctgattcagggtccagaaatacaggctgtaaccagggctggggggtacagccaccctcactcttttcatgtagtccctcacagaagttgaggacacacagcggttgaccacactgctacatgatgaagaataaattatttattccttctctcaccctttgaagaaatgtttaagaaatgctccttttccttgtgtccagtagagtataaaagtgaatatgatatattctatttcctctggggggtctttcacctcccctatgattttaagcttctggtatattagtgatttaagtaacaatacaagaaaacaacatcaatatgtcacatgataatacactacaagcttaagtgtacagaaaatatgtgtgattaggttgaagcaataaagagaacagagaatgtgagataagctggcacgggttctacatagtcaatctcaatgcatggccagattcagttgagagagctgcagggtaacttcagaatggtgggaagcagattagaagtgctaagagaggagcagtgtaagggaccaggctgccttctcaatgagaagggatctcagatgatggcccactttggttcacaccttttctgaccttagtgtgccatttactgttagtgactcccacgtgcatccatggtaatccatggctagagacaactgaatttcccattaatcccagctagcactttcctttcccctatctcaaagagcccagaataga

SEQ ID NO: 713879 - DNA, 603 bp, Homo sapiens
ccaatggattcctctttctgtacaatagagactctgaaaagtcacagcaagagaagattctaacatcggtctttgtcacaaatagcctttacacttggaatcacacatgctcccatgtccatattcatgtatttatttagtaatccttatcaagcccctatcgggtgccaggcatggttatagstgttggcaatatcaagatgaataggacaaagtcctttttctgaaggcacttgcaatctactgagagaactgatggttcagcttggcatttcccaaagtgggtttcaggaaatgctaatcctgggagatattcagcaaaagtaaacagaatccaggatgttatgatgaaataagtctgggggatttggagattatagactctgcagagtcctgcagtaaagaaagctataattcattttttataatgaaatatttcacaaagttgtttgaccacagagcctctttttgtctttttaccttataccatccagtggaattagtgcttcatggaatacagtttggaaaactctgacctcttgcccataaggcataaaacatggaagaatatctcaccattacagaggaaagggtaggaaggga

SEQ ID NO: 713880 - DNA, 603 bp, Homo sapiens
ccaatggattcctctttctgtacaatagagactctgaaaagtcacagcaagagaagattctaacatcggtctttgtcacaaatagcctttacacttggaatcacacatgctcccatgtccatattcatgtatttatttagtaatccttatcaagcccctatcgggtgccaggcatggttatagctgttggcaatatcaagatgaayaggacaaagtcctttttctgaaggcacttgcaatctactgagagaactgatggttcagcttggcatttcccaaagtgggtttcaggaaatgctaatcctgggagatattcagcaaaagtaaacagaatccaggatgttatgatgaaataagtctgggggatttggagattatagactctgcagagtcctgcagtaaagaaagctataattcattttttataatgaaatatttcacaaagttgtttgaccacagagcctctttttgtctttttaccttataccatccagtggaattagtgcttcatggaatacagtttggaaaactctgacctcttgcccataaggcataaaacatggaagaatatctcaccattacagaggaaagggtaggaaggga

SEQ ID NO: 713881 - DNA, 753 bp, Homo sapiens
tttactttttaaatgtgacatgtagaagttgaagtgcttgtggaagctcaagccaacaggatatatctagcaggtatgctgctattggaacctgaagtccacatgagaatgctgttggcagtttaaatttggatgaacgtagcctttagggagcagagttgaaaccacattggataaaaacacacaaggaagattgagagggaggagagcaacaggaaaccagcattttagagatatttggaagttgagaagccttctacatttactgaagaggacttatcagaaatgaaaaattgggagagttagaggagtgtctcaagggccaggaaaacaaaacaatgttttttacactatgctccccaaagtcccactgggggttactacattttgtaacagcagagaggagtgaataggtgaatagatgtggctccacatctctcaccaaaatcagagtaagggtgcttttattgatcagtttccacttttccatagaattttatttaaataagcggttttgtgataaaattacatttaaattttgagtagaaaattggatgtagagtgaataatgaatgtcacctggtcacttggcagragcatactgtgaatgtagccaagaagctgcagctactaggctgggcacggtggctcacgcctgtaatctcagcactttgggaggccaaggcaagcaaattgcttgaggtcaggagttcgggaccagcctggccaaaatggtgaaaccccatctctaca

SEQ ID NO: 713882 - DNA, 2590 bp, Homo sapiens
tacatatagtaagtatagtggaagtcagttgctagattcattcatcatattaatgataacagagaccagatatttatgattaacttgtaatttccattatgctcacaaggctactcgagcagccctagccattatgtctgtgttcaatggtgggagaatggatgagaaaatggaagatttctgcttcaagacaaccaacattttccccatatcaaaatttggtttgtgtctcattggtgagaaccctgtcttgtggccatgactgcatagaggtattaagaaagaaaggggttgaagtaggggatggctgagtttgataacagtgcctgccaaattataggaatatgaggtgtgggacccaactccacctgaacgagaggtaggggttagagaatacctcatagagttgctgaactgaaacatgaaaaaataaatggaaaatttgcaggtgcgttttagacaaggatgagatcagtactattattatagcagaaaaagtaacaatatttaccaatgcagaaatatctgagaggcaatgctgtgttcatataagcaaatatgacagagtgcagggtggaagcctatgttttcctcctttctaattttgcatatgacatgtttttttcagatttaatgtgagtcatggagactgaattgcccttggtcccagccctagcacatcctgtgttatggctacattctctgtcagatctttttccaacttctgtccaatgttcataatttcccattcctggtatgctctcttttaattactgtattaaggcagaatctttctcaaccccaattgtattattgcctagagcccaaaatgatccattgaaatggtcagttctatgagtaagtaaaataacttgttcatttaagatggtttgaattggtctcttgtcacttgcattctgttgcttgaaaaagattcttggctgggcgtggtggctcatgctcatagtcccagcactttgggagtccaatcygggtagatcacctgaggtcagaagttcaagaccagcctgtccaacatggtgaaaccctctctctgctaaaaatacaaaaaaaaattagcctggcatggtggtggatgcctgtaatccctgagggtgaggcaggagaactgcttgaacccagcaggcagaaattgcagtgagccaagatcacaccattgcactccagcctgggcaacaagagtgaaactctgtctcaaaaaaaacaaaacaaaacaaaaaataaataaaaatagcttcttgatgaagacagatttactaacaaacctatgaaagtaatcttcaatgagacatactttgccaaatattgattatggtagtcagaattctaagatgatccccatgatctccatcatttagtgctacactctgcataatctcctccccttgagtgtgggaagaacctgtgacttgcttctagctacttgaatatagcaaatataataatagaataatatctatcccttagttaggttttattataaagttagtgagatgtcactttcatgatcacattatgtcatataaaattattttttagcagattggtatgaaagactgatctgctgcccttgaggaagcaaacagcaatattggagttaccaagggagaggaccatgtagcagataattacagacagcttccaggagttgacagcagcctccaactgacagttgacagaaagccagggcccttaatcatacagctacatgaaaataaattctaccaataacctaaatgagcacagtaacggattttttcctcagacaagcctccagatgaaaacacagcccggtgatcccttgagtacaatcttgtgaatacagattatgaagccaaagaattattcacatatataaaagttaaaccatatatttggattgtagcttcctggaagataatgtaaaaagaaaaaaatgtttatttacctcattcttattgtataaacacactatttcttattcacataaataacaacagcaaaatgtgatacgaagtacctcagtattcaatgctgtgcaagttcctgacccttatgttcagaactcttgtaaagtctgagctaaagtgcacagtctaaatgctccaaaaagagacacctaattccatgaatctgaagtcttgagaatagcacattaatgcatgcctgagaaagaatgaggaggagagggacaaagaaagagaagcagagcagaagaaattaccatgtcccaagaaaacccttcactcacttgacccatccagctgcacggatccaagaagtgaaagagagataagaagcctgcatggatgtgtacagttttattgaacagtaactccacccacaagtcagtgtggccttgttagctgctctgcacactgactaatcaaaactggtacctcttgcttccttggaagggctaagaatggtattggcagagggaagcatggcctgaaggcagcctaacattttcttctctcccttgtgcctgctcatttcttattctattttaatctatatcccgggatgggtaatttaaggttcaaccagggaactggtgtctctcttaggagaaaatctctttttgtag

SEQ ID NO: 713883 - DNA, 1294 bp, Homo sapiens
ttttggaagtgactctgggttaatgacagtagcaacactattagcccatctgcatacataagcagaagtgtttcgcagaaaaaagatctcaaattctgatgttacattcatacagttagttttccatactatgaacagatttgccattcaataagtaaatatgtatcattttcaatgtgggaagctttaaggtgaataaaaatggtacggatatagtgtttcctgctggcataaaatgcaaaattgaggtgattttccttccatgtgtaatgtaatcagtatgattttaaatattttggcatttacatttatgttgttcaaatttactactggtgtatcctgattgacactaagctatcaaacttctgcagttaaagattttactgctgtgtgtgagaagtctcaaaataggtaatgtaattctccaaatctagccaaggaaattattctttggataaaatgtgtatcataaatgcattttaaaagatgctttctagttatgtagaaagaaggaaattcagaaattagatatggagatagtttatagttcagtttttttttagtttgtgtacaaatgaaactacagggctcagaaaaagcatgtaaacaatagtcccacatatcattcagtgtggctctaataattcaaaggctacataattgcaaaaatacaactataaatttgtattatgatcctaactttaaaaaaattcctgaaactcagagcttatatacccaagaataccagcagaatttattgtacaaacaacccatttgtacttgacaaacactgaattgaaaaggggttcactttcctggacaatttttaagttgtgtcaagtctgagaaaaacagcagcacataaaaggatcatatctaacagttgatgtgtggatctgttttattttataccagtggaaactaatcagaatacttacactagtgaaatagaccaaaataaaaagcagaggaaagctagatgaacatatagatactgaaattttaggaaaatattyctagtcatctcagacatgttattctgtttgtaaatgaaaggaagagctatttgataggtggatgatatttaaacttttctaataaactttttattgtgttgaaaagtgcaaaagttattttctctcaaattaataatcttagagagttaaaaatatgtatgtatttttaaaatctagtatttctggatgtcagaaatgctgattcttcaggaatgtaagtgggaaagtttagtcttgactcttctgaggggagtaaatcataattattaggctgaaaa

SEQ ID NO: 713884 - DNA, 1561 bp, Homo sapiens
aatctgccctacactcaagggaagggaattaaattctacctcttggagggaggagtattgtagtagtccattctcacactgataatagacatattgagactgggtaatttataaaggaaagaggtttaattgactcacagttcagcatggctggggaagcctcaggaaacttacaatcatggcagaaggggaagcaaacatatccttcttcacctgatggcaggaaggagaagaatgagtacccagtgaagggggaagccccttataaaaccttcagatctggtgagaacagcatgtggaaaacaacccccgtgataatctccacctgttccctcccacgacatgggagtataggactacaaggtgagatttgggtggggacacagtcaaaacatatctttgatacttgtatcaaagatcaaaacatatttttgatacttgtatcaaagaatttgaggacatattttaaaagcattgtggtcttcatgattagttcacatgaattattttaatagctttctwattgttctttctgattcttgtggaatcaactacagttcattctacacccaacagctgaaataattattcaaaatgtaaattagatcatttagcatccctgattgatgctttccagtagctttcctttaaacctagaatgaaattaaaatggctactaatgccaacaaactcttacatgctggcaactgccaacctcagtgactttaacttttaccagtttcattctcttcctctaagatctagcccagagtttcttagcttccacattactgataaatggggttagataattctttgacctgtgagtctgtccagtgcattgtaggatgtttggcagtctctcaggcctccaccaagtagatgccagtagcatctccccagatgtgaatattaagaatgtctccatgcattgctaaatgtcccttgggtgacaaactcacccctgcttgagaacagctggatgttctctgggtgctttccagctgtataggccatctctatgttcctggaaggcaaatctcctctacgacatcttttactattttaacttggctacacatttatttgtttatgtttattgtctatcacctctttcctaaatacaaataccatgagactaggtctttatctcttttgttgattctggtatccccggtgcctagaactatgcctgtcttatgttaaagtccccaaaaatatttatatgaaataataaaaagaatgctcccttcaatgtggaatttgttaacccatttatgtctgaggttgcaatttattgagtttttgcaatcagaccttgctgatgaccttgagctatagaatataaataactccaacatgcttagtgttccagtaatggaatactaggcataaatggctcatgtatctgctttcccttcatctattctattcagaattttttttacctgaaaaccccaattctaataccaccacctctcctaggaatccttacttcaccctaagaaaacattacttatatcattgttcaatacatgttttattttatcctgtttacaca

SEQ ID NO: 713885 - DNA, 1561 bp, Homo sapiens
aatctgccctacactcaagggaagggaattaaattctacctcttggagggaggagtattgtagtagtccattctcacactgataatagacatattgagactgggtaatttataaaggaaagaggtttaattgactcacagttcagcatggctggggaagcctcaggaaacttacaatcatggcagaaggggaagcaaacatatccttcttcacctgatggcaggaaggagaagaatgagtacccagtgaagggggaagccccttataaaaccttcagatctggtgagaacagcatgtggaaaacaacccccgtgataatctccacctgttccctcccacgacatgggagtataggactacaaggtgagatttgggtggggacacagtcaaaacatatctttgatacttgtatcaaagatcaaaacatatttttgatacttgtatcaaagaatttgaggacatattttaaaagcattgtggtcttcatgattagttcacatgaattattttaatagctttcttattgttctttctgattcttgtggaatcaactacagttcattctacacccaacagctgaaataattattcaaaatgtaaattagatcatttagcatccctgattgatgctttccagtagctttcctttaaacctagaatgaaattaaaatggctactaatgccaacaaactcttacatgctggcaactgccaacctcagtgactttaacttttaccagtttcattctcttcctctaagatctagcccagagtttcttagcttccacattactgataaatggggttagataattctttgacctgtgagtctgtccagtgcattgtaggatgtttggcagtctctcaggcctccaccaagtagatgccagtagcatctccccagatgtgaatattaagaatgtctccatgcattgctaaatgtcccttgggtgacaaactcacccctgcttgagaacagctggatgttctctgggtgctttccagctgtataggccatctctatgttcctggaaggcaaatctcctctacgacatcttttactattttaacttggctacacatttatttgtttatgtttattgtctatcacctctttcctaaatacaaataccatgagactaggtctttatctcttttgttgattctggtatccccggtgcctagaactatgcctgtcttatgttaaagtccccaaaaatatttatatgaaataataaaaagaatgctcccttcaatgtggaatttgttaacccatttatgtctgaggttgcaatttattgagtttttgcwatcagaccttgctgatgaccttgagctatagaatataaataactccaacatgcttagtgttccagtaatggaatactaggcataaatggctcatgtatctgctttcccttcatctattctattcagaattttttttacctgaaaaccccaattctaataccaccacctctcctaggaatccttacttcaccctaagaaaacattacttatatcattgttcaatacatgttttattttatcctgtttacaca

SEQ ID NO: 713886 - DNA, 1561 bp, Homo sapiens
aatctgccctacactcaagggaagggaattaaattctacctcttggagggaggagtattgtagtagtccattctcacactgataatagacatattgagactgggtaatttataaaggaaagaggtttaattgactcacagttcagcatggctggggaagcctcaggaaacttacaatcatggcagaaggggaagcaaacatatccttcttcacctgatggcaggaaggagaagaatgagtacccagtgaagggggaagccccttataaaaccttcagatctggtgagaacagcatgtggaaaacaacccccgtgataatctccacctgttccctcccacgacatgggagtataggactacaaggtgagatttgggtggggacacagtcaaaacatatctttgatacttgtatcaaagatcaaaacatatttttgatacttgtatcaaagaatttgaggacatattttaaaagcattgtggtcttcatgattagttcacatgaattattttaatagctttcttattgttctttctgattcttgtggaatcaactacagttcattctacacccaacagctgaaataattattcaaaatgtaaattagatcatttagcatccctgattgatgctttccagtagctttcctttaaacctagaatgaaattaaaatggctactaatgccaacaaactcttacatgctggcaactgccaacctcagtgactttaacttttaccagtttcattctcttcctctaagatctagcccagagtttcttagcttccacattactgataaatggggttagataattctttgacctgtgagtctgtccagtgcattgtaggatgtttggcagtctctcaggcctccaccaagtagatgccagtagcatctccccagatgtgaatattaagaatgtctccatgcattgctaaatgtcccttgggtgacaaactcacccctgcttgagaacagctggatgttctctgggtgctttccagctgtataggccatctctatgttcctggaaggcaaatctcctctacgacatcttttactattttaacttggctacacatttatttgtttatgtttattgtctatcacctctttcctaaatacaaataccatgagactaggtctttatctcttttgttgattctggtatccccggtgcctagaactatgcctgtcttatgttaaagtccccaaaaatatttatatgaaataataaaaagaatgctcccttcaatgtggaatttgttaacccatttatgtctgaggttgcaatttattgagtttttgcaatcagaccttgstgatgaccttgagctatagaatataaataactccaacatgcttagtgttccagtaatggaatactaggcataaatggctcatgtatctgctttcccttcatctattctattcagaattttttttacctgaaaaccccaattctaataccaccacctctcctaggaatccttacttcaccctaagaaaacattacttatatcattgttcaatacatgttttattttatcctgtttacaca

SEQ ID NO: 713887 - DNA, 1242 bp, Homo sapiens
ctcatggtagacaatctaagaaatacagagacctaaaataaataatcaactgtaatcccactaaccactgttgctatttgatgaatatttgaatatttactgaatgctgactgtctgaggcactctaacaatcctaaggctcaggtagtaaaattattcccctttaattaatgaaagaactgagattcagcgaggttaagatttgcctaaaaacacacagctgatacgtggtaaagcctggatttgaacctggttctgtatcccaattttctcacaatattttatttgtcttgatctaccaagatttgtcttggtatttgtcttgataccagagatgatggtacatcatcaaacaatcccaattttcaaatgggaaatacttcaaagcaaaaagatactgcatgaagatgtttcaaaaatgcgttttgtctttcaggtcttgtcacagttattgcaattttgtaaratcattcattgcgaaagtggtgttttgattctttgccctttccggcaacaaaaacagaaagcgacttcccttctatcatttggcctgaggcttctttctgcttctgcccaaggcagactgtggttagcactcagtgcttaacctcttcctcctgcatgtccctctgaagtaatacatttttgttttgacactttggatatactggaccctaaaaatcaagccaataaggagcagcccagaaaggaagagagtgccatagtctcacctgtgttttagggaggttagttttgtagccgtgcaagggctggcttgattaggagatcttagactcagagaaattggttatcacttttaaaaaatgaacaaatgacatgggtaacaaccttaccccattcataagcttcaccatctctcaccacatctctgtgtccagccccattcctgaattcctcatctgaccctcatttcatcctgacattaaggagattatctacacagattatttgatgattttttaaaagctgaaaatttaataatttattctttacagtaatgaattaagtctgaacactgaaatatcactggcactaaaactacctcagtaaaacatcatgtacccaatacccaatcctgactacccagttttgttccccagccagtctagccctgacagttttagacacttcctgcacattctccaccattaaccagctctagctcctcctggtaactctacagtggctctcaagatagaattgtcattaaatgtggaaact

SEQ ID NO: 713888 - DNA, 596 bp, Homo sapiens
tttccacctccatccaagactctcagagcctgtgtgttcagtgggcaaagaacgagacaacaagatgccttggtccaagactgcatgggcagttaactgtgcagcagggaatggctgaggcctccagcccggaaatggtgtgctcttactaaaccacacttctctcccacctccctcccaaaaactccagctcgcatagggagagtttctgagaatgaagcttttctatattgtatctgtgggttctcttaccgtgttagctaagtcagaaatccagatgcatgacaaatacagtggtactaatggcgactaagggacagatatatatatatatattttttttttcttggctcactgcaacttctgcctcctgggttcaagtgattctcctgcctcagactcctgagcagctgggattacaggcacatgccagcatgcctagctaatttttgtatttttagtagagacagggtttcatcatgttggtcaggctggtcttgaactcctgacctcgtgatccacccacctcrgcctcccaagggagacagactttttaagacactgggaaaaacctagagtgtgtagttgccataata

SEQ ID NO: 713889 - DNA, 937 bp, Homo sapiens
ccttttcagtctctgtcaactacagtcttaatgcttagttttcctttataatgaacgtttccttaaagagttgtccatactttttattgctaccttytaattcctgtaaacagctttcgttgtcacttaagtccatatttattttgatatatatcatatataaaatagataaaattttatataaaatagataaaattttatataaaatagataaaattttatataaaatagataaaattttatataaaatagataaaattttatataaaatagataaaatacaaaatatatatgtattctttaaagaataataaactgaacccttatatacatatcaccagccaaagaaatagagcatttctagaacatttgaaacccttgtaggtatccctccaatcttatccctcttccaccctaccctccgccctggatgtcatcactgtcctaaattctgtgcttctatgcttccagattctcagttctgttccattggcatatttttctatccctgcagtaagaccacattgtcagaatcactttagccttgttaggagtcttgatatatggcagggaaaatctcacattattaatctccttcaggaggatcttgactattttctggcccttttgaaatacatgtacaatttagaattagcttatcaagtgacacacacacaaccctgctgggattttcagtgtatctaatagatgggacactttggtgagaatgaaattaagttcttttatccatgaacaggagtatctatttaattagatctttttcttcgaactttttattgtgaaatttttcaaaagaagtaaaatgattactcatatattccccatttaaattcaacagttgttaagatttgccaaatctactgtgagtataatttcccccttttccctttgatcatgaattttcagagtaaagggt

SEQ ID NO: 713890 - DNA, 1623 bp, Homo sapiens
tgcaacrtccgtgtcccgggttcaagcaattctcctgtctcagcctccctagtagctgggattacaggcgcccgccgccacgcccggctaactttttgcatttttagtagagacggggtttcaccgtgttagccaagatggtcttgatctcctgacctcgtgatccgcctgcctcggcctcccaaagtgctggaattacaggcgtcagccaccgtgcccggcccctctgacacttttgaaagagacaagttatcgtttataaattctcccgagaaaataattatttggatcaaacaaattaagtgaaaggcaacatggttgtgtttcgagaaagccactcttcagttcctgctgctggtgtgggggctgtggctactgcactccagctctccagggagctgcacaaaagccacacgcttagcagatgctgcggggtcaacagggcccatctctaggtcacttaggacttcaggagcttctggccactcatgatgaccactccgattacatctgaaattttatcagaaatattacatagcatttgaaattttaaaaaccagtaaaggtatttggaggttttcctttttaagacagtattttttaagaggagaaaagagaggcaggaggatgacttgaagccaggagttcggagaccagcctgggcaacacagtgagactctgtctctacaaaaacaaaaataaaaattacccaggcataggtgcctgcgcctgtagtcccagctactcagaaggctagggtgggaggatcacttgagcccaggagttagaggctgcagtgagccatgatcatgccactgtactccactccagcctgggcaacagagggagaccctttcttttggggagcagggaggggaagagacatctaccagaagtgtatatgcaaatttcccaaagaccaagtcaacagagccattaattccttagaaacgtgcagcccagattatcttggtatttcccaggcaaacaaggctaacttttccccatgtacggtaggctaactcccccgctgcttataaaccgtgccccagaacactgcacaggtacacatagtacgttctcaataaattcataattcatttaacatgtatttgttcagtgcctaataaataagtctctgacctcaaggagctttcattctcgatactttttgtgtttatttgctaaacagaaaataagcaaaataaatcagtaaataatttatcggaaatgaatgctgaatggctaaatgcagattatatgctgtcttcccatatctactgatgcaatgagacctcacaactatcaagacagctgaagtcagagttgactcaaggtcttccactttccacaattccattcacctgttaaagcctggtttgtaaagttggtctggcctgacagcaaagaccctacttaagatttccttttggtattgttattacaactatcaggtgacactcccaccactgctaccagaagaaatcatttaaccactgtgtgcactgagatctctactctataaaataggactattatttacacttctaacctgtgtcagcaatgtatgttaaggacaaattggtttttatttttattttatttatttatttactttttgag

SEQ ID NO: 713891 - DNA, 1623 bp, Homo sapiens
tgcaacatccgtgtcccgggttcaagcaattctcctgtctcagcctccctagtagctgggattacaggcgcccgccgccacgcccggctaactttttgcatttttagtagagacggggtttcaccgtgttagccaagatggtcttgatctcctgacctygtgatccgcctgcctcggcctcccaaagtgctggaattacaggcgtcagccaccgtgcccggcccctctgacacttttgaaagagacaagttatcgtttataaattctcccgagaaaataattatttggatcaaacaaattaagtgaaaggcaacatggttgtgtttcgagaaagccactcttcagttcctgctgctggtgtgggggctgtggctactgcactccagctctccagggagctgcacaaaagccacacgcttagcagatgctgcggggtcaacagggcccatctctaggtcacttaggacttcaggagcttctggccactcatgatgaccactccgattacatctgaaattttatcagaaatattacatagcatttgaaattttaaaaaccagtaaaggtatttggaggttttcctttttaagacagtattttttaagaggagaaaagagaggcaggaggatgacttgaagccaggagttcggagaccagcctgggcaacacagtgagactctgtctctacaaaaacaaaaataaaaattacccaggcataggtgcctgcgcctgtagtcccagctactcagaaggctagggtgggaggatcacttgagcccaggagttagaggctgcagtgagccatgatcatgccactgtactccactccagcctgggcaacagagggagaccctttcttttggggagcagggaggggaagagacatctaccagaagtgtatatgcaaatttcccaaagaccaagtcaacagagccattaattccttagaaacgtgcagcccagattatcttggtatttcccaggcaaacaaggctaacttttccccatgtacggtaggctaactcccccgctgcttataaaccgtgccccagaacactgcacaggtacacatagtacgttctcaataaattcataattcatttaacatgtatttgttcagtgcctaataaataagtctctgacctcaaggagctttcattctcgatactttttgtgtttatttgctaaacagaaaataagcaaaataaatcagtaaataatttatcggaaatgaatgctgaatggctaaatgcagattatatgctgtcttcccatatctactgatgcaatgagacctcacaactatcaagacagctgaagtcagagttgactcaaggtcttccactttccacaattccattcacctgttaaagcctggtttgtaaagttggtctggcctgacagcaaagaccctacttaagatttccttttggtattgttattacaactatcaggtgacactcccaccactgctaccagaagaaatcatttaaccactgtgtgcactgagatctctactctataaaataggactattatttacacttctaacctgtgtcagcaatgtatgttaaggacaaattggtttttatttttattttatttatttatttactttttgag

SEQ ID NO: 713892 - DNA, 1623 bp, Homo sapiens
tgcaacatccgtgtcccgggttcaagcaattctcctgtctcagcctccctagtagctgggattacaggcgcccgccgccacgcccggctaactttttgcatttttagtagagacggggtttcaccgtgttagccaagatggtcttgatctcctgacctcgtgatccgcctgcctcggcctcccaaagtgctggaattacaggcgtcagccaccgtgcccggcccctctgacacttttgaaagagacaagttatcgtttataaattctcccgagaaaataattatttggatcaaacaaattaagtgaaaggcaacatggttgtgtttcgagaaagccactcttcagttcctgctgctggtgtgggggctgtggctactgcactccagctctccagggagctgcacaaaagccacacgcttagcagatgctgcggggtcaacagggcccatctctaggtcacttaggacttcaggagcttctggccactcatgatgaccactccgattacatctgaaattttatcagaaatattacatagcatttgaaattttaaaaaccartaaaggtatttggaggttttcctttttaagacagtattttttaagaggagaaaagagaggcaggaggatgacttgaagccaggagttcggagaccagcctgggcaacacagtgagactctgtctctacaaaaacaaaaataaaaattacccaggcataggtgcctgcgcctgtagtcccagctactcagaaggctagggtgggaggatcacttgagcccaggagttagaggctgcagtgagccatgatcatgccactgtactccactccagcctgggcaacagagggagaccctttcttttggggagcagggaggggaagagacatctaccagaagtgtatatgcaaatttcccaaagaccaagtcaacagagccattaattccttagaaacgtgcagcccagattatcttggtatttcccaggcaaacaaggctaacttttccccatgtacggtaggctaactcccccgctgcttataaaccgtgccccagaacactgcacaggtacacatagtacgttctcaataaattcataattcatttaacatgtatttgttcagtgcctaataaataagtctctgacctcaaggagctttcattctcgatactttttgtgtttatttgctaaacagaaaataagcaaaataaatcagtaaataatttatcggaaatgaatgctgaatggctaaatgcagattatatgctgtcttcccatatctactgatgcaatgagacctcacaactatcaagacagctgaagtcagagttgactcaaggtcttccactttccacaattccattcacctgttaaagcctggtttgtaaagttggtctggcctgacagcaaagaccctacttaagatttccttttggtattgttattacaactatcaggtgacactcccaccactgctaccagaagaaatcatttaaccactgtgtgcactgagatctctactctataaaataggactattatttacacttctaacctgtgtcagcaatgtatgttaaggacaaattggtttttatttttattttatttatttatttactttttgag

SEQ ID NO: 713893 - DNA, 1623 bp, Homo sapiens
tgcaacatccgtgtcccgggttcaagcaattctcctgtctcagcctccctagtagctgggattacaggcgcccgccgccacgcccggctaactttttgcatttttagtagagacggggtttcaccgtgttagccaagatggtcttgatctcctgacctcgtgatccgcctgcctcggcctcccaaagtgctggaattacaggcgtcagccaccgtgcccggcccctctgacacttttgaaagagacaagttatcgtttataaattctcccgagaaaataattatttggatcaaacaaattaagtgaaaggcaacatggttgtgtttcgagaaagccactcttcagttcctgctgctggtgtgggggctgtggctactgcactccagctctccagggagctgcacaaaagccacacgcttagcagatgctgcggggtcaacagggcccatctctaggtcacttaggacttcaggagcttctggccactcatgatgaccactccgattacatctgaaattttatcagaaatattacatagcatttgaaattttaaaaaccagtaaaggtatttggaggttttcctttttaagacagtattttttaagaggagaaaagagaggcaggaggatgacttgaagccaggagttcggagaccagcctgggcaacacagtgagactctgtctctacaaaaacaaaaataaaaattacccaggcataggtgcctgcgcctgtagtcccagctactcagaaggctagggtgggaggatcacttgagcccaggagttagaggctgcagtgagccatgatcatgccactgtactccactccagcctgggcaacagagggagaccctttcttttggggagcagggaggggaagagacatctaccagaagtgtatatgcaaatttcccaaagaccaagtcaacagagccattaattccttagaaacgtgcagcccagattatcttggtatttcccaggcaaacaaggctaacttttccccatgtacggtaggctaactcccccgctgcttataaaccgtgccccagaacactgcacaggtacacatagtacgttctcaataaattcataattcatttaacatgtatttgttcagtgcctaataaataagtctctgacctcaaggagctttcattctcgatactttttgtgtttatttgctaaacagaaaataagcaaaataaatcagtaaataatttmtcggaaatgaatgctgaatggctaaatgcagattatatgctgtcttcccatatctactgatgcaatgagacctcacaactatcaagacagctgaagtcagagttgactcaaggtcttccactttccacaattccattcacctgttaaagcctggtttgtaaagttggtctggcctgacagcaaagaccctacttaagatttccttttggtattgttattacaactatcaggtgacactcccaccactgctaccagaagaaatcatttaaccactgtgtgcactgagatctctactctataaaataggactattatttacacttctaacctgtgtcagcaatgtatgttaaggacaaattggtttttatttttattttatttatttatttactttttgag

SEQ ID NO: 713894 - DNA, 958 bp, Homo sapiens
atgcattccattagacattgagctcctcaagagcaggaactgctttatctccacagtccagctcagggttggctcaagtctgaagctcagtaaatgtctgtcaaatagaaaagaaaggatgagccttcggtcatcagctacatgagtcaggcacggtggcagcttcccattttagtcagtttgccagtttgtaaccagacagtaatcaattaagagctttaatctcttaaggacatttttcctttagggaaaatgaacaaaaaataaaacatttattaccagtgctkcttccaagcaaaaatttaaaaattaaattaaaatttaaaaaataagtgaagccacttaggagtttccctggcaagcctcacccaagaagacttaaccttttttaaaaagaggcaaatagattaaaggggccaggggctggatgcataatcccctgatctgataccaacccaacaggcccagatgacttcttccagcagatacaatcaatgggtcaagaacattttctcaaagtttctttccctctctatggaaaagagctgacagcccccttctaagggcaccacatttcctggatttcccctcagactgaccttcaccctcccccctaacttcccctttaataataaaaaaacccagaatgcatatatacaaggaacagagtaagacatgggtaatttgtatggtgaactgggcttcaatgatttgtgaggaatttgttttgtgaaatcctgcacctcttattctagctcacaaacccttcccatcgttctgtttccttccttgtccttttctgttcccccaaataatacacatcaacatatcgacttttaaccaacttcagaatcatggaaggagagagggagatttttcagaaagaaaagcattcaggttttagttattaaggatgggaagcatcttaaaattcagataataccttagtggtttttcc

SEQ ID NO: 713895 - DNA, 958 bp, Homo sapiens
atgcattccattagacattgagctcctcaagagcaggaactgctttatctccacagtccagctcagggttggctcaagtctgaagctcagtaaatgtctgtcaaatagaaaagaaaggatgagccttcggtcatcagctacatgagtcaggcacggtggcagcttcccattttagtcagtttgccagtttgtaaccagacagtaatcaattaagagctttaatctcttaaggacatttttcctttagggaaaatgaacaaaaaataaaacatttattaccagtgctgcttccaagcaaaaatttaaaaattaaattaaaatttaaaaaataagtgaagccacttaggagtttcccyggcaagcctcacccaagaagacttaaccttttttaaaaagaggcaaatagattaaaggggccaggggctggatgcataatcccctgatctgataccaacccaacaggcccagatgacttcttccagcagatacaatcaatgggtcaagaacattttctcaaagtttctttccctctctatggaaaagagctgacagcccccttctaagggcaccacatttcctggatttcccctcagactgaccttcaccctcccccctaacttcccctttaataataaaaaaacccagaatgcatatatacaaggaacagagtaagacatgggtaatttgtatggtgaactgggcttcaatgatttgtgaggaatttgttttgtgaaatcctgcacctcttattctagctcacaaacccttcccatcgttctgtttccttccttgtccttttctgttcccccaaataatacacatcaacatatcgacttttaaccaacttcagaatcatggaaggagagagggagatttttcagaaagaaaagcattcaggttttagttattaaggatgggaagcatcttaaaattcagataataccttagtggtttttcc

SEQ ID NO: 713896 - DNA, 843 bp, Homo sapiens
ataaaacattaataagagagattagattgatttatagctatgctataaatgaaatgagatagattttatattgtcttataaccttatatggtaaatgttcatattacaaagttaaataaaagtttcagtggatccaatttgttatttaaaaaaaaaaaaaagagaagggaatgttcatagagatggctaggttataggggactttgtggatggctgacaatgactgggctgcaggcaaagactaattaggaggtcaaggctgcagccagcccagatgaatgtcaatcattcacataacaaaacatgccacgccaggccctgggctgggtctggttaccaaggggtgagtgagaaagtcccacctgggcttaggtttctactgtatagtgaatggtaaaggagctcacactttggaggagggggcgggcccaggaggagacacagatattaaataattatagctccatgtggtaactaacagaggtaagcataaatgcttttaagaataactaggatgggctgggcgtggtggctcacacctgtaatcccaccactttgggaggccaaggctaggcgatcacttgaggtcacgagttcaagtccagcctggccaacatggtgaaaccccatctctacaaaaaatacaaaaattagccgggtgtggtcgtgggtccgtaatcscatctactcaggaggctgaggcaggagaatcactctgaagcgggatgaggaggttgcagtgagccaagatcgcgtcattgcgctccagcctgggtgacaagagtgaaactccatctctgaaaaaaaaagattagttacgtgacgacctaatttagactaagg

SEQ ID NO: 713897 - DNA, 843 bp, Homo sapiens
ataaaacattaataagagagattagattgatttatagctatgctataaatgaaatgagatagattttatattgtcttataaccttatatggtaaatgttcatattacaaagttaaataaaagtttcagtggatccaatttgttatttaaaaaaaaaaaaaagagaagggaatgttcatagagatggctaggttataggggactttgtggatggctgacaatgactgggctgcaggcaaagactaattaggaggtcaaggctgcagccagcccagatgaatgtcaatcattcacataacaaaacatgccacgccaggccctgggctgggtctggttaccaaggggtgagtgagaaagtcccacctgggcttaggtttctactgtatagtgaatggtaaaggagctcacactttggaggagggggcgggcccaggaggagacacagatattaaataattatagctccatgtggtaactaacagaggtaagcataaatgcttttaagaataactaggatgggctgggcgtggtggctcacacctgtaatcccaccactttgggaggccaaggctaggcgatcacttgaggtcacgagttcaagtccagcctggccaacatggtgaaaccccatctctacaaaaaatacaaaaattagccgggtgtggtcgtgggtccgtaatcgcakctactcaggaggctgaggcaggagaatcactctgaagcgggatgaggaggttgcagtgagccaagatcgcgtcattgcgctccagcctgggtgacaagagtgaaactccatctctgaaaaaaaaagattagttacgtgacgacctaatttagactaagg

SEQ ID NO: 713898 - DNA, 1139 bp, Homo sapiens
tgaatgattctagacactaagatatgagcatagaagttcagaagtaatcatctgcaaccatgtgtgtcctataatggggaataaaacagatgagaataaaaaaataaaaataaaccataaaatccctaaaaaaaaagtccaggtgcagtggctcaggcctgtaatcctagcactttgggaggctaaagggggcggctcacttgaggccagaagttggagaccaccctgaccaacatggtgaaaccctgtctttactaaaattacaaaaattagccgggcataatggcatgtgcctgtattaccagcttctcaggaggttgggatatgagaattgcttgaacctgggaagtgggaggttgcagtgagacaagatcaggccactgcactccagccggggcaacagagggagactttgtctcaaacagacaaacaacaataacaacaaaaccctaaaaaaaaaaaacagatgagtaaactgagaatttatacttacaatggcttaataggtaagtattcatttttttctaagcgtatattaattatgtattaaatgcaaaagagaaaaaaacaaaaaaagaaattaactttattgaaaactacttgaaaaacatgaacaagagcttttttccttcatagatatttatggcattcatccttcagtaatagaagcaagaaaaatctgacagcaaaacattggagtttcttgacaaaaaaaattattggagttttttgacaaagcagtgcttaacattgcatgtttttggacaaaaaattattagagttttctgacaaagcaatgttttatcaaaacagacaaaaaatttttggagtttcttgacaaagcaatgttttctacaaaatgagattcattagattactagtttgttttttaatgtgttcagatagtaaaatgactggatatcatgatgtcctttaagaartgatatggaacattaatttaataaatttcatcctatgaaatggtatgttttatttttaaatcacgaagtttctttttcttcctagttttctaagagtttaaaatgaataaatgttgttgaatttttgaaagttttttatgcagctattaaaataatcgtatgagttttcttctttggtttgttaatctggtggaattt

SEQ ID NO: 713899 - DNA, 590 bp, Homo sapiens
gttacctaatattaatttgctatgttttattcacatgataatatattagcactcgttagaggataacggtagcagatgccttcattgtaaagtccaaatacatagaaaaaaatgttaaactaagaaaattctatcagcttattttttcaagaaactgggattttctttgatatcattaacagatgatattcaaccagttcttacagcccagagtagaaataatctgatgacctctttggtattacaagaggaatctgcatattccatttatttacttgtctgttcaattatttattaagaaactgacatctggatacattaaagacatattattcattgttagcagatctgggactagaatttttaatatgttttttaacgtaatagtaaataccagaaatggatgattaaatagtataaggcrtggtctttgctctctgggagctctcagtttagtttatgaagttccaaataaatggtataaccaaaaactgtatgaggccttatacgatttcagagaaagcagagataagtttggacagtatttatctaagtaagagagttttaaaaatctgcaggagttaagcaaa

SEQ ID NO: 713900 - DNA, 655 bp, Homo sapiens
atggattttaagtatttgctgaagaactctttaattcctcagcaagctagaaatgaaagaaaaggtttttatcttcaaaaaktgtttcttgccatagagctatactaacatacctaagagtgaaaggcctcttttctaagataaaaatgtcaactctatgttgttttctcagtcttatttgataccatacttgaagttctttccagcataataagacaagaaaaagaaatacataaagaagaaatacagtggtatttatttgaagacaacataattgtctatgttaaaaatccctaagaatctaaaaaatgctaccgccactattatgtgagtttagcaatgttgccagttaaaaggtcaatgtatcaaattgtattgcatttttacatactagcaacgaaaaatttgaaatttataataaaatggtaccatttaacatagcaataaaactgaaatgccattaattattaaggtaacaaaatgtgtacaaaatctgtatgctgaataataaaaaacaataatgaaaagtttatagaatacctactttaattaagatatggatcacgcttatagacagaaagactaagtattgttaaaatgctgattttccccaaattgacctacagaatacatacatttttaaccaaatcatatt

SEQ ID NO: 713901 - DNA, 1466 bp, Homo sapiens
tgggggaaattatkgctcaggacaatggggaagaatttagaatgctatttgtaaaggtaagatctaaagcctccccttttcaataaacttcctgtgaatatacctgactagtaaatacttaggaggaagcattcctgaaggactgtgtcttactctgtttgagctgctgtaacaaaataacacaatttgggaattttttaaatttatttttaatgacacataatacttgtacatatttatggggtacatgtgatattttgttacatgattagaatgtataatgataaagtcagagtatttagggtatccataacctcaagtatttatcatttctgtgtgttgggaatatttagtcttccagctattttgaaatacgtgttacattattgttaattatagtcatcttgctctgctatcaaaaattagaaattattctatctaactgtacatttgtacccatgaactctttattccttcctcaacccatacagtctttccagcctctggtaactatcattctactccctaccttcataaaatcaacttttttagctgccacttacgagttagaacatgtgatatctgtctttctgtgtctggcttatttcacttagcatactgactttcatttccattcatgttgctgcaaatgacttaattttattcttttttatgattaaatagtacttcattgtgtgtatatataccacatatttttatccattcatctattgatggacacttaggttggttccatatttttgccattgtgtcaagtgctacagttagcatggtagtgcaggtatcaaaatttgtaatttatagagaataaaattttatttctcagagatctagaggctgggaaagccaagatcaaaaagctagcaggttcagtgtttggtgaggacccagtctctgctcctggaatggcaccttgaatgttgcatcctccagaggggacacgtgctgtgtcctcacatggtgaaagagcagaagagcaaaaagggcagaatgctatgtgaagtgtgttttacaaagagcttaaaacccattcacgagggcaaagccttcatcaatgaatcagctcctaaagtcccctcctcttagtaatttggctcttaagttttaacacatgaattatgggagacattcagatcaacacagactcagaagcatagttttaaggaaaataagagacagaaagggaaagggaagaagaaggagtaggtgtagaacattgggagggaagtggaggaggaagaagatagataaaatgcaggttggtatagacattacactgctactacgtgacatttctattatagatatatattatagatattaatatctgcccaggtaaatctatttcccagtaaatatctatcagaactgaaccagtcctggagtgaatgtggcagctgcccagaaaatttacttcaagtttttgagcatagccaatggtcata

SEQ ID NO: 713902 - DNA, 677 bp, Homo sapiens
tttaaaaaataagaatgagttacttcaagggtcagtttcatgttaaggtggattaatttttaataagtgataattgaataagataccatttggacttcatccactactaggttaatgattgaaggtgtttttgttttcaatatcacaggcttaaaaaaatcagctgtgtagttgtgtcatactaaattatatttcgatgttggatgaaataaataacttatctgcatggatatacatacaacctggttctgagagtttcatgaaaaaagtagcacaaaaatagctgcctcctcactgtatgtgttgctatgacgccattgaatgtcaccttgactcttcaggcatgagtttccgcagtcagttggaataaatgtatgtgactaaacraaatttgtgattgaacaaaagtttgttctattgtgttttccatatgcatactggagaaattataaaccattcattattcgaaaaaataataagaaattttaaaagttagttctgtcaaatccaaaaattaatgtaggtacactcttccttggtaactaacattgaaaattagcaaggattaaaaagcacttgaaaagattctattacatataaataacacaaaacacatccatatctacttatctgtattttatcaatacatatatgatatatatgtatatatttcatac

SEQ ID NO: 713903 - DNA, 1177 bp, Homo sapiens
tgaacaattaggtttttttgtagaaaaaaagagacctcagctgggtgcagtggctcacacctacagtcccagcatgttgggaggcagaggtgggcagatcgcctgaggtggggagttcgagaccagcctgaccaacatgaagaaaccccatctctactaaaaatacaaaattagtcaggcatggcggcacatgcctgtaatcccagctactggggaggctgaggcagaagaattgtttgaacctgagacggggwggttgtagtgagctgagaccatgccactgcactccagcctgggcaatagggcaataagagtgaaactctgtctcaaaaaaaataaaataaaaaaaaataaagctcagttttgtttaatgaatatttattgaaactttttctgtgctaggtactgcacaatgagtgtagtagccaacaaagaagacatagtcttttaatataataacatacacattgtgtttattttggaatcaaggtatataagatatgaatgttccatgctctcagtacaatcaagagtaaagcagattgctacatcaaaatgagattggcaaaaactatgctaaaagaattaatttttaggtactgcagatagaaagacttatgacttatctgtaattggtatgcaagaacttagaaaataaagaaaccatctcaaaacagaagtgatgggacatggaacatttcagcaacacagcaaatggagcagaaccaacatgacccccaaacaaacagccatgtttgcattgacacttctagctatagcttaagtgaggagtaatctgaacccagttctacaaacacaatttatattattggtatattatctttttaaattaaaggcttagtatatatatatatatatatatatatatatttcatttggagatatagcccaaatcattaattaattaattaatataattaattaatataattaaattaatgaagtaatataattaattaatataattaaattaataaccagacacaagccaagtaggtattattaaatgttaatatctctagtaggttaacctcaaaattctgctgcctagagtaaacagattaggtaaacagaactctctacaaaaggataaaatggttgtcaacaatagttgtacatcaaagttacctgaagaatttttaagaagagaaagata

SEQ ID NO: 713904 - DNA, 892 bp, Homo sapiens
aatggcagagtgagtgatggtgatgggtaaaggccagaagtattaattttggtccatgattttcattcctggctgtacaacatgtagagatgatactatacaatatgtagagacctcaacaaagagtttctttaattactttggtctgtggctcaggcactagcatttcttccacatgaaaataaagaacatggggaataaatgtttctccaaatcaacgctatcttattttcaaaatacattgtaagaagtaaaaaagataccagagtatctttctggtttttagttttaatagcataggaccaaatatttgaacgttctttctgattaaaataactttccacttttatataaagagatacaaatttaacatttatgtagatatcagtttttctgaattgtgcttgttttatttatggctgggagggatcagaggcgaatagagtaatatggcatgatgacccagaacctatctaaggacaaactcgaactcctttgggaaaggctttatgtagaatccttattatttgaatattattgttggcattgccagtgacatttgcagagcagggcaggaacaataattccacttcttttgaattttttaaaatcgagtactcaatgatattctcatttcaataccattttttatagggaatcggtactcagttttcaattagctgtttctgtgggtatttttgtaggaggtaaggaatgggcatgagcctagttgctgccacttccttccctgtgagacttaaaaatatccaagaaaaatattgaaacctttgggcattaatatttaatataattttagtacttcattagactgtagttgtagaagtgattttacrttcttattttggtatagaattccttttaatatgttttc

SEQ ID NO: 713905 - DNA, 905 bp, Homo sapiens
tcccatgtagtgacttcttgttctctttcttcctccatttccctggaactcctagcaatcctctctgctgagcttaaaaatctacaatagacaagtgcatttagcttttttatgataattcaaaatttgtggctaaaaaccccaaagcccatatatatatgtgtgtgtgtatatatatatacacacacacacacacctatatgtatatatacacatatatacatatatctgtgtgtgtgtgtatatatatacacacacacacatatatatgtatatatacacacatatatatacatatatatgtgtgtatatatwttttttttcttgaagacagagttttgctcttgttgcccaggctggagtgcaatggcactatctcggctcactgcaacctccacctcccaggttcaagggattctcctgcctcagccttccaaataactgggattacaggcatgcaccaccatgcccagctgattttgcatttttagtagagatggggtttctccatgttggtcagactggtctcgaactccccacctcaggtgatctgccctcctcagcctcccaaagtggtgggattacaggcgtgagccatcacgcccggctgctactttttgaaaataagaagaagaggttaagtatacaaggacaatctgtgaacattttcctgctgcacacaatgtatgcctttgatcatttcagtgggaatattggagagaaagagaaatcaaacccatgtgcttaagcctttgcctttctgaaaagcttttatatttttctgtacaatttgtgttcatattttactttaccaattaatgcatatatgtacatttaaatatttatgaaaccacttaagaagacctgtttatgtacatataaattagtatatgattatatttaca

SEQ ID NO: 713906 - DNA, 905 bp, Homo sapiens
tcccatgtagtgacttcttgttctctttcttcctccatttccctggaactcctagcaatcctctctgctgagcttaaaaatctacaatagacaagtgcatttagcttttttatgataattcaaaatttgtggctaaaaaccccaaagcccatatatatatgtgtgtgtgtatatatatatacacacacacacacacctatatgtatatatacacatatatacatatatctgtgtgtgtgtgtatatatatacacacacacacatatatatgtatatatacacacatatatatacatatatatgtgtgtatatatattttttttcttgaagacagagttttgctcttgttgcccaggctggagtgcaatggcactatctcggctcactgcaacctccacctcccaggttcaagggattctcctgcctcagccttccaartaactgggattacaggcatgcaccaccatgcccagctgattttgcatttttagtagagatggggtttctccatgttggtcagactggtctcgaactccccacctcaggtgatctgccctcctcagcctcccaaagtggtgggattacaggcgtgagccatcacgcccggctgctactttttgaaaataagaagaagaggttaagtatacaaggacaatctgtgaacattttcctgctgcacacaatgtatgcctttgatcatttcagtgggaatattggagagaaagagaaatcaaacccatgtgcttaagcctttgcctttctgaaaagcttttatatttttctgtacaatttgtgttcatattttactttaccaattaatgcatatatgtacatttaaatatttatgaaaccacttaagaagacctgtttatgtacatataaattagtatatgattatatttaca

SEQ ID NO: 713907 - DNA, 905 bp, Homo sapiens
tcccatgtagtgacttcttgttctctttcttcctccatttccctggaactcctagcaatcctctctgctgagcttaaaaatctacaatagacaagtgcatttagcttttttatgataattcaaaatttgtggctaaaaaccccaaagcccatatatatatgtgtgtgtgtatatatatatacacacacacacacacctatatgtatatatacacatatatacatatatctgtgtgtgtgtgtatatatatacacacacacacatatatatgtatatatacacacatatatatacatatatatgtgtgtatatatattttttttcttgaagacagagttttgctcttgttgcccaggctggagtgcaatggcactatctcggctcactgcaacctccacctcccaggttcaagggattctcctgcctcagccttccaaataactgggattacaggcatgcaccaccatgcccagctgattttgcatttttagtagagayggggtttctccatgttggtcagactggtctcgaactccccacctcaggtgatctgccctcctcagcctcccaaagtggtgggattacaggcgtgagccatcacgcccggctgctactttttgaaaataagaagaagaggttaagtatacaaggacaatctgtgaacattttcctgctgcacacaatgtatgcctttgatcatttcagtgggaatattggagagaaagagaaatcaaacccatgtgcttaagcctttgcctttctgaaaagcttttatatttttctgtacaatttgtgttcatattttactttaccaattaatgcatatatgtacatttaaatatttatgaaaccacttaagaagacctgtttatgtacatataaattagtatatgattatatttaca

SEQ ID NO: 713908 - DNA, 2960 bp, Homo sapiens
agtgggctccctaaggagagctgtggagctctactgaaatatttgtactctatcctttgctccatctggaaactaataaaatatttcctgtgcgttctatgcagtaatgtatcctctgttcctttcagcctccttggaagggctcagcaaaaatcatgctgggaatcatgtggattttcttgcatgtatcagtggaaagggggtgtgaggcagctgttaagagcacagcctctggggccagaatgctgggcccaactctacttactagttatagttgtggagcaagttacttagcatctctgtccctcagtttcctaatatgtaaaaatgggggaaataatactcttcctctcacaaggttgtgatgagattaaaccttattaatgaggttaaatggattacatgagttaacacttttaaatcacttcctatagctttgcatatgctcatttctaggaaactgttctgtaagcttgattgtgaaacatctggtaccctccttggtactcttttcttagtagaaatccctttaggcaattgcattaagtaggttggctaagtgaaattgcatcagagggagatagggatagagataaatttgttaagataccatgtctgacacatctgaggtctaaaaatatgtgactgactgaatagatttattaatatttatgtgtctggagcacaaataaagaaacaaagtgccatcttaataaacagccttaaggaactcttcaaaatacagttctccttaagggagttacagaacactcaggcagtgtgcagtggtaaaaacaagcacacaatacagtagtaaaggcagaaggtacatgaccaggaaaataaaattcaataatgaaaagcacatcattggctgtgaagatattgtcctcaaacttaaataaatctttatgacatctagtttatgaatcagcatttgataatcataacaataagaaagaaaaaggaaatttatggggactaattttataatggagttcaatatctttgcacaaaggtagagttcatcaaatgaaatctatttcagtattctgtcataccaaaaggttttctttaagtccacatactaaattttacatgcttatatgtaatcaagaaaaatcaaatttcttctcagcttaagagtttgctataactgtgcaaatggcaacctcttcttgaaataagtttatgatgaattaaatggccatgattaagatggaaccactagaaaccattttctgcttgagtaaaaatatcaatcagctaccaaatacgttacttccaaaactccgaacattaaatggataaagtagctacgttatttaggtctaacattttacttacctcacacatatgcatgctccaagatatttgcagacgctctaagagcatttagaacaactctgctagccacatgtagcattgaacactagaaatgggcctagtccaaatgaaaatgtgttttaaatgtaacatacccactagatttcaaagaatttgtacaaaaaagagtgcaaatatctccttattaccatgtcatagaatttaatgttgaaataaattttggaatatattaggttaaattaaatatattgttaaagttaattttacttgtgcttttaactttttttttttgaggcagagtttcgctcttgttgcccaggctggagtgcaatggctcaatctctgctcactgcaatctccacctcctgggttcaagcgattctcctgcctcagcctcccaagtagctgagattacaggtgcctgccaccatgtctggctaattttttgtattcttagtagagatggggtttcrctatattggccaggctggtcttgaactcctgacctcaggtgatccacccgcctcagcctcccaaagtgtcgggattacaggcatgagccaccccgccaagctgcttttaacttttttaatgtagctaccaggaaattgaaaattacatttatgactctatttctattgggtagtgctgaccaagatacctagacgaaaaagaaatacctgcaatttatattcagatacagctcagccttcagcattttagttcaaggtgttttatcctgaaaattaagttaaataaaatcctgaaatctaccctcctatgcgatgttcaattaaattataattttcacctgtcactgattgaggctatggggaaggagtgaggtcaagccatgtctcattatgcggttgttccattagctacaacaaattaaaatttcaacaatacacacgggttcttcaggcaccagtcacttcttagcgaattctacccactttccctctccttatccaatgatgacccttcaattatgaaatgttcattctggagacaaatgatttgcttcccatactaaattataaacttctacaaaaaaggataatgtctcagacacactggtatcttctcaaggatgtagcggagtctgcctggcacaaagcaagcccaatggtgttgaatgaatgcactcataaaaggaggaatcattcgtgaatcaatggttttggaggatttaggataagatagtttcatataaaacattagatcctggaaaaagagtgccttgacctaactgaggcaggaaggggaaacccaaatgctttcagtggccaagaaggtaatgggaatgtgaggagtggctggtatatactggtaggaaatggtgtgtgtgtgttgggggtggggggttctgtaactaacttgagagcacatgttccaactaaaagcattgtgacttaacaattttaaaacacatggaaaatgtgatttagctgaacctaagggcttctcttttgctatctctgagcagataaaatctcccctaaaaatgaacacctcaggcaaacaacgacaaaaacaaataaaacaaaaaacaagcaggcttatgaggttttcataaaggacaatcgttgggaatcggtcctttacatcca

SEQ ID NO: 713909 - DNA, 2009 bp, Homo sapiens
gttacagagctcacacaagcacaatcgagatggaaattatggggaattatcatgattaaatgtacaaatgtttaataaaattactttggagtacattgatacaggaaaatatgtatacaaaatgttaaacatcaaatacaaaatatagaatggctaagtatatatcaatgatatgctaatagaactacaaatagacttctattagttttctttagaattttactttttataaaacacaaaaatgctttttgtttgtaacacctaacttttttattaacaaccttctggaaactctttcattgagaatatattccctccagcttccagaaagctttaaacattttcaaatctcttacaaacaaaaaacaaaaactgccttatagtgttttttgtagttaaatgcaataacatattaagtagtagtaaaatattttagtcatatttcttaatccaaagcttatgtactttttactatgtcatgatccttcttttgtttcttattgtaggtagacacttaaaaagaagaaaaatattaagatttcatagactgattacacagcaccaagtccagtgctgttgtaatgaagttcaataagtctctattgaatgagtggaaggatgaatgcatggataaaagaagatgaaagtaagaaataagttgaaaatgaaaggagagctgatttgagaagtcaggagttatttatgaattctgataagcttactggaaatatcttgccataattggaaaatagataactgaagggcagcaggtaaaaaaaaaccaggacatcagggtttttcacacgttttttctggccctaaaattaatatgtatttttaataaaatatccataaatacatataaaaatgtaataaatcataaaaatccatactcccccaacctagaggtaaacattgttaacatattctatactcacatataacaacatatgtggaacccaaagaaaagttggtattttaagctaaatttcattttgactcctttattttattattattattattattttgagatggagtcttactctgttgcccaagctggagtgcagtggtgcaatcttggctcactgcaacctctgcctcctgggttcaagagattctcctgcctcagcctgcctagtagctgggattacaggcgcccgccatcatgcccagctaatttttgtatttttagtagagatggggtttcaacatgttgtccaggctggtctggaactcctggcctcaagtgatcccctggcctcggcctgccaaagtgctgggattacaggtgtaagccactgtgctcggccatgactccttttataatctcaagcacatcacatgttttgcattagtgaatgaggtaagcctgttttctatagacactggtggaagaatcactaagcatcttccagttttgttgttctgttaaaggatggaaacctgggtacagggtatggtagagtcatttgcaaataggctaccatttgcaaaggtaggcttgtagctaagaagaggtttcagtgctgaattgcccagtcaaatagagtgggaaggatcgtattttgatgaagctaaaggaaggaagatgcaaagatgggctgaaagatattttatgacatttatatctaacattgtccttataattgtttttattggcattgcaaaccatgtctatcactcttaattttcaggaaagcatacgtatacatgcattctaagagtctmtgcctgtggaaatcaagtaaagagacaattttccctatcattgggaacatggtatacaagagagaaacttttcattggctggcaacataatccatttactgaactaaaataacgaatgccgtgtcttgtaacttggaaggaccattagaaatgggagccatccctcccccagaagctctatatctttatgctctactgctggttgtaatagattattacactataaattgcgtactgactttttttcttaataataagatttatttataatctcaata

SEQ ID NO: 713910 - DNA, 1155 bp, Homo sapiens
ttttttgtatttttagtagagacggggtttcaccatgttagctaggatggtcttgatctcctaaccatgtgatccgcctgccttggcctcccaaagtgctgggactacaggcatgagccatcacgcccagccactcttggctaaatttctttagtttttgtagagatggggtcttgaactcctgggaatcctcctgtctcagcttcccaaagtgctgagattataggcatgaaccattgcacctggcctatgttcccgttttttaacatgagaatgtgctgtcctggatgtatattgtgatttttcaaaaaatgacttggaatatgtagctggaaactgggatataagtattacaaaggagtaaagcctgggtatggaagtgtaatattttcctgatcttatattgctcagatgcctcaagacagtttcatgattcttacaatgctaacatggatttattctttcttaatatcctggatgaacatagcaatggaaagaggggagtaatgtggacatgtggatttaatgggctttctttttttttctttctgttgaataaagtatggaacagccatgaactctcaacagtgtattgtgtacaatgttagagcaccagccattggaagcctgctgaaaatgtggtcctcatttttggcctggtagctccctgtgtgatttgagaggcccaaagggaaagagagagggagaaagagtgcagacctcrgtatagaagtgccttaaggaataaaactaaattgttatgttggcaaatgttaccttgaaaatcaacaagatctattatttcacttgtggccttcataattacagcttttaatacttatataagtgtacttcagctacagcatcatgatttttaacattttaatatgtatcttcataaacatgccataaatatgttatcagcattgagggcattgctttacttagcagaattacccagtaatcttattttgctgatagctctgagtttctgaaaaatatcatttaaaactcattagcaaaatctcttaatgtatataatgcttcatggtctatttacttattgtttatatcattatctgtcttatttctcttactaagacaattttatcaggacacttaagcactgtaattttctagttactccaatttctc

SEQ ID NO: 713911 - DNA, 736 bp, Homo sapiens
ctagatggctttatttatttatttatttatttttggcaagttagtacatacactgatttgtgttccagatcttaatcatccccatccccgctgaaatgggtgcataccttgaattgtttaaacacccttgcgatatctagggaaatgatgaggattgaatttgactcaaaccgatgactgttaattctaaagctaagaaagagtttaaaattcttcatgtattaatataatcaagtttgtgcagaaagaagttgaagattggtttgttaatccactacttagatgattttaattaaarcatttaataattaatttaaaaacaattaatttaacttgaatttatttaaacaccattttttggtagtgacttataagaaaaacttagaatttaagaaggaaggtgtgtttgagttttgctctgacaatctatcacaaaagtaatcctatctatatttcagcgtctctcaaaatgttatgataattattctgattaaaaaaatcaaactttctaaaacatgttggtgtgtaaggttgatgaaattagatgttctcttagagctctgcatgacaagccaagattcatattggttaataaatcatgatttactaatggaaaaatttcactagggatacctgaagaccaaacttcatgtaaaataggaagattcagagtgctcacaggtattgatgatataacggtcacagtgcagttttcttaatatgaatgggctaggac

SEQ ID NO: 713912 - DNA, 825 bp, Homo sapiens
aataaaaatttttgattctggccaggtgcagtggctcacatctgtaatcccagcactctgggaggccgaggcgggtggatcacgaggtcaggagatggagaccatcctggctaacatggtgaaaccccatctctactaaaaatacaaaaaattagccgggcgtggtggcrggcacctgtagtcccagctactcgggaagctaaggcaggagaatggtgtgaagccgggaggcggagcttgcagcgagcccagatcgcgccactgcactccagcctgggcaacagagggagaatccgactaaaaaaaaaaaaattgattcttcaaattcactaggaattttttggattgataaagaataaaaaggtgagatgtcttgagcaccacagataaaagacccagaacataggataaagtattatatcatgtaaaactggggtctaataacataagttggagacagtaaagctttgtagttaagaatttggactctcactcacactggctaccctcactgtgtggtattggtcaagtcacttaaccatcctgggccttagttccttctgtgaaatgaggagttgatgattgtattggccatatgggtcactgggaggactgactgagataacacatgcaaaagactctgtacctggcacagaattagtgcttgacaaacattaatgacaccaggcctcttttgccctatctgcactgcttctacttggttgagatacttgacattgaaaaccagagtcaatgtctcaaagacagtgaatgaggagggggaagtgcttttttttgccatgttccctctcttttctccctccc

SEQ ID NO: 713913 - DNA, 946 bp, Homo sapiens
ataaaatagggaagaggaaaagcttccaaaagctccttttactggcctggcattctggggatctgtctgttctgctttatccagatcaaacaccctctcacagcaactaaagcagcagcagcaattgcaatgccagttatcatttactgagcacttagtatattcctggctttatgccaagtaccacacaacacattttctcatttcatccttaggacaattccacaatctagacaacaaccctatgaagactgtaagccttcaaaacaattcaggtaagagtctgggaaggaataaaatccatatcaagtataactggaattgccacaggagggaagtagtataaaaggtgaaggatgattttccatcaaagcaaccatctaggagtccaatcctttctcttaacagggargccaggaagcctagaactcaagcttgtttccaatcctactaaacatactacttccagccacctagtgcctgctctactctgtgggaactttctgtttccacacagggagttcacgagtgctgaaagtgtgatgccataagatttctttgagagggagaattagagagtagaagttgggtgtgtgtgtgcgtgtgtgtgtgtgtgtgtgtgtgtgcatgtgtgtgtgtaacacaggagtgcaaaggtacaatattattattaatatctaccacttaataaacattgtgtaccatgggctttacgtacattacctcatttaattcttacaataactctgtgaaagacactgttattatttctatttctaaagataaggaaataaggctcagagagattaactatcatacccaaggtcatacaatgagtaaatggtggaatcaggattcaaacccaggtctgtcagactccaaagaccacattcttagccattaagcaacaccgactctcctctggataggactggagctgaactgg

SEQ ID NO: 713914 - DNA, 946 bp, Homo sapiens
ataaaatagggaagaggaaaagcttccaaaagctccttttactggcctggcattctggggatctgtctgttctgctttatccagatcaaacaccctctcacagcaactaaagcagcagcagcaattgcaatgccagttatcatttactgagcacttagtatattcctggctttatgccaagtaccacacaacacattttctcatttcatccttaggacaattccacaatctagacaacaaccctatgaagactgtaagccttcaaaacaattcaggtaagagtctgggaaggaataaaatccatatcaagtataactggaattgccacaggagggaagtagtataaaaggtgaaggatgattttccatcaaagcaaccatctaggagtccaatcctttctcttaacagggaagccaggaagcctagaactcaagcttgtttccaatcctactaaacatactacttccagccacctagtgcctgctctactctgtgggaactttctgtttccacacagggagttcacgagtgctgaaagtgtgatgccataagatttctttgagakggagaattagagagtagaagttgggtgtgtgtgtgcgtgtgtgtgtgtgtgtgtgtgtgtgcatgtgtgtgtgtaacacaggagtgcaaaggtacaatattattattaatatctaccacttaataaacattgtgtaccatgggctttacgtacattacctcatttaattcttacaataactctgtgaaagacactgttattatttctatttctaaagataaggaaataaggctcagagagattaactatcatacccaaggtcatacaatgagtaaatggtggaatcaggattcaaacccaggtctgtcagactccaaagaccacattcttagccattaagcaacaccgactctcctctggataggactggagctgaactgg

SEQ ID NO: 713915 - DNA, 573 bp, Homo sapiens
tttctatttaactttgtaaaataaaaatcaactggaaaataaggctggttattcaagctaccctcactctaacatttaagtttacaataatataccttggctgattcaaagatcaaatttataatttataatcatatattccaaagtgttttggttataaaacctttaraggataacatagtgaattttttcctctgatcattatattaactctagtgtgctttccaaaatacagatgtgtatgtgtgtgtatatgtgtgtgtgtctgtgtttgcttgtttgttttatttttaaagaagcatcacattgaccgcttaaacatttaaatatttttgtatacttttggaacatatctttatatgtataaatgttatagctagaaataatgacacgatgggtccactggcaatgagcagacctaaaagaagcctcatatatgttctggctttgaatacgtcttggtctattctgtcctgggaaagtactgcttgtaatatagctggtcattactcctcctgcccccagttcaactattttgtatattattttatacattagttctagtctccatgt

SEQ ID NO: 713916 - DNA, 573 bp, Homo sapiens
tttctatttaactttgtaaaataaaaatcaactggaaaataaggctggttattcaagctaccctcactctaacatttaagtttacaataatataccttggctgattcaaagatcaaatttataatttataatcatatattccaaagtgttttggttataaaacctttaaaggataacatagtgaatttttycctctgatcattatattaactctagtgtgctttccaaaatacagatgtgtatgtgtgtgtatatgtgtgtgtgtctgtgtttgcttgtttgttttatttttaaagaagcatcacattgaccgcttaaacatttaaatatttttgtatacttttggaacatatctttatatgtataaatgttatagctagaaataatgacacgatgggtccactggcaatgagcagacctaaaagaagcctcatatatgttctggctttgaatacgtcttggtctattctgtcctgggaaagtactgcttgtaatatagctggtcattactcctcctgcccccagttcaactattttgtatattattttatacattagttctagtctccatgt

SEQ ID NO: 713917 - DNA, 573 bp, Homo sapiens
tttctatttaactttgtaaaataaaaatcaactggaaaataaggctggttattcaagctaccctcactctaacatttaagtttacaataatataccttggctgattcaaagatcaaatttataatttataatcatatattccaaagtgttttggttataaaacctttaaaggataacatagtgaattttttcctctgatcattatattaactctwgtgtgctttccaaaatacagatgtgtatgtgtgtgtatatgtgtgtgtgtctgtgtttgcttgtttgttttatttttaaagaagcatcacattgaccgcttaaacatttaaatatttttgtatacttttggaacatatctttatatgtataaatgttatagctagaaataatgacacgatgggtccactggcaatgagcagacctaaaagaagcctcatatatgttctggctttgaatacgtcttggtctattctgtcctgggaaagtactgcttgtaatatagctggtcattactcctcctgcccccagttcaactattttgtatattattttatacattagttctagtctccatgt

SEQ ID NO: 713918 - DNA, 573 bp, Homo sapiens
tttctatttaactttgtaaaataaaaatcaactggaaaataaggctggttattcaagctaccctcactctaacatttaagtttacaataatataccttggctgattcaaagatcaaatttataatttataatcatatattccaaagtgttttggttataaaacctttaaaggataacatagtgaattttttcctctgatcattatattaactctagtgtgctttccaaaatacagatgtgtrtgtgtgtgtatatgtgtgtgtgtctgtgtttgcttgtttgttttatttttaaagaagcatcacattgaccgcttaaacatttaaatatttttgtatacttttggaacatatctttatatgtataaatgttatagctagaaataatgacacgatgggtccactggcaatgagcagacctaaaagaagcctcatatatgttctggctttgaatacgtcttggtctattctgtcctgggaaagtactgcttgtaatatagctggtcattactcctcctgcccccagttcaactattttgtatattattttatacattagttctagtctccatgt

SEQ ID NO: 713919 - DNA, 573 bp, Homo sapiens
tttctatttaactttgtaaaataaaaatcaactggaaaataaggctggttattcaagctaccctcactctaacatttaagtttacaataatataccttggctgattcaaagatcaaatttataatttataatcatatattccaaagtgttttggttataaaacctttaaaggataacatagtgaattttttcctctgatcattatattaactctagtgtgctttccaaaatacagatgtgtatgtgtgtgtatatgtgtgtgtgtctgtgtttgcttgtttgttttatttttaaagaagcatcacattgaccgcttaaacatttaaatatttttgtatacttttggaacatatctttatatgtataaatgttatagctagaaataatgacaygatgggtccactggcaatgagcagacctaaaagaagcctcatatatgttctggctttgaatacgtcttggtctattctgtcctgggaaagtactgcttgtaatatagctggtcattactcctcctgcccccagttcaactattttgtatattattttatacattagttctagtctccatgt

SEQ ID NO: 713920 - DNA, 593 bp, Homo sapiens
cccagaaaaatacacatattatttaaaatattaataatatattaaaaaccatcttaaagaaattaaaaggaatatgaactttcagaaataagagatcaatttagagatacaaaggtaatcaaagagaagataacacagaggagatgacaaaattgggagaaaaaatgagataatttggaagaaaataaacaatttaagaatagaaacataattagagaccgtaaaaagcagggttactataatggacaaaatttcctttagagtttttgttttgtcttcaaagaataatgatataggaaaatacaattttatttatatctgattatatgtcacagtctgacaataattatctctaggttacagtatatgtataacatattttattcatttcacagtttttatattttccaaattttaaaaagacaatatatctgataagaaaaatgcaatgamaaaattttctttttctctttcaacttctattttagaatcggggggtacatgtgcaggtttgttacaaaggtatgttgcatgatgctgaggtttggggtgtgactgaacccatcatccatatagtgaacacagtacccagt

SEQ ID NO: 713921 - DNA, 582 bp, Homo sapiens
gtctccagacttcaggctcagagacagcagctgagagaggggcagygagagtttgcagaaagcagaaaatcgaaggttatatttaaagaccgttttatgtaaggacacatagtccacttcctccttcagaaagcccagcaaaccagtattttcctccaggcaaaaacagcaatggcaacaaaacaaaagcccagaatgttcttttttagagaaattgaacaaatatttgggaagaacttgggctgttagtgtgggtgttatcgccctggagtgaagcccttcacattctatcatttagatagccttcagtaaagctggctcttacttcctcaccctgttaccctaaagtgaagcttgctagttgataagttctgctcctagtcagccttatatttaaggatgtttacctcctggaagataaagtagaagataatcacaaaaactgacctctgaagaaacaaaattcagggaactgaagataattttaaaatgatgacaactctagtgttctctgaaatttaagaagatactgaaagctattgcctccataaggggagaacaaaatgctatgaaaatgaaaaa

SEQ ID NO: 713922 - DNA, 642 bp, Homo sapiens
tgcccatggtccacttcgtactaaaatccctttaccctgcctgggtctcctccctcactctcctcctgatttcccgttccattttcacccaagctccagctcttcctggagatgcctccctccagagcaacagcttctcaacaggcaatgtagggatggaagagtcttcatcttaaacacaagctctgctggccaggtgcggtggctcatgcctataatcccagcaccttgggaggccgaagcgggtggatcacctgaggtcaggagtttgataccagcctggccaacatggtgaaaccccatctctactagaaatacaaaacaattagctgggtgtggtggcacacacctgtaatcccagctactctggaggctggggcaggagaattgcttgaacccaggaggcggaggttgcagtgagccgagatcatgccattgcactccagcctaggcaacaagagctagactctgtctcaaaaamacacacacacacacacacacacacacacacaagcactgctatactggacgtggctgcctggggcagtgtggaatgagatggtctgacgtcctcactcagtaagaggaacggctgggatcagttagtgatgtctgctgtgggtgcggtggtgaggagtggca

SEQ ID NO: 713923 - DNA, 1417 bp, Homo sapiens
tggtcactccccatctattgtatggagaaggcgaccaaaagtggcctccgtgggggttctgcatagaaaatacacacatggagtgtcaatgaccttcagggtactgacttatgaaaccccaagaaggagacaccatcatattgataggacaggataggacatttgctaaagcaaccacttgctcctatacttctccccttctgagtagwgaggcttagctaagtaatacatgtgatcaaaagttgatttgttaaattaaacatagggccaggtgcggtggctcatgcctgtaataccaggactttgggaggctgagacaggtggattgcttgagcttaggagtttgagaccagcactggtcgaatcctggtgaaaccctgtctctacaaaaaatgccaaaaaaaaaaaaaaaaaagcacagtgtggtggcacatgcctatagtcccagctactcaggaggctgaggtgggagaataggctaagcctgggaggcagaggttgcagtaagccaagatcgcaccactgcactctagcctgagtgacagagtgagaccctgtctcaaaataataataataataataataataataataataataataattaataataataataaaataagttaaacatagagttcccttacaactgaataattctcctaggtatgtacccaagaaaattataaaatgtacatttccacaaaagcttgtacacaaaggtacacagcagcattatttacaatagccaagaaatggaaaccacccaaatgcccaagagctgatgaatggataaacagcatgtggtatattcatacaatggaatctttttcagccacaacaaggaatgaaggactgatacaatatggatgaaccttgaaaacattatgctcagtgaaagaagccagtcacaaaaggccacatattacatgattccatttatatgaatatttacattaggcaaatccatagagccagaaagcagataagtggttgccagggtctgtggttaggagagaattgagagtgactctaccaggcatgggagttttttttttctaggatgacggaagtgttctggagctaggctcgggctctggagccaggcagcctgtgtgaaagcccaggtctcattactcattcgctttgtgactttgagccatgttcctacctcttctgtgcctcagtttccctttacaatgacgatgataagagtgcctgggcttgttatgaggattcagatagttaacatatgtaaagtgctcaggagaatttctggccagtggtatatactattttttttcccattataatgtttatgactttaagaaaattgatatataatagtcgtacatattgttggggtacatgtgatattttgaaacctgatagctattttgaaatatataataaatta

SEQ ID NO: 713924 - DNA, 658 bp, Homo sapiens
atagacattggggttatttctactcttttggtatcataaatagtttctgccctaaggttttgtattatatgtatatatattcacatcttaaatataagtaatttctactatgtggaaatattcaagatgagcctatgccatcttgtaccaaatagcaggaaagctatcaaaaactgcttgggttgagtcaaaagatgtcaggaaccaatttgaagatgctatcacagaccaatgaggataatttaagcattaataagaataataaataatatgtacagaagcacattaaatacatttcaatgaatgagttcaaattataattacaatagagaaaacaaaagttacttaaaaataagacaaagcaaacaccattggcacatgccaaaaaatcaacttaaggaatgataggattaaaatattaccatttttacaatccttaatgaactaatggatctaggtaacatcacwaaagaagagatttttatgtaccacctaatggcaaaatactccactccctaggaagcagtcttgccaaaaaaaaaaaaaatatatatatatatatgaatctgattaagcctgtacagaggaacatgttgagctatatcataggaatgcaatcagaaacatccagactgtgggaagttctacaggacaaaca

SEQ ID NO: 713925 - DNA, 658 bp, Homo sapiens
atagacattggggttatttctactcttttggtatcataaatagtttctgccctaaggttttgtattatatgtatatatattcacatcttaaatataagtaatttctactatgtggaaatattcaagatgagcctatgccatcttgtaccaaatagcaggaaagctatcaaaaactgcttgggttgagtcaaaagatgtcaggaaccaatttgaagatgctatcacagaccaatgaggataatttaagcattaataagaataataaataatatgtacagaagcacattaaatacatttcaatgaatgagttcaaattataattacaatagagaaaacaaaagttacttaaaaataagacaaagcaaacaccattggcacatgccaaaaaatcaacttaaggaatgataggattaaaatattaccatttttacaatccttaatgaactaatggatctaggtaacatcacaaaagaagagatttttatgtaccacctaatggcaaaatactccactccctaggaagcagtcttgccaaaaaaaaaawaaatatatatatatatatgaatctgattaagcctgtacagaggaacatgttgagctatatcataggaatgcaatcagaaacatccagactgtgggaagttctacaggacaaaca

SEQ ID NO: 713926 - DNA, 658 bp, Homo sapiens
atagacattggggttatttctactcttttggtatcataaatagtttctgccctaaggttttgtattatatgtatatatattcacatcttaaatataagtaatttctactatgtggaaatattcaagatgagcctatgccatcttgtaccaaatagcaggaaagctatcaaaaactgcttgggttgagtcaaaagatgtcaggaaccaatttgaagatgctatcacagaccaatgaggataatttaagcattaataagaataataaataatatgtacagaagcacattaaatacatttcaatgaatgagttcaaattataattacaatagagaaaacaaaagttacttaaaaataagacaaagcaaacaccattggcacatgccaaaaaatcaacttaaggaatgataggattaaaatattaccatttttacaatccttaatgaactaatggatctaggtaacatcacaaaagaagagatttttatgtaccacctaatggcaaaatactccactccctaggaagcagtcttgccaaaaaaaaaaaawatatatatatatatatgaatctgattaagcctgtacagaggaacatgttgagctatatcataggaatgcaatcagaaacatccagactgtgggaagttctacaggacaaaca

SEQ ID NO: 713927 - DNA, 2550 bp, Homo sapiens
ttttttttttgaaatggagtctcactctgtcacccaggctggagtgcagtggcacaatttcggctcactgcaacctccgcctcccgtgttcaagtgattctcgtgcctcagcctccggagtagctgggattacaggcgcgcaccaccacgatcctcggctaatttttgaatttttagtacagacagggtttcaccatgttggccaggctgttctcaaactcctgacctcaggtgatctgcctgcctcggcctcccaaagtgctgggattacaggcatgagccaccacaccggctagaaaattaactaaaacaagcatttttctacacttgaacagtggctgctggcgatttttttgttggttttcaatcttccaaatgtttgcaatgtggttataaattttttaaaagcaaagcaaaacacccaaaggacatgattcttgttggagaactgttaccacgggcctttccaagaggcaggcacagaccactgttggcaaagatggactggtgctttggatcgtgggcccctctttgcctttttcacagctttctgtccaaggccctgctgttccaaagaccacaccaggttgtgcccagactccctgtggagctggctccccagacacagccctagaccctggaggatccacttctccccagaagctggactctccctctgcccaggggactccagacccgtctcctcttgccaaccccaggtgctcgctcttggctgcaccctgctgctcctcaaagagctcctgggagaggagagtctggcctgggcccagcccagccctgcctgtctgctgagggggcagggtggggcgcacaaatgagacgctcaactcccatggctctgctgaaagaagccaggccctcaggcactgggagaaaagtgcctttgggggtggcaggggcttggaatcagcatcaccaaggccacagggacttcgtctgcaccaactctctggcttagggagcaagggtcagccacattctctcagatcagttaaaaccatgatgcctctcacctcccaggatgtagatcagaaagtgagtgaagggggaaaggcactccagacttaaaaaaacaaaacaaaacaaaacaaacccaggggaggacccagttggcctagctggggtcaaggacccaccccttgggcagtcaactgtagtacacgggttctgtgatgaacacccctcacccccaacatgaaggcctttgatgggcttcatcctaaacgaggctgagcagacaaagtgagtgtcccagggctggatggggaccggaatatgactgccccagaacctggctcccagggctgcagcagtgtccatgcctggctccacccccaccagggtagacagaaaccacctgggctctgcacacagctgcactgcgcttcctgcagccaggtattgtggtggggacattggagatggggcagcgcctcagtcaggccacctgaccagcgcacagtgaccccagcactgcaggtgctggtgggtataccaccccccagaagacagggctcctagaaggcctcaaggtggccaaagttcctggaactgccaaagtcccttatcgccaccccttccacaggaggccacagccactttctcctcctccgccgaggctggggaggtgagagaactctgctctggccaacgccctggagacggcctcctgctagtgacggctgggccctgactggggcaaggaagagctctgggccggcaggyggctgggtcgtaaaagtgcatgcacctgctgggcatccttgggccctgcaggctgcacccagccccaggctgacatcctgttctcagtcccagcgaggagccttccctcctggatgcttgaaggttccagcctgctatggtctgaatatgtcccccaaatgtgtgttggaaactcaatccccaaagcaacagtgttggaatatgggaaatgtttaggtcatgagggctctgcactcatgaatagattaatgccattctaaaagggcttgatggtgccattgactccctcatcaagaagggagtttggtttcattttgcccttccagcttctgccatgtgaggacagagcgctcctccctctagaggatgcagcattcaaggcgccatgttggaagcagagagcagaccctcaccagacaatggacttgctggcaactcactcttgaacttctcaacctccagaactctgagaaaataaatttctgttctttataaattacccaggctctggcattttgttacagcagcacaaagtgggctaagacatggcctcctcctggacgtacgggtgaagcactggtcatctctgccaagcatccctgcccataaggcccagctccccccacagccaaggcctccccatgcacatggctcgtgtccacagacaccttgctggagagcacgtgaaaaggcaggtgctgaccttgcccaaatgcccacatgcccctgttcagtagtggaaacccacattctccccttcaggccaggctgggccacgaagaagtcaggccttgcctgtcccct

SEQ ID NO: 713928 - DNA, 637 bp, Homo sapiens
ctctgcctaattaggtcatgctgattttcttaggccccaatttttagctttattttcatggcttttcccagactgcaaagcaccagaataatctttgttgtcctctgtctcagtgatattctggaaggatattattcactaagaagtgctctgttcctttggatttggttagattctccacaggaactattggctgtccagcttgtccatcggaggctgtgtctatgtgacactcaattcctgtagcaggtttgtctaccgaagggcagacaatagagtgattttacagcaaagtgatcaagagattagatcatgtgaagacatcaattcatcccmccattaataaagaatgctaatgtttttcatttcctcagactccatttaaatgatcaatataataacagttatatccagaactcgtgttgttgttgttgttgttgttgttgttgttgttgttgttgttttgaggcagagtttcgctctgtcgcccaggctggagtgcagtggtacaatctcggctcactgcaatctccacctcccaagttcaagctattctcctgccttaccctcctgagttggctgggactagaggtgcccgccaccacacctggctaagttttgcatttttaatagagac

SEQ ID NO: 713929 - DNA, 657 bp, Homo sapiens
attagtatgtggtatcatagaaccacacgtggtagatgtaaaaactcaaaatatactgaactgattcaatttcaaatccagaaaaaatagtgttaacaatattagaattgtaaatctggtcataatatcatttaagtgcaaaaataaaaataaaacatttcagaaataataaataaaacatttctgattcatccaaagatatgcccatgtaaacaaatggtattttgattagagactttttaaattagcaaataaatgttatcttcagattctattttagacagtaraaagaaatattaaaagtataaatcatagatttttataggccaatataaaagtaaaataacctaaataatgtgataaaaatgtacaggaaaaaaattgaaaaaatacacattttgcttaattttcaataaattttacatatttctcaataaaattttgtgataattcaaaaagttttttatacaattatttaagatactaataacatcaaatattttcccacatgttgctttaaaacagtccccattcctagaagtagggttaataaaaagctaaaattaactggggtctaaatttttatttgcgtatctttacagactgtaaggccaaaaaagcttcataaacttaaaacacagttttagaaagtacttg

SEQ ID NO: 713930 - DNA, 596 bp, Homo sapiens
taaaatatatatatataaaatatatatatawaatatatatatataaaatatatatatataatatatatatataaaatatatatatatatatcgattatatatataatatatatatataaaatatatatatatataatatatatatatataaaatatctggatacctggatatagatgtccagatatattttccttcctagtgtaatatatacatacacacacacacacaaacacacacacacacacatatatatgtaagttacactagggtagctagctaccatgtctcacctcttgtccctgtttttttgtttgtttgttttttgagacaagatctcactctgtcacccaggctggggtgcaatggtgcgatcacagctcattgcagccttgacttcccaggatcaagcaatcctgccacctctgtctcccaagtagctgggactacagatgcagaccaccactcctggctaatttttttctgtagagacagggtctcactatgttgcccaggctggtcttgaactcctggggtcaagcaattctcctgcctcagcctcccagagtgttgggattagagatgtgagcctttgcac

SEQ ID NO: 713931 - DNA, 641 bp, Homo sapiens
atattaaacacagacatttctgagctccaaagacatacctacaatatttgcttagtaagtgttactaagtaaatgttacttactcttggacacctttcatacatctcaattttaacatgtctggatttgaactcattttttaatccctgaaatctactcttcatttgtatagtctcagtttccccatcccccattctcccaattgctcataacagaaatgctaatgttgcccttgactcttgtctcttttaaaatacctgtcaaggcattaccttgtagatgaaccttgcaacagtctacttcttcatatattcattgctatgcttctggctcagctgccaccatctccttcatgaactatagcaatagcctcccaactggacctttactttcacccacactcgtgccttcatcttgctttgctcatcctctcaatttttttctacgtgtagaccactagtctttaaaaatgaaaaatwagccgggcatggtggtgggcgcctgtaatcccagctattctggaggctgaggcaggagaatcacttgaacctgggaggcagaggttgcagtgagctgagattgtgccactgcactccaggttgggagacagagcaaggctccgtctcaaaaaaaaaaaaaaa

SEQ ID NO: 713932 - DNA, 641 bp, Homo sapiens
atattaaacacagacatttctgagctccaaagacatacctacaatatttgcttagtaagtgttactaagtaaatgttacttactcttggacacctttcatacatctcaattttaacatgtctggatttgaactcattttttaatccctgaaatctactcttcatttgtatagtctcagtttccccatcccccattctcccaattgctcataacagaaatgctaatgttgcccttgactcttgtctcttttaaaatacctgtcaaggcattaccttgtagatgaaccttgcaacagtctacttcttcatatattcattgctatgcttctggctcagctgccaccatctccttcatgaactatagcaatagcctcccaactggacctttactttcacccacactcgtgccttcatcttgctttgctcatcctctcaatttttttctacgtgtagaccactagtctttaaaaatgaaaaattarccgggcatggtggtgggcgcctgtaatcccagctattctggaggctgaggcaggagaatcacttgaacctgggaggcagaggttgcagtgagctgagattgtgccactgcactccaggttgggagacagagcaaggctccgtctcaaaaaaaaaaaaaaa

SEQ ID NO: 713933 - DNA, 1490 bp, Homo sapiens
tggaaggtgattcttgttcttaacagatgccccccagtgaagtttcaggcaggttttcccagagtgaattcggtgtcctattattcaattccgcatactcacaggccgcacagtctttcctagatgtgcctaagtggcataagccacaaaagttaatccctttgtccttcttgcccctctgaaaatttaaatattgcatgcacatttagaaaataaaatttcatttcttgaataagttacttgtaattctgagttttgatagtgtcattttctttgagaacttttggaggaggttaaaaagttgtctctggtttaaagtagaaaggtaacagacacaatcataactaaacttatttaatctaaagagcaagatatacccgaaaatgaggctctggcctctcccagtgttcatactctccctctcaactccacgtccagatctcagacccactgcagacatcccccagccagatctcctgatctcatgtctcctgatagtaagataccttttattatttgatacttaatttgattagtagttgaggttgtatctggtttcttctcttctgcttccacagggttctgtcytctggctgctcctcagcatctgcccagaccctgtttgagacacttctcacacctagtaaacatgggccagaggtgtgcacccaggttagctgacggtaacgtgcacactctccatgctcaggttctgggctgcttgacctgaggttctatgtcctctttcttagcaagaagccctttaaatgcactcttttttgataaaggtaaataaaacatcttcaggtcaaagtaggacaattttttatttaataagcttgttgggaaaaccatgtgtcatacattgattagttcacatgtgtaccattaggctacagatcagaattatcacattttccagagtaataaattcttgaaatgtgtctacctcctctggacaccagacattacatacattctgggaaacttcaaaggacctttctcttttcatttgcttcagcccagagtggcaaaacccacaaaggtaagactctagatagttatatttccctaaatcagattgaaaggtttccctccagtctttatccaatgtgaccagcagaacactgagagccctgttctctagtcttcacaggctgaattaggatgtaagctgtttacccacactatgcaatgaaacaatggagaaacccatgagaagacaggctcatggcatatgagtacatgttttaattttcaaatgatgggaggtgtaaaaacagcaacacattttaccccgagggggtacagagccaaaaattccaaggccatctgccatatacaaattcatagcaaaatgaacagctgtgggagttgcttaggtggaagttttctagaaagatataaacgttttggtcaatattctttgcaggtggaagtaagcattgttttagatgccaagattcttgtacctatagtcccagctactc

SEQ ID NO: 713934 - DNA, 1315 bp, Homo sapiens
gtagtttcttttttttaacatgtcatatagcttattgcttatttctgaaaaaaaaattgtcttggaaccttccaagttgctgcccactctgaaatgttttactctatacagcctttgtttggggcatgtaactttctttctttttttattattatactttaagttccagggtacatgtgcacaatgtgcaggtttgttacgtgtgtatacatgtgccatgttggtgtgctgcacccattaactcgtcatttacattaggtatatctcctaatgctacccctcccgcctcccccaaccccacaacaggccccggtgtatgatgttcctcttcctgtgtccaagtgttcttattgttcaattcccacctatgagtgagaacatgcagtgtctgctttttttgtccttgccatagtttgctgagaatgatggtttccagcttcatccatgtccctacaaaggtcataaactcatcattttttatggctgcatagtattccatggtgtacatgcgccacattttcttaatccagtctatcattgttggacatttgggttggttccaagtctttgctattgtgaatagtgcygcaataaacatacgtgtgcatgtgtctttatagcagcatgatttataatcctttgggtatatacccagtaatgggatggctgggtcaaacggtatttctaattctagatctttgaggaatcgccacactgtcttccataatggttgaactagttcacagtcccaccaacagtgtaaaagtgttcctatttctccacatcctctccagcacctgtttttttcctgacttgttaatgatcgccattctaacttgtgtgagatgatatctcattgtggttttgatttgtatttctctgtggtataatatatcttaagagtcttgtgtctgtcattacaacttaaataaacttattagaattgtaaacttaagcatttacatgtattttacctagatattgaagtattcagtctttagaaaaaatgataaagagggggaaaacattagtacaaaataagatatactaacaaaagtttgaaacgatacaaatgaggcaatttaccagttacctaagaatgcacaaatgcattaaactaacagggatgtgttttaatagctgtgatattttaagaagtgccgatacagctattccatttcttattcaagtatctctaaggcacttctaggtacacataactgggagaaaattttaaaaaccaaccaaacaaaagaaaacttttcctatctgttccaaacacacatgacagacagattaaaatctattttatgtt

SEQ ID NO: 713935 - DNA, 615 bp, Homo sapiens
caaaagtagtgagacacggactgaaacaggatgttagttttctgaaggagcagatacatttaagcccagcttcatgcagtggaaagggcacaggactggggctaaggaaatgtgtgttctacttagagtgaccaaggaatcagtcaaattcttttttgagagttaaggggaatcatttaataattatgttgaggtaatacgtgtgaactagaacgatccttggcaaatcaggaccctaatttggctcaagactagtcacttaataattctctcatctcatgtgattctcttagctttctcggatctcagtttccttatttgttgcaattcttgcctgtaaacccttaagagtgctaagagaataaggtaagagaacatatgataatgaaaggttggaaataggaaggtgaaaatagtcatttggtagcattgttctgatgaagagggtaaagctaattctcccataaattatttgtgtttcccctgttgaccagaagaatgaagaataactgagacaaaaattctatttatttcatagcatgatgtggccacacattctaaatgttaaagccttagttttgggttaggagyttacattttagcaccaagtttccc

SEQ ID NO: 713936 - DNA, 3683 bp, Homo sapiens
cggagtggcaaggtttaagaagaacatatgggattggagatattttggggccatctttcaaaatacaatctgctgcagatcccaaatcacaaaagagggagacaactatatgtagctaccagtaggagggctactctagaggatgcttgagaattattgctttcatcaatctgagacaaaattcacacacatgagctagaatatcatttccaaatgataggttggtaggatttgggggaattttatggagtagagaaaaccaaacttagatgataattaacaataaatattgtctgtatctttatggcttaggaaagtttcatgtctgtaaccaggaactcactactttttatttttgttttgaacatttcttctcaattcattccttgcatgagattttgtccccattttgaccatcatacttgtttgcattctcctgcttttgtctttaatgctttaatttggggatatatatccatatgtctatggatacatgtatatggatatgtatgatttggggatatatatccatatgtatatacatatgtatgtgtatagagatagacagatgatagatagatagatagatagatagtagattcttctctacttgcaatggggtgatgtcctgataaacccaccaaaagctgaaaacattatcaactgaaaaattatggttatttagccttgtgcccatgggctaaagaaaaactgtggctcatccagaatcataagagcttatcctaacctggaaaagatcaaaattcgaaattcaaagtacagtttctactgaatgtgtattgcttgcaccatcgtgaaaacaataaatcacatggcaaaccctcataagttggagacgttctgtgtgtacacgtgcgtgtgtgtagtttgttcgtttgcttttttttttttttctgttttcctgataactttagtttctatggacagcatatttagttctcacctgctcatgctgcctcaggttttctgatgatagggtgaagaagaaaatgcctctgtggcctaagttctgacccctctattaagtccaaaagcccaaaaccgtatttctggacttccaaaagtccagaaataaagatacaaagaagaaattctgagcgggcaaaatgggtactgcattgttgaataaataaagggaaagttctaagcagagtttaaattaactaacaatttttttgagacaagaccacattttggaaattttagaaaattgttttaagaaagaacatgttatggtatttattttgtattgaaaatagaataacagaaaagcttagaggcagaggttagaatctatagaaaattctttagggccgggcgcggtggctcacgtctgtaatcccagcactttgggaggccgaggcgggcggatcacgaggtcaggaaatcgagaccatcctggctaacacggtgaaatcccgtctctgctaaaaatgaaaaaaaattagccaggcgtggtggcgggcacctgtagtcccagctactcgggaggctgaggcaggagaatggcatgaacccccgggggacggagcctgcagtaagccgaaatcgcgccactgcactccagcctgggcgacagcaagactccgtctcaaaaaaaaaaaaaaaaaaaaaaaaaaaaaaaaattctttagctgttctctaaatttgataaaaattattgagagtctgccaggtgccaggttccatgctaggttcttgagacagagcgagaagtaagatagaaacaagcatctggtaggcacttaaaatatatgttgaaaattacatgatgcagtagagcctgccaattagaggctcatcctctaattttggagatgtgacagctttttatgggaattaaaaggccaaagaaagctgaaggtcaggtctagacacagtccaaaggtgaaatataattaaaaatgctcgcttgttcaacaatatccaggttgcctgtttgctcatagttattagatgattaagtatctgtaattcagttaagcattctaagctgcagaaaatgctataaaccagtgggtttttttttcattttcattttctatttttgaaatagcgtcttactctgtcaccatggctatagtgcagtggcgtcatcacggctcactgcagtcttgaactccttaaaccagtggtgcttcaaacctagctttttctcagaaaaactaggcagcttaaaagtgatactgaccaatgggtaccaaactaaatcactcaaatcagaatagctattggtatggccagaatggatttttgtcaaagcttcttgttatttctagtgtgcaaccagcactgcaaactcctgacctaaccaacttgtgttttctctttccccttatgtgctatcccatctgccaccagatagctcttggtaagatgttacctggtgtgttagtccgttttcatgctgctgataaagacatactggagactagcaagaaaatgaggcttaactggacttacagtttcacatggctggggaggtctcagaatcagggcaggaggtgaaatgcacttcttatatggtggtggcaagagaaaaatgaggaagatgcaagagcagaaacccttgataaaaccatcagatcttgtgagacttattcactaccatgagaacagtatgggggaaactgcccccatgattcaaattatctcccacagggtccctcccacaacatgtgggaattatgggagtacaattcaaggtgagatttgggtggggacacagccaaaccatatcacctggttatctgaattctgatcaagggcacttcaggaatttgggaaattttcaggtactgttgttctcaaacgtagctacatattgaaataacctagagaattaaaaaacagaaactcacttatgcctgagtgctataccctcctctgcttacaagtatgttcagttcatatggggtatggcctgagcataacaatgtctgaagcttcataaatgactggtgtgtggtcaagttgcagaaccactgtgctagaacatcctgatgataaagatctgactgtcagttcagatacaatctaaatatagagaaattcttaacagaggatgcagagtaaatgacttcaggtggaaagcacgtaaagtaaatgtgagaagaaggtcaggtggtgagtgtggggagctggggaaagcatgctcctgggctccctccaacagaagccacctgtagcctgggaccagtgtgctagaggaacctgttttcaaagaaagccagaagtatggatgcatttttatttgcagcctgatgatttttatattttggcaactaattcactttattaaaaaatactgaataagctcaagaaatctgtgagctggattcagccaaagcgaatgccagtttatgactttcctcttggaaagaaaagtctttcatgttgatgtatcacattttcgccagcttttctggggttatgttctcagaagtttcgtttagtttgctctcatgaamggtgacggtaatgttcctcagctacttataaacatttgaagaaacttttcctctgtattcttagttttatactcagtgaaaatataagtcaagtattcataggtatttcactgttagatcaccatattgaggaatgagtgttagttcattaatgccgtacacaaacacccaaaccaaaatgtgcagtgcttg

SEQ ID NO: 713937 - DNA, 1204 bp, Homo sapiens
ttctatactgccagtgcctgctcaaccaagcaaaatactattttaggtataatgtgctaactttacccaaaccaatagctgtgattatttccaaagattttcttcaaatacgtttattaagtgtacatatacagtcctaaattaataggtaaataaaataatttttcagatgggaaaagtcacattaaaagataggcataaaacagaactgttaaacaatgacttaggccctttttaagaaaaatcagtaaacacacctctaaatcttgttcagggcctattcaattatttgacatcgttgtcatgctgtatgccccagaagcaatttaccctgtagcctctacctcacccagaccaaatattcagcaccccatgtgttgactgtttactatcctatattagaattagaatttctatcctacactagaattctttttcttcaactattatgttatactattaaggttaaattaatatatgctaaagtgttaatggatatactctattactctgatcaaacattgtcaattcaatgtacggcaataatataaatgagaaatcatgactgaatatacaattgtagacattgtagtcagtctaatgcagcctctggatttaaaattttgtgtgaattgtttgctagaatttcactatatctactgtaccaaacaaactacttgctcttaataattgtaaaatatgttcaggtgcatcttcaaacacatctaatgaccgtgtccaataatctgcagattttggtaacaaaattcagcaaagccacatatcgtcagtcattaaaagaatacagactatccagatgaggtaattgtccccctacaccatatttaagacaataaatgcaatttcagtgctacagtccatattatttgaactcctactatattcarggaaatgtaattagtatgcagggagtacagtgataacagaatataaccattatcttcaagaaaataagtctatacagctattgtctgttcaaccaagaaaaatactattttaggtacaatgtgctagctctaccaatgccaacattttatactttgtgaatatttccaaattgaaaatttacattttttaaacccctttaacaaaatggcctttcatacatgatcccatgtatctcatatgctcaatgatgtatgatgcattacattaaataagaaacttctttgatgtcacattt

SEQ ID NO: 713938 - DNA, 637 bp, Homo sapiens
catatatattatctatatttgactcataaccatgagaccatttttctcttagagcgttcttcatattttatagttgttattttcatttaaattttgttttatttgctatttttttaacatccatgactctacstttggatgtcaagaacaaattcaattctgagagtatgaataaaatatataatgatgaattatattaatagaatgaataatattaagctatatattaatacaataaagtgtattgatgtgccaacaatagggaagaagaacatatgattaccataacttcaaacaaaaaatcatttaaaaaatttgattcaatactcattcataattgaatacacacacacgcacacactaatcctcctgaaatcttgaagcacagaatacttcttgagcattggaaaaaaaattaagttcaagacacacggcaaaaaaaaaaaattgatggtaaattataaaagcattcttactaaagtcaaaagaaacataaaaatgcctgtctgtataattacataattttaggtttttaatcaatttaatatgacttgaaacagaaataagagtttaatgttgaaggaaacacagacaacattttgaccatctttagatgacataattatatgctttgaaa

SEQ ID NO: 713939 - DNA, 590 bp, Homo sapiens
agctaactgtggatagggacaaacattagttttaccaggtggttatttgttaatactatgtgtgcaaaggaagctgaawattcagttttttacaaaccttactcagaaaatcatttggcggaaaccagtggcttcaagcatatggccactttggctaccttattctgcaaatacatggagtgatagagtaaaaacttaagtccaaaatcttggaaaagcagagaggagcttttggaaatggggaaataaaaaaaaaaagaaagaaagaaaaagaaattgaaatcttccagagtgaggagtctcaaaatgtaccaggatttatgttgaaaaccctggaaggtcactggtaacctggaggttgactgagcctcatgtggcatgagacccatacccttctattgaattaaggtggtcgccaccactgtattggcttagtagtagaaataatggtgaactcattctctaaaaaagataacaaaatcttgagcaagtgtaaaaagtgaagatataaacaatcaaaaatatttaaataggcttagaaaaaaatggtagcagcttgaaatagactcttcatctttactgggaacatc

SEQ ID NO: 713940 - DNA, 1252 bp, Homo sapiens
tgattttcatagtcttgactcctatttaaaatttttttcaatgttggatcttttaagatcaaatatatgtagataaagggaccataaaatatggagacatttatgaatacatttttgcttgcaaaatacatcaataccacattaagtttgtatacgggcctgtattttaagttagccatttattagcttcgcacccaatgacactagccaaaaacctaagagtcattcctgcctctgtcttttctttcattctataataaattataacatttactctttattttacctaataaccatccttaattttgtcatttttaatctccatcgccaccatattagtccaaattaacataatctctcacttcaatcattcccatattcttaaaatgcaaaattgattatgtttatcatgctgcttccatcatttcaagggcttcccagtgctcccagagaaaaaagcgaaaactcaaattcagcctaaaacggtcctataattttatcctaattactttttaatctttatcccaaatcatgtccgatctgctttcctgcacactcccagaattagcattatgttagtttttttgtatttaccatgatataccttgcccaacatacattgtacctctgctaaaatgcccttctgtcctcaatcaaccaattccttgaaatgattacattgtgccttgagtattacatatttagaaaagtttctcttaacctttctttctgggtctaaacctcatctcaaggtactcttttagtagtccttagaacagttggaaacttacatttgtattagcagaactataattaataactgtctatttatacagtaagtaagtgacatgaaagcatggaccatgtctagtcttacttaaaatcttgtgaacattgtctaactcatagtagtcacacagaaaaaaaaattgtagaataaacrtataatctttgctctaactgaactagcatatatcacggctaagcctccaatcattatgaacaaacaatgtttagttaggctccggttctggatggtaacacagctcctgtgataaagctgcatagcaaccaatgccaaaaatctagtaccttccataaaagcaatcatttatttaatgcttatggatctgtaggtaagtttcaatttgattaaactcaggtaggattacctgggctctgttgaactgggataaactactggctttgagttatgtgtagatctgctacaggaaaatcttcattctggggc

SEQ ID NO: 713941 - DNA, 1433 bp, Homo sapiens
ttactatctggttaagaattacccatttacctgaactctgacttctactcagaatacacatttcatcccatttcattcactttgatcctctagatataaacattcctctgacccactttgattactgtgtttcaatatttatctctggaatatacctccagctatgttaatgtatactggatttgatacggaatggcatgatcctgtcttttgagccaatactaacgggtagttgccattgcatttcctgctgcctatccccaactctgctgatacattcagttgaactattggtaagaataaaacggtccaggaatcagaaaatacacttaaatgtgctccagctaaagtagtagtatattaatttgggtgttagaagagaaattttaaaaaatataataattatgccataggtttacataaaatttgaactgcatcccagtagtgttttcccagttcctgacagtgacgmgtttctagttagcctttactatagaaattctagcatcacagatattttggaagctatgcacaaactagtcctactagaaacaaaacaacatcaatcatcaattaatgttatttaaaaaaataatttgactgtcttaaaaatgaaacttgatttcatatatatatattatgtacatattatatatattttatatatgtatattcactttgatcctctagatataaacattgctctgaccaaatatatatatgtgtgtatatatatatatgtgtgtgtgtatatatatatgtgtgtatatatatatatatgtgtgtatatatatatgtgtgtgtgtgtatatatatatatatatatatttggtttccatatgttactaattgttactaatgttttaggtctgaaaaagtaaattgttgctacacagtacagtgatatgaacatactaaagaaaaacaacaacaacagtagtaacagcaatagactcccatattgaaaggaaacaaagttgattagcatactaaccacaatttttaaatgcagctacagcattccagccaggtgcagattctttccttgtctttgaataccaccaaaaccaaaaatacatactatgtttttttctattacaaaataaattcagattgatttactgtttgcatgaataaataataaaaatattttatcctgtagactccatcaatttgtcattgttatgtccgtttgtctcatacttagcaattttagttcctgcttcatgtgattattcctcaattatttgaaaacatctagtagttttgcaccaagatacagtctattttccataataagcattgccattacttcttcttttcttctttaataatattttaaggactataatcctctataaatgcacacattggcaaacattacaaatttggtttttgaaataaaatatagtaatcaagatgtggtatggtca

SEQ ID NO: 713942 - DNA, 539 bp, Homo sapiens
tcttgcctcggtgcctgggtggcttgccgcccacactcaagcaatcctcccgcctcagcctcttcaagtgctgggattacaggcgtgagccaccacgcttggccacattttctggttttgttatttccctagaggactgcttgaactttattttaagactggtgtaaaggaaaacattacttagctagtgagtgagcccagctgaccgtccagaatctatatttcagcatggctctgttgttatttattttttcatcatggaggaagtaacttctgtttccttatttaaaaaactgccttgaaatgatatattgtgtaaacattcactgaagttggcaaaaatgattactctgtgggatgaggatattaataggaagcatatgattccatcaaaatgtaactttggatatgactaagaaattgtacatttacatactcagggatttggatattcagtaaggtgtaatgttccttattactttaagactctagcttattttatgcctactgtttacctggtatattaggctgawcttaca

SEQ ID NO: 713943 - DNA, 931 bp, Homo sapiens
tgcaccaattgcagcacgtccctggccagacctgtgttccttctctattttcaagacatagatctttttaaagagtcgtatataaatattttttctgtaaactctaagaaagtgagagttgaagaataaaaacagagaagacttgaaggactgttttttatccactgtcttcagcagagatatttcatcgtgtgtgacattcctggaagttgctatcaaagtcccaaagtacgaaatgcgtctcgtaagtcatcaacctcatacaggggctgtagagaaagagagaagcaaattgagtgaatggcttcaaaacgaggttgggggtcggtggggccggagagtcttctaaactgagtggatggctttgtaacatgttggaagaaagtaaattgggaaagagtttttttgggttttttgtttgtttgtttaaaaaaaaaaaaaaaaaaaaaaaaaaaggagaaaagaattctgaccaggaaggaaacgcaaccctggggagagacagaaatttaaagatgtgaaacaacaaaagaaagaaaagggagggaaaaggaaccttagcagagggctctgaatggtgaaacagcagaagaaaaagctgatgtggaggagaaataaagttttcatcagatgaaaactgagagtgattgaacaataagaaaatataagaaatatacgaaactccaaaaaagactgtagagaaagaaagaaaatttaaaaagcgaggaagccccttaccaaaaggatgcgccgaagctgtctggagagacgaactgaattttcatgcagcccttcccaggctttgaaagttctttcrtggttttctacaaaagtattccagcagtaaaaataatcttcaaaaaaaaaaaaaggaaaaaaaggcggggatatgggggtagaagacagttcaggttccaaatcgaggggaaag

SEQ ID NO: 713944 - DNA, 541 bp, Homo sapiens
tcttaatagagtgttcttttgaagacacacttgtgatcatataccacctagatattaaaagcayagctattggataaatgtactgacaatgaaattccaacagctataaaaatataagccccttatcaacagccaaataaactaaattatgttctcggttaggtcatttgttttcctgttcattcattccagaatttggagccaagtatctgaataacattgcaacagagccatacaattatagtcagtaataacattcttaagataattaggtgaaaatctatttgtggtaagttgtaacaaagcataattatactgaattttaggataggtagaatataaacttaaagttttctattctctttcaaattgatgtgataacaaataggagaggcaacttgaagttctggtttatagttaggacctgtttgccagttaagcctggacttgagttatgccctggttgtaaactccctcctctccaagcctcatttaaaagtattggagtaactctgggaagtcctgtgaaaaactgggcaaa

SEQ ID NO: 713945 - DNA, 1418 bp, Homo sapiens
ggactacaggcgcatgccatcacacccagctaattttttgtattttagttagagacggggtttcactgtgttagccaggatggtctccatctcctgaccttgtgatccacccgtctcagcctcccaaagtgctgggattacaggcgtgagccacagagtgtcacaaaactgcataaatgatgcctgatacttcctgtccaccctgctttatttacagatgctggtagagacccccggatggatttcacagcccactgctaatggatcatgccctgtagattaggagccatcrcattaggtcaaacattccttaaatgggttttaaacttttttttgagacagtctcactttgtcacccaggctggagtgcagtggtgcaatcacagctctctctagcttggcctactgcttcagcctcccgagtacctgggactacaggtgcacaccaccatgtccagctaattaaaaaaaattatttttgtagagatgagagtctcactatgtttcccaggttggtcttgaagtcctggactcaagtattccttccaaagtgcttgaattacaggcatgagccactgtgcttggcctaaactttttatttctcacagtgctcactgaatactttctgattgattgcctcagctcctgcttggccttttctaacccaagctactgtgcagagtgagccagagaaagctcaaccttcgtgttatcgaggaaggccagacagacgcaccctactgcagactcagcccctctcaaggtgacctaggctgacctgtcatgattactccagttgggcattaaatggagtcaggtgtggtgggggagcagccacccccaagccccccatatcttcctcacagagtctgtcagtgctgaatatgtgattgtgtcatgacgcctttctctagagaagcccacaggtctgagcttgtgtggtatgtgggtgcttctaagggtttctgacatgggcgaggagtcaggaactttagaaatgtttgcatttgccttctgtgttctaacagtatacaggagaggaagtcaaagtccaggataaggagaaaaaaatgataaccaagtgcaaggtttttagggtcaccaaccccaaagtatgaaagcatttcatgttgtttcagtagagaacaatttgcctcgttctgctctttgcatctgaactgatctcagtcttaatggctagaatctgatggggtggtggatgaattctttagattgttgctttttaatcccagcagatgcctgtatttttaattgaaacaaacccctgggaagagcatcctcctgaccatttaggttgaatctctttctcttaaaactgctttccggagggtgctttggagagcatttcctgttagcttgaactcttacacctgaggccttatttgtcatgtgtagtt

SEQ ID NO: 713946 - DNA, 1418 bp, Homo sapiens
ggactacaggcgcatgccatcacacccagctaattttttgtattttagttagagacggggtttcactgtgttagccaggatggtctccatctcctgaccttgtgatccacccgtctcagcctcccaaagtgctgggattacaggcgtgagccacagagtgtcacaaaactgcataaatgatgcctgatacttcctgtccaccctgctttatttacagatgctggtagagacccccggatggatttcacagcccactgctaatggatcatgccctgtagattaggagccatcgcattaggtcaaacattccttaaatgggttttaaacttttttttgagacagtctcactttgtcacccaggctggagtgcagtggtgcaatcacagctctctctagcttggcctactgcttcagcctcccgagtacctgggactacaggtgcacaccaccatgtccagctaattaaaaaaaattatttttgtagagatgagagtctcactatgtttcccaggttggtcttgaagtcctggactcaagtattccttccaaagtgcttgaattacaggcatgagccactgtgcttggcctaaactttttatttctcacagtgctcactgaatactttctgattgattgcctcagctcctgcttggccttttctaacccaagctactgtgcagagtgagccagagaaagctcaaccttcgtgttatcgaggaaggccagacagacgcaccctactgcagactcagcccctctcaaggtgacctaggctgacctgtcatgattactccagttgggcattaaatggagtcaggtgtggtgggggagcagccacccccaagccccccatatcttcctcacagagtctgtcagtgctgaatatgtgattgtgtcatgacgcctttctctagagaagcccacaggtctgagcttgtgtggtatgtgggtgcttctaagggtttctgacatgggcgaggagtcaggaactttagaaatgtttgcatttgccttctgtgttctaacagtatacaggagaggaagtcaaagtccaggataaggagaaaaaaatgataaccaagtgcaaggtttttagggtcaccaaccccaaagtatgaaagcatttcakgttgtttcagtagagaacaatttgcctcgttctgctctttgcatctgaactgatctcagtcttaatggctagaatctgatggggtggtggatgaattctttagattgttgctttttaatcccagcagatgcctgtatttttaattgaaacaaacccctgggaagagcatcctcctgaccatttaggttgaatctctttctcttaaaactgctttccggagggtgctttggagagcatttcctgttagcttgaactcttacacctgaggccttatttgtcatgtgtagtt

SEQ ID NO: 713947 - DNA, 3043 bp, Homo sapiens
ctgaattttttcatctgtagaagtggggactgggctgggcacggtggttcacatctgtaatcccagcactttgggaggccaaggcaggcagatcacgaggtcgggagattgagaccatcccagctaacacggtgaaactccgtctctcctaaaaatacaaaaaattagctgggtgtgatggcgggcacctgtagtcccagctacttgggaggctgaggcaggagaatggcatgaacccaggaggcagagcttgcagtgagccgagattgcgccactgcactccagcctgggtgacagagcgagactccgtctcaaaaaaaaaaaaaaaaaaaacagtgaggacgaagactcagcttgtggagtcattgtgaggattagctttgctgaaacaataaatgtcagactgaacctcgcagatgcatggcacaaaccctatagagcctgcctgcctgcctgcctgccttccctccctttttcctccctccctcccttccttcctcccttccttccccacagtctcaaggctggcatgctggcccactgtccctcactagctgggtgaatttgggcaggttacacaacctctttgaggctgggtcttcttatcagtaaactggagatgataagtccctcttcatggggttattatgaacatgaaataagcatgtacaactctgagcacaacacttgtcccattttaggaattctcataatgtccattattcagatttccctccttggtgaaggaccagtggggccccccagtgattatggacattctgcccaaagatggyctctgactgcctcctcagagcaagatagaaccaaagtcaccacaaacagtgaggtcgaaaaagagtctggtcagacccctggctcaggcaggtgccacctagccacccctgccccagcccttcctccgctctccgggctagaggtgccacatgtcagtgacacccacccctgctgggttgggagggtgctcacttaagcctgaggcacaattcattcccagcaggcttcaagtcccttggaagaagctctcagaacatctctgagccaaagagacactgccttttcagctgacaactggaattctgaaaatcccatttctttagagtaggggactgggcatctcatccagaatcccagagaacaggagccccaccccagcacagctgttccccaagctggggtcctccagttcagcaaatgcttgtgccgggtgcaagaagcagcagagagaggccacttgcagagtggctggaagcaggcaactggagtcagataggccgggagtttcaggcccaattttctcttctgtaaaatggggataatagcacccaacatctagaaatattgttaggatgcaagaaaatgaaaaagcacttagcaccgtgcctggcacttataagtactctgaataaatggttgtgaatgatgataagggtgataataatggtgttgctgctgtgacctgccctaaggctctctgcccctcatgcccccagcaccctcccatacccatcctccccaggggctggcatcacagagctacacctataactctcgtcatgggcaagggtcaggaccaaagcaaagccttctttctgttggaaggttcaaatacattttcaaacatctctaaaaacccccatttcctcaaaaatcaattttctttgtcgactcctatgaaaaatctgttcttggtagtcattctccctgtgatctggagcccactacttttaggcacaacccattttattgctgggcgcctgcagtttttaataagttgtcccttgtgatcagtttcaagtcgagctctggttaccagaaacaccacacattggatatttctcttgagaaccacgtgggggaaagcctacacccttctccctagggcaattatttctcttaacgcaggccggggctacatgttgctaacctgcccctctatctaacccaaatcttcttgacggatatagcacaagtaactcacaaaacccaatcttgacgcgcatcctcttggctgcagaattccagtctagcatcctgatctttgtttccttcagggaggctcaggtctccccagaatgattagggagatcttgctcagctgagagtcagacatactgtggttggaatcctggctctacctgccctagatgtatgaccttggacaagctcctcagccttcttggagctccattttcctcatccatcaaatagggttaaaaatcctgggcttgcaggtggctgtacaaattcagtgagacaaaacatgtgaagggcccagtgtaatgtgaaagttcaggaactggcggctattcttggtttaagagagaaaggtgcagagttccttgaaagggcagagcaagagaatctgttctccctggagatacagagggccctgggttcagaggtgaactcaacccaccccaggcaaatggcaagacgatctcatggcaaacagctggagcccaccactgtaggccctgagccatgtgccagccccgcctgtcccagcaaaggggcctgggggttgacacagccagtgccaagccagatggggcagtggccaactttccagtcagcccagatgtctgtctttctcagatgaaaactcaaaaatgtggcctcaatcaaagtggcttttgagaaccgtgtgttctccagactctggcaggaggattgaagagggctatgagctgggaccctttgataaatcccaaggggtcaggaagacctggctcaggctaagtcctgggagttcagctgggtacacattacctctaccactcagagtgaagggagcagaggggaactgtgggctggtctagactgactcccgggccagctctccatgcaagttctgtggcattctggaacaaaagggatttacctatgccatgcaattaagacttcaaggcagtccttttccatgtcaggaatagtggcattctgttgcgaccttcttcaacagtccagcacagagcctcaaagccagaatgtgactgaagggaagccatgaagccactcccag

SEQ ID NO: 713948 - DNA, 591 bp, Homo sapiens
aaaaagtaaaatgttcaaaaactgcaagcttattcaaagtaatatgagattattttgaagcatttgtggaggaagtcttcctaagtataataagaaagcttaaagctactgaacaaataatgaccaatttaatatttaaacattcaaacttctataaatcaaacatcacagaaacttagtcaaagaataatctacagagaaagtatgtgtaacatatgtgacgaagttttagtatcactaaaatatgtaagttcttaaaatttgttttaaagacacaaacataattagaaaaatattgagaagatatgaaaagttgattgatgaaaaaaagaagtcaaaagtcaataagtgggaaaagcaagttatacaatagattcaaggccattatttgcccataaattgataaatggaaaaaatgattgacagcatctaatgggagcataagaaattcacatacwttgtagataggagtgtaaatatcctcatattctcacttctctctttctccagcttagattgatacagcttcagatgccctaagatttcattataatgcacctgcaaaaggcctaatccaaacccctgtgaaat

SEQ ID NO: 713949 - DNA, 591 bp, Homo sapiens
aaaaagtaaaatgttcaaaaactgcaagcttattcaaagtaatatgagattattttgaagcatttgtggaggaagtcttcctaagtataataagaaagcttaaagctactgaacaaataatgaccaatttaatatttaaacattcaaacttctataaatcaaacatcacagaaacttagtcaaagaataatctacagagaaagtatgtgtaacatatgtgacgaagttttagtatcactaaaatatgtaagttcttaaaatttgttttaaagacacaaacataattagaaaaatattgagaagatatgaaaagttgattgatgaaaaaaagaagtcaaaagtcaataagtgggaaaagcaagttatacaatagattcaaggccattatttgcccataaattgataaatggaaaaaatgattgacagcatctaatgggagcataagaaattcacatacattgtagataggagtgtaaatatcctcatattctcacttctctctttctccagcttagattgatacagcttcagatgccctaagmtttcattataatgcacctgcaaaaggcctaatccaaacccctgtgaaat

SEQ ID NO: 713950 - DNA, 630 bp, Homo sapiens
ggctctgcagaaagatgctgaagtggcctagtctcgaagtgggaactcaattcagaaaagaagggctacacgtctatggaccaagagagtctaagaaagtcttggggagcatagacaacctgaggtgcatcttaacagactcatatcatttggaaataaataaagacaggtgaaaaagttctagcacctgtgtgtagccagctcactcattcattgtgtatcactgctttgtttattcaaaccattttttaaaaattatgaccagacaccacgcactggccaaagagttttaaaacgtggaattttaatccccgccctcaaggacaggaggccagagagttgtaaagtgtaaagtaatgtggaaacaaggggagagccacatgacactctccrggtgatatccgaggagagtggttaacctgcctggtagggaagggcagggagctttgtgaggttgtgaccgaggctgagaggcaggcaggcgaagcgcattccagctggagagtctttgagtgaaataaaaagtagaggacgcatggagtgtggacagctccaagcacgtccctgttgtgacatgacatgcatgctaggcacaggcaggagcaagaaatgtgtcagggacgcgggaga

SEQ ID NO: 713951 - DNA, 702 bp, Homo sapiens
gcaggggagctggctccaagccacacgctggtgccatgaccagctgcctacctgatgcccctaatcttcagttcccttctctgtgaattgccagcattaactctcctgaatgctgcaccacaggctgcagctaagcactttgtgagtttcaaggagaactcaggggtgagggggtcctttctccttgacagaatctgcagactgtggtcacagtttcctagcaaccgtctccatcaggtgggagtcacaagaacacacatatcgggtggaagagtggattttcctttctcattttcctatgattggtcttaataatgagggaaaccaaagaacgcataggagttttcctgagctatttcctccgctgatgaagacgtggcttttctgtgtycccagtgtccccttatgcacctcttgggacatggagattaaggagcagaagacatgggcattctgggccctggggtcaccctgcaagcgacaccttcagaccctgttttccattcctcttgtgtccaccaggcccaatcctattcaaagctgcttgggtcacctcagattaagtcactgctataaatagaattttgtccccccaaaattcctatgtggaagccctagcccgcaatgcgatggtagttagagacagggctttgggagggtcattaggttgagatgaggtcatgagggtaaggctcccatgat

SEQ ID NO: 713952 - DNA, 702 bp, Homo sapiens
gcaggggagctggctccaagccacacgctggtgccatgaccagctgcctacctgatgcccctaatcttcagttcccttctctgtgaattgccagcattaactctcctgaatgctgcaccacaggctgcagctaagcactttgtgagtttcaaggagaactcaggggtgagggggtcctttctccttgacagaatctgcagactgtggtcacagtttcctagcaaccgtctccatcaggtgggagtcacaagaacacacatatcgggtggaagagtggattttcctttctcattttcctatgattggtcttaataatgagggaaaccaaagaacgcataggagttttcctgagctatttcctccgctgatgaagacgtggcttttctgtgtccccagtgtccccttatgcacctcttgggacatgkagattaaggagcagaagacatgggcattctgggccctggggtcaccctgcaagcgacaccttcagaccctgttttccattcctcttgtgtccaccaggcccaatcctattcaaagctgcttgggtcacctcagattaagtcactgctataaatagaattttgtccccccaaaattcctatgtggaagccctagcccgcaatgcgatggtagttagagacagggctttgggagggtcattaggttgagatgaggtcatgagggtaaggctcccatgat

SEQ ID NO: 713953 - DNA, 604 bp, Homo sapiens
gaaacacgtcacgcttcaaattccaagaggcttttaatgatcaaatatagttagaaatactgttagatcatatctatgakgatgtcctttctttaaacttccataaaaagacccaccaaaaatattttggtttaacagtcaaataatgacactcctttctaatttagtttgaaaaaagtcttagttcttttgcctcatatatataattaaaagtgttttataatttaaacaagctttgacaaacaggtgataacattctgagaatatccttggctagccaggttttcagagcagtgcctgtatctacttctaaaacaccaacattattaagcagggttaaaacaaaaaacaaccctggtaggctaaacttgatatggaaaggacctgtgcttttgcctaagtgaggataacttatctttactatttcttttataatatttaatttcctctttaaaatagctgagcatatgcttagaatcctggattattatgcccctctaaaaaacaaaccaccacacataccccacttgctggaaaatacaggagaggcatgaactcacccccctggaagcatccccttaagaccacctctttctctttgtat

SEQ ID NO: 713954 - DNA, 575 bp, Homo sapiens
  misc_feature 475, 476, 477, 478, 479, 480, 481, 482, 483, 484, 485, 486,487, 488, 489, 490, 491, 492, 493, 494, 495, 496, 497, 498,499, 500, 501, 502, 503, 504, 505, 506, 507, 508, 509, 510,511, 512, 513, 514, 515, 516, 517, 518, 519, 520, 521: n = A,T,C or G
  misc_feature 522, 523, 524, 525, 526, 527, 528, 529, 530, 531, 532, 533,534, 535, 536, 537, 538, 539, 540, 541, 542, 543, 544, 545,546, 547, 548, 549, 550, 551, 552, 553, 554, 555, 556, 557,558, 559, 560, 561, 562, 563, 564, 565, 566, 567, 568: n = A,T,C or G
  misc_feature 569, 570, 571, 572, 573, 574: n = A,T,C or G
ttcaaatttgtatgattctgcttagtttatcttatctagctgtactgtctaagattatagtacatgttgaagagtagtggagatagtacagatagctttcaacaaattactcagtgtttcagagggctgatttcctatcccattttctcactccttcttggcaacagaaccccaaactcacycagtcagcggtggattcagctaaagaactgcaatctagatgtaactttacctgggtgtgataatgagactaaattttggtaaaagagaaataagtggaatcattatatggtactttagatccttctccttcaccactttgctactacctggaattgggatgtaatggctggacctctagagggctttttgggccgcaagtgactttgagaatggaagccatgcatcaggatggctgcattagcaagacagaaagagcctgtgtccttaattatcaaggagccccataccaagnnnnnnnnnnnnnnnnnnnnnnnnnnnnnnnnnnnnnnnnnnnnnnnnnnnnnnnnnnnnnnnnnnnnnnnnnnnnnnnnnnnnnnnnnnnnnnnnnnnna

SEQ ID NO: 713955 - DNA, 518 bp, Homo sapiens
  misc_feature 514: n = A,T,C or G
gtgttgttgcacctgacctctcacttttcccttaggactcggctcaagcagctgagcatagtgactcaggcctgtaatcccagctactcgggaggctgaggtgggagtatcacaggagcccaggaggccgtgattgtgccactgcactccagtatgagcaacagagtgagaccctgtctcaaaatctcaaaaccaaccaaccawccaaccctcagctcaggcctcacttgcaagaattttttccaaatccccaggttggagagtcttaacacttagcgctaccattgtagtaccaatgtattgaagtaatacgtttttgcattatgcatgtctccagataggttgtgaacttgcagatggcattgaatatcttcttcacctgcctggtactaatggataccagaaataaacctgttcagaagaacatacttgaagccctgctaatggagtccatttaagtataagttaattgtttttctttctttctttttttgagatgtagtcttgctcttgncgcc

SEQ ID NO: 713956 - DNA, 644 bp, Homo sapiens
gaggttcaaaggaatgaaaagtcggatttctcaaacatgtaaaactcaaccccacctcgtggcttttgcacatgttccctgtgcttggaatgtgcctctctccataagtgcacatgtaactcctcgtctccctttagctctcagcttactttgcttccctgtagaggtctttcctgaccatctgccacgatgagacgtccctatatagttctctgtctcagcaccttgtttgtttcatcagggcattcattacaatttacaattatttcatttatttgttgatccacttgctttttatgtctccccatgtagaaactccatgaagacrggatactatgcctgtcttatctaccattttatccttgatgcctggaacagtgcctgagacatagtaggcattcaatacatgtttgttgaatgaaccaaccaacaaacaaaagatcacatttgattggtaggatcaggacaggtttgacgagaggaagaaatctttagaaactgggtaggttgtaggtagaggtagggagaggagagatgttccaaatggaaggaaaagcacatgcaaatgtctggagcccaggaaatgcaaagcattttctgagagcaacaaacactgtatatatttgaacttaagatgcacgctt

SEQ ID NO: 713957 - DNA, 653 bp, Homo sapiens
  misc_feature 164: n = A,T,C or G
acacaggcagtgccaccagacgttttatggagtgtgggcattggctcacgcacttgccaaggacatacaggtgctaggccctgaactgggcgtggagaatttcatgtgtttcccagaacsctccctggcctcactgacgtctcaccctggcagtgagaaaacanacacctggggtggagagtggcccaagtccatgtctgtctttgccagctctcaacacccactgtgcacctgggagacctgcaccaaaaagctgagtacacgcaaaaaataataccactcacccctgccctcataggctcttgcctggctgccgaaagcagatatcatctcctaaggaaataaggcccatatcatctcataaagaaatactcatttaacaaatatttattgagcgacttactgtatgctgggcaccgttctagagctgggtattcattcgtgaaaagaaagagacaaaattcttgcccttgtggatcttctattttcatgtataaacataataaatatgtaaaaaaaatagaaggtactaagtgctgtggaaaaatagagttaggtaaggaagatcgggagtgtaggagagggacaggttgcaaaggtggtcaggcctcatgaaggtgacacttgagcaaagacttgaggcatatgagtga

SEQ ID NO: 713958 - DNA, 653 bp, Homo sapiens
  misc_feature 164: n = A,T,C or G
acacaggcagtgccaccagacgttttatggagtgtgggcattggctcacgcacttgccaaggacatacaggtgctaggccctgaactgggcgtggagaatttcatgtgtttcccagaaccctccctggcctcactgacgtctcaccctggcagtgagaaaacanacacctggggtggagagtggcccaagtccatgtctgtctttgccagctctcaacacccactgtgcacctgggagacctgcaccaaaaagctgagtacacgcaaaaaataataccactcacccctgccctcataggctcttgcctggctgccgaaagcagatatcatctcctaaggaaataaggcccatatcatctcataaagaaatactcatttaacaaatatttattgagcgacttactgtatgctgggcaccgttctagagctgggtattcattcgtgaaaagmaagagacaaaattcttgcccttgtggatcttctattttcatgtataaacataataaatatgtaaaaaaaatagaaggtactaagtgctgtggaaaaatagagttaggtaaggaagatcgggagtgtaggagagggacaggttgcaaaggtggtcaggcctcatgaaggtgacacttgagcaaagacttgaggcatatgagtga

SEQ ID NO: 713959 - DNA, 592 bp, Homo sapiens
tttaataagttataatgcttccttttgtcatttttcccctctgactgagatgggcacccttaagctggctgacagattcctgagtgctgacgatcactgctctggcaaatgggaaggagtacaatgatgctgcaaatgagtgccaatgaaagtggtagatctttcaaataaattgcatactgcttccarattggatgtaattggagtgtattcatcaaattttgaatttggactcaatagtaacaggaagttagtattgaaacattgaataagagaacacttataaaatagaagtcaatgattgtgtatatgcatatgaaagagggaaggtcattagaaagtactcagtagctggttttcccaggtctagagacaatcaacatgaagagcataatacatttatatgttaaataccctcatgtgtatgcatgtatgtgtgtgcattttatctctgtatatgcatgtatgtgtgtccatttttatctctgtatctgcttatctaggctttttttatcttcctccttttaaatttccaaagaacttaactgattaactatatccactcttagcaagacatattgtagtaggatat

SEQ ID NO: 713960 - DNA, 2127 bp, Homo sapiens
tggtgaattgtgtagagtatgtctcaatttaaaaaaaaaaaaaaaaaaggaacagttctaattttcggattgtccccagctttgtggctccgatggtctgtagagccagccctgagtgggctgcaatcctcccatttctccattcagcctgtcagatgctgctcctcttcaaggttcatcccaacaccctgtcacccctccacagcccacccttccccacctctgcccaccatggggaagccttctgatttcttgcaggggagccttcccttgaggagtgtagtggtttaagccaaaagcattctgggacactgagttcatcgtacttttctctctacttttgtatacatttgaaactttccataataacagcaaaaaggactctcccctccagcctgcccggcactcaagcagcttgtgtatatcttcgtagataaatgtacattaatgattgacctacatgaagataaaacaataagaagaattccctctgctggagtgtagacccacactgcccttttcccagcatggtggtatcaggagaatagaacagggcctatgccttctcttctctaatgatccttggtttgtaagttttttccccaagagaccgttccttttatatttttatttttttaaaggtaggtgagttgcctttgcaaatcctttgcccatttttccactgggattatttttcttaaagatttacaggagctatttatatattctggatattgatcttttgttgggactgcaaatatatttttccctgtgtgaggcttatctttaatttttaaccatatttctagtgatgtctttaaaatgctctgaccttccgttactgttcttgttatctgtcagtttaaggcagggtcccatgtaagagtccatcactgcgcttcctggaaaatctgctagtgataaaggaggccgaagtttgtcttccctctttgccttttccaggaagtggatttcatttcattcttccagctcttattgctaccatagtacaacggagttaaaggggcaatcagaggcaagatgacgactgcattgtgagtcactgcaaggactttcccttcaattcagagtaagataaggagccagggagggcattgagcagaggagtagctacagcagtggtctaggcaagagatggcagtggcttggattggggtgatagaggtggaggtggtgagaaatggtcagatttggggtgcatattgaggatacagccaataggccttgccagtggattagatcagcagtgtgagagaaagaaaagagacaaggatatcccaaggtttttggcctaagtaactgtgtctacttttgctcaaaaagtaatcaagtatttgggcttaaagttaagtcagctccacaaatacagagaccatctctgttttgtgactactgatctccaagctaccacagtgacaggtacatacgcactcagtaaatattcgtggaatactaaataacaatctttttacaaatgggcggcatcggtggtataggcttcaagcacaccagaggacccattttatttccacagccctttggcatccatctcaactgtcccaacttctcattcctggccctcccttccattgtcatctcaccctaggaagagcgctaagtcccccactgtatccccatgcttctgcctcctccatccttctcatgcagggtgccccagggagtgggaagatggagtgacaggcagcagggcctgaaggactggagagctttctctccactcatttcagtcctcctgtggttcttctgccaaggcttttagcaactctgctcactatctgcattagccgcaagaggagtggatgggaacaaaagcaggatgagaggctcttgttctttctcyctttctagaagaggctagcagagctcttctcaccttgacatttagtggcagatattcattaccctaaatattacaccaccagcaacaacacccccatcatcatcatcatcatcaccaacctgttaatcaaaataattgcaatcaccatttagtaaatgtttaccatatgccagatgctactcatttcacctatattattgaatttcatctgtgaggactccgtgaggtgggtagtatcatcccca

SEQ ID NO: 713961 - DNA, 1398 bp, Homo sapiens
gattctttatgcaaatgctggcatcatcaaacctggcatttcacctcacctcccatccccttcccatttctcttaatctctgctgctactgctcaggttttcatcttctccagacctctttctacacccttctgaagaggacctgccacatgctagcttctaggctggctgttggggaaggkacaatcaaggctctaacctgccttcttacagctctgaggtagactgtgtgtaccaatggactttgaagggtgtaataattctcaaattgtgctataagagctcagcacagagggatgaatttctttgctccccagctagacttagtgtcctgagtcagggctactgtgggatatttcagtgacctccataggtgcctctggggctcccccactcacttggccagtagagaccaattcaggggacaccagattgcggtaggggtggcttgtggaagggccaccagagtaggaaacagaagatgaaatggtgcaaaggagagaggagcgaggagcagtgcctccagcatgacccgccttatgctctacaccccagtgacttgaggctgctggtgggccctcttcctccaccctgggttagtcctttttaaggcctttgcccctaacatggccactgattcttctcccttctacctggaaggttactgttgtacatgcacacagatgtagcctcttccaggaagcctccagagaattgtcctccagcctgttttgcctccctagcacctctgcttcagcccttaacacactttatgcttggtttctgtctccaccatgaaactaaacttcttggagtccaggatccacctgtgcagccgcccagcatctggcacagtggagacccgagagagcctcagtatggcattggcctgtgcaacccagtgggacagagtttcttccagaagggcttctgggtggtggcggaacagtagctgagtctgaaagagcaggagggctgtgagtgggaagggaggctgtggcttgggaaagggcagtgagtccaggcggaggctgctctggcctgagaagagctggctgccaaccacgggctagagtctaacctctctgggagaaggagcagtggttattgagcccctactgttcagaatacaggaagaccccagcatacattgtgtcgtttcctcttcacacagtagagggggtggtaggatcattttacatgcctgaaaactgaaacttagcagtttaggtcatttacaaagagctgagttaggccgaatatggtggcccacgcctgtaatcccagcactttcggaggccaaggcaggtggatcacctgaggtcaggagtttgagaccagcctgtccaacatggcaaaacgccacctctattaaaaatacaaaaattagccaggcgt

SEQ ID NO: 713962 - DNA, 1398 bp, Homo sapiens
gattctttatgcaaatgctggcatcatcaaacctggcatttcacctcacctcccatccccttcccatttctcttaatctctgctgctactgctcaggttttcatcttctccagacctctttctacacccttctgaagaggacctgccacatgctagcttctaggctggctgttggggaaggtacaatcaaggctctaacctgccttcttacagctctgaggtagactgtgtgtaccaatggactttgaagggtgtaataattctcaaattgtgctataagagctcagcacagagggatgaatttctttgctccccagctagacttagtgtcctgagtcagggctactgtgggatatttcagtgacctccataggtgcctctggggctcccccactcacttggccagtagagaccaattcaggggacaccagattgcggtaggggtggcttgtggaagggccaccagagtaggaaacagaagatgaaatggtgcaaaggagagaggagcgaggagcagtgcctccagcatgacccgccttatgctctacaccccagtgacttgaggctgctggtgggccctcttcctccaccctgggttagtcctttttaaggcctttgcccctaacatggccactgattcttctcccttcwacctggaaggttactgttgtacatgcacacagatgtagcctcttccaggaagcctccagagaattgtcctccagcctgttttgcctccctagcacctctgcttcagcccttaacacactttatgcttggtttctgtctccaccatgaaactaaacttcttggagtccaggatccacctgtgcagccgcccagcatctggcacagtggagacccgagagagcctcagtatggcattggcctgtgcaacccagtgggacagagtttcttccagaagggcttctgggtggtggcggaacagtagctgagtctgaaagagcaggagggctgtgagtgggaagggaggctgtggcttgggaaagggcagtgagtccaggcggaggctgctctggcctgagaagagctggctgccaaccacgggctagagtctaacctctctgggagaaggagcagtggttattgagcccctactgttcagaatacaggaagaccccagcatacattgtgtcgtttcctcttcacacagtagagggggtggtaggatcattttacatgcctgaaaactgaaacttagcagtttaggtcatttacaaagagctgagttaggccgaatatggtggcccacgcctgtaatcccagcactttcggaggccaaggcaggtggatcacctgaggtcaggagtttgagaccagcctgtccaacatggcaaaacgccacctctattaaaaatacaaaaattagccaggcgt

SEQ ID NO: 713963 - DNA, 2375 bp, Homo sapiens
tgtgtatatatgtatgcacttaggtgatttatatgcacactacagtttgaaatgcactgctatagcacaactgctatgaggcaatggtgccttgcattactttgtgtgcataatttcagtaaaaaggtgttagagtccaaaaacacaccctagttccagtactgcctccaccttcctatgttatattttggaagtctcttaattttacttaatttcagctttctttgctacgaaaatggagaaaataatacatagcttcaagggatatttgaagattaaatggcattagttttgtgaaagtacgtttcatagtacctggtacataagtttaataaacattgattttatatttaccttccctatagtgaaatttcttagaatggaggaattgtgtctgatacatttttcaggttcaccagtgacttaggtcagtgtaaagcaggctccaggaggcagggagcccggctgttggttcactgctctatttccacatagtatatattggcagggggcagggagaatggaatgtcttatagtgaatgactgattattatttgagaacgtcattgcaatataaaacctataaaaagkgtttagaagtaatagagtacttagtttggagaagaaaagccttggataactttaataactgagttctaacatatatttattaaacagagaaggacacgtttgacttttttttctattcttactacttctcacaaagtatatgagaaaactagacaaactttttagactatcatatccataataccactacttgttttagagaccaaaagatgtacacaacaatatagccacaacatgctaaaagtatgacattgtgtgattgtcctgttttcagttacccaaatgtaactgggagatagagcggagctggttacctctgaggtcaagagaaaggagagttttgttcctctccataagtactttcttgggaaaataacaggtaactgcctacatactgagacacctgaggcctaactcaatgagagaaaaaaattttaaatgtctcctaatttttgccaactaatttttcaggttaaggtcaaaatagttaacactgataaaccccttttgtatgtaaaattaattttttactaataaggattattttacaaactggtcacagtgaaaagttgtaatgttttctttcctcgggatctttgtgaacaggactgagtttgacaggtttaaatttgctgctaagagttaaattatttcctctagccttcagccctagaatcctgtcattctgcatttcagcaagactaagctatgaacagcttaaaacatacaggtaaatagttggtttcctttgcttccatgtccctagtcaactgacattggcaattaactttattcctattctttaagagtctacaaggttccatgagctgtcagtgttcacatcacatccactgtcctaagtacatccttaacccaaaatcagtatattttttctttagcccactgggacttaatatgtcacttcacacaatgtaatttcccataaaccataaatgacctttaatgcgtcagtgactgcatcaaatgttatgataaattttttaatgactgaataatttggagaccattgtagaaaaatgaaatgacaaaaaaagtcaggaggaaaatatgaatcatttagtaaaaagggttaaaaggatttttctccttgtgtctgtgatgcctataaaaaaggtagatttatgtgccttcctagcctctattttacctcttcttttcagcatttaacattatatgtaatctacaaaaagctgtcttgaggcctagacctgcccatcatcaaccatacctcaaaccccacaaattcaattccagatgcatgaagaataatgtagacctttactgcagattttccagaagggaaaagaacggttcacagaaagctttgagcagtgctgagcaaaacatgcttagcgcttcaccagtctcaacccccagggatccccacatagactgtgcagaaaccactctgtctctcctacgcacaccctctccatgtagcctccacactgctgtgcctctcctcttcttccaccataagccctacacatggtctctccgccaatactacccgctgcaaagtgcagccacgttgcacactctgactctttccagcaaggcccagtctcctgaagatgtggggaataaacttttaactacaattcaatttaatttaaaagaattacaaagtgtataatctgtgttcaaggcccatggctaagtgctatgaaagtcaggtgaggaacaaagaacatttgcacagttttggccccctgagagcatgcaatgtggtgaaagccaaaaaaaaaaaaaaaaaaaaaaaa

SEQ ID NO: 713964 - DNA, 596 bp, Homo sapiens
taaatgcaaaaaaagcctttatagaatatattttwaaaacctataaaacatgtttggttttctcttttgcttcaaaggaaaaaaggaaaagtttccattgtcttatgtaattaaatgtaaaagacaaatttaacatatggttccataatagacctatttcaacgcctgtgactttaaacaggtacactgcttctctgtctcccttatcaagtttctagttcgtctaaacaactgcatgtgccactcctttcactcctatccatgcctattaacctcaatcatggcgatgcagtatagaacctgggagtctggttgaataaatttccaaataatatggcattgccttctttttaatggtaaatatgttcaaatggaaatcttaaaataaaccactccctttgccttcataagtagaatatactaaacataatttaaacttttcttgataatatggggtcagctcaacaaatataattgttctgggctttcttacagttgaaaccctctgcagctaatgggtgtgtggggctatttgctaagcagtcctaaactggcatgattatctggttgagttgcttttcactcctcccttgctg

SEQ ID NO: 713965 - DNA, 976 bp, Homo sapiens
tagaggaatgtggcagaaaggcatgactgtctccagcccacccaaatcttaatgtgagttctgtgctctcctttttgacctttgctctgcctcttcagccttctgcctgttggtgtgcttcagtgttttttgatccccaccatctcagatcattttatctcttctttcctgatatacctttgtttctgtctactcttggcatcctaaaagccagctttataggtctggatgtgaggtggacattcttttgcatgcatggaggaagagtgttttagttaggacttttgaggttatagagaacagaaatccatatctgattaaggtagaaggagaaactattgggaggattgagaggggaaggcaggaatgcagctagacttcaggaaccaaggactcagcttagttcttccctcttgtttcagtctggctttctctttgtggaaggaatcatggctgctggcaatcccgaaggcttacggttttaacacggagaaattctgtattttccctattgtacaaggtccaggaaagggtgagttggccctcacaytgacccagtgtgattcagtacccacccttggaccagtcaaataaccagggggcatgaggtcatattaaaactgttgggaaactgcagagcaccttccagagaaggataaggcagggtactagataaacagaggcatcctcttctaggagaaagagtgttacatttataaagagaccactgtattttaaagaagttcttactgaacctttacatttatcttgggagatgggtggtggtatcctcatccgtgaggtagttgcatcctcaccagtatactggttagggtatgtaagcttgtggcagttaagtgtccaggatcttgaaaactggcatgtctagaatttgaatctaagtctgttggactccaaagcctatgtactttctaatgtgttagttgtctaccataacattagtttaggcttattt

SEQ ID NO: 713966 - DNA, 976 bp, Homo sapiens
tagaggaatgtggcagaaaggcatgactgtctccagcccacccaaatcttaatgtgagttctgtgctctcctttttgacctttgctctgcctcttcagccttctgcctgttggtgtgcttcagtgttttttgatccccaccatctcagatcattttatctcttctttcctgatatacctttgtttctgtctactcttggcatcctaaaagccagctttataggtctggatgtgaggtggacattcttttgcatgcatggaggaagagtgttttagttaggacttttgaggttatagagaacagaaatccatatctgattaaggtagaaggagaaactattgggaggattgagaggggaaggcaggaatgcagctagacttcaggaaccaaggactcagcttagttcttccctcttgtttcagtctggctttctctttgtggaaggaatcatggctgctggcaatcccgaaggcttacggttttaacacggagaaattctgtattttccctattgtacaaggtccaggaaagggtgagttggccctcacattgacccagtgtgattcagtacccacccttggaccagtcaaataaccagggggcatgaggtcatattaaaactgttgggaaactgcagagcaccttccagagaaggataaggcagggtactagataaacagaggcatcctcttctaggagaaagagtgttacatttataaagagwccactgtattttaaagaagttcttactgaacctttacatttatcttgggagatgggtggtggtatcctcatccgtgaggtagttgcatcctcaccagtatactggttagggtatgtaagcttgtggcagttaagtgtccaggatcttgaaaactggcatgtctagaatttgaatctaagtctgttggactccaaagcctatgtactttctaatgtgttagttgtctaccataacattagtttaggcttattt

SEQ ID NO: 713967 - DNA, 1695 bp, Homo sapiens
ttattattgccatttaattaaactaatccctcccataccttttaatttgtttaaacaaacaaaaaacactcttttctctaccactaggaggcagtgtttcagtaggtctaagctaaacaaagactgatcagcccagaacactgaagtggaatttgactcctcaaacctgaaagtttcccttagaytttggttcttcaagaaataggggaaataacatctttctcaccaagaaataaccaatacatatcttttcaccattaaatcactaatagtcctaaaagatacatgcaaactcctgttggaataatttttttaaaaagtctctgcagtttatagtgctatatttggggtgttcttaatgtttaatttactacttacccattcaaaacaattcgtcatgccattaataacttatctattatcatcaaatattgaatgacacttctgtattttaaagaatgtaacaagtaattaaaggacaaattcctttaattctttagaaagtgctttaatttttaagtggagggtagtaagtttttaagaaggtcataagaaatgacaatgggaaaggaaagggcagagcatgttctttagtgctaggcctattttacagatttattgaaaactcaaagcaactccatgaagtaaatattattatccctatttacaagacagacaactaaagacaagctttatttaaggtcaaataattaagtgtccaggatttcaattaaggcctgtctgattcaccaatctactatactaagttgtcttcaaataaaaacaacaacagtaacaataacaataagtgaactataaagcaacccaaaatttgatacaacagtctttcaattcagtgctctaatcttgatcacagtctggaaattcatcattaatgaacacaaagtcactacttggaagcagagccaggcactgattgtacttaggcactggaagaacaacacgcactgcatattcaccgagaacgtgttttttctaatttgcattgtttttattattagggacttatttgatactagccttcctaagcctcctttccttgattcaaaaggccatcaccattgcagtcctaaattattctttccaaatagtaagaaaatcatgaaacctcttgtcgtacctatgcccaaagcctaagccccaggaagataattttaaaagtaattagagtaacagttctcaccacaggctttaggccccctgtcttaagccccacagttaagaaacttgaatacatgcaggctcgtgagctttatttttatcaattccattttaatattttactgaccatcacctatgcctaggttttcataatagcaagtaaaatggctgaatctttgcacactcatagaattcttcttctcaaactatagaaactacggtaagggatgtctgcaaagagatatgattgaaaccatccttgccactggacttcttgcaacaaagcaaacaaattttaaaagtaatacaattaactgccaagatatttctcaaatattcaaatggaggagcagtttaccttaacctcaattaccttaatagaattaaggggtagaattcttagaaagtatctgttaagtgcttaacatgttcttgtagaataataataaagttagctattgctctagttgtctccccacagtttttgtgtactaagatgggtagagaaaaatt

SEQ ID NO: 713968 - DNA, 589 bp, Homo sapiens
ggtagactcaacatttaaaccaggcttctgtacttcacataaccatttctcagagcttttgatttttagtggaaatactggaagggttttttaaattgagtatcattgaaattcactgacatactcttttttttttttttttggaaatgttgtaagtagggtcatcatataatgtagagtctaaaccaggactctctctcttttcctttttttaatgtgctttttgacagccacaaccagatataggtgtaaatcagaatggaatcaggcaaatcaggacttattttcaacatactcataagcaaaaatgtcaatagtgctcaagggactatgaggtcaaatcataagcatggagtccaaatatgcgattgctaaccaccaatatttttatcttatcttttccaaaaggtaggcaaaaatgttcaaatactatactaatgggcgaaagggtacatgatcaaaataggtttaaataatgagtgaagcacagtacaatttatcatgaaatataaagtgcagtttttaaaaaatccacacacacatataattatrtatgtatacatacatataggtacaatttatttataca

SEQ ID NO: 713969 - DNA, 913 bp, Homo sapiens
aatggcatagataaacatctcactcatgatctctaactgcttaattgctggacataatgtcttgcactaaaagagaggacagaaaggattaaacaagaagataaactcctttcaggtataaggcaaaaacaggagtcttccttctttagtcattttcctacttagtagaataacatatgtttgcttgttatttgtaaatttatattgataaatttgacaagtatgtattgcatgtctaatacatagttaatttcattttaaactttgtagggaatacagagttgaataagacmtaatccgtatgtaccaggggcctacactcacacaaaggagatagaatgtatgcaaatatttacactatgaggtgaacaaatgtttagaagagcatttcagattataaaattttcactgaggagttgaaaattaggataaattaaaaaatataatttagacatgaaatgactagaaaaagagcgttagagataaaatggatattgcaaacaaaaatatacagatctgagaacagggatcatgaataagaaacaaaataaatgcagtttagacttactgaaagaataacaaggaatagatcaaaggccagatgtggcataatatttttaatgaactattgtttttcttttagattgcccagcatttcttaagctgttacaaccacatactgaattctttcagataattacctatcgtacataaagtaatgaggctttatgaaaatcaaggggcattgctctcccctactcaaagtattgctaggtactccaagttgattaaagaaattctctaagatctttaaatcactgactgattgattgattgacagagtcttgcttttttgcccaggctggagtgcagtggtgtgatcatatctcactgcaaactcaggccactgggc

SEQ ID NO: 713970 - DNA, 631 bp, Homo sapiens
gagaacatttttgtyccttgctataaggaagtagcttaaagcaatctctctccaaatgtccttctgcctctcatttcccacctgcaccccaacacacaggcaccaggaaatctcagcaggacagccaagtgcttcatgcagaagcaattagacaaggttataagattctcttcaccttctcctccatgttccccgcagcttatgcagccttcggggtaagcaggaagcagtagagaatccaccaagctcacagaacctctcccagcaagcaaatcatttcaatgtatcacatttaaagtaattcaccagttagaattcaggcctgccaacataccgaatctttctccctatgttgttcaatacataacacttaatagacactttacctataaactcctactttgggagggggtgtgttttaggctccaaatgactgggagttaattcttcatcgaaaaattaatggaattgcagtgagacaaccttatttttgcaaaaaaaaaaaaaccttgtaatattaatattatattgagtcaatcttatttacttataaactaagtttgagcaccagtttgcaatttgtccagcagggtggtctatttagtactgacaaatggctacaaacaataac

SEQ ID NO: 713971 - DNA, 1445 bp, Homo sapiens
tcagggttcatagtggcgtcatgcacgcagactcctgcaagttcccctaagttcttagaggactgctttgccttttgatatgagagttgcaaagttccataaagaatggcccttgtggataagcacaaagtcaagagacagcgattggacagaatttgtgaaggtaagagcgtgtttggcggtttttaccaaacatacgtagtccctcactcaaatcttcgctggctgctcccttgagttggctgtgccactccccaagccagagtccctcctccgattccaacactgcataccattggcaccctctgctgggtgtccttggccgtgggcctggccttggcttaggacaaggcctggcttctggggcggggttggggactaggaggacagtttcagggctggtgggccctgaggtctatgtcttccatgtacctaaggttattttgcatataaaagatggtgttgattaggaccatcttttttcacttcctgaaatctcaggactttacctgttttggattaagatatttacaatgctgaattccctgatactatgagattcctgaagagcccagcattgcccctcgtggtgtgttcatgtccctggtatctttggaaatgtctggaagtgttctgttcatgaaaggaaaaataaacataattaaaatctaatggaaacctggggacaaaactctgaagtgttgattaagcactgcgctcttccagctagcgggtggtaagaaaccagcgtgtgggttcgggtttaggggtgagtgcacctgccagatggggtcagtgctacagggctgctctttgctcagggtgattgctggtactgccctacagggtggctctcggagggaagcgaagatggctccgcagccccctctgcacccttcacgcacacgctggaagtttagtagctgacccaccagtttgtggacaggaatatgcaacccacagggcttcccctgcagctgcccatatggaattgtctgtcctataagtagatgtggctcatgccacacggggtggggacatcatagacattctgctgagtgactccatggcctcacagaactctgcgctgcaagaacacaaaagcactgacattcctggggttcagtataaggagtttggcgttaaagggtttttttaaagtaaacattcasaaattataaaaacctacagagaggttggtaggatggtacagtgaacaccaatattccattcagttttccagattcttttgaggggagataaagatagagatatacatataaatagacactgtgtgagtagatgatggattttcttccagaaccatctgaaaaaattcaggggcagcactttactctggactacctatggcatggcaccttttatccaatttcctactgctcccagtaccggaatgaaccccaggaatctaacctcagggacag

SEQ ID NO: 713972 - DNA, 3158 bp, Homo sapiens
taaatttaatttacttagtaaggccatttttactttctgcagaaagggtacaytctccagcagttttcccacgagagttcacccaacaaaggacacagggtcatttataacctgacacgtccaccctaccgctgtgtccagtttccgttggctggaaagggacctcacattctctatttgtcccgattggctagcaacttagaacttttttaaagaggcaaaggtagaggggaacaaaggaaggaggaagtaacttgtggaatgttgagaaaggtaaaaacaccttcaaataaggaagaggaacaggctatgacctaatgcttgcttggaccagtataagcatgctaaggcaaatatttaggctaaattgcgggagctaagaacataacgtacattgatttccttattacggctagcaaatatttaagaatgttagcacagatctttgaataaattttgcctctaagagaagttagtatttattcctaattagacggggaggaaagtctttgaagaggaacctctgctttactctgtacagctcggagctgcttgcagcactctgacaccttctgtcgggatctttggaagacctgcctggatctcccgtctgtggaaggatccaggtacttcttacaacatctgtgttagggcagctggtgacggcacccggcaaattccagcaactgccctcattccacagaggctccctcctgcaaggccactactgtgactctgagcagcggttcttctcatgaatgtgatagctcggtcagctctaagactgcaacctgcagggacttcatggggcaaccctggggtatgtggccagtgtctgtccttgggcagccgtagcccctgtcaggaacagggagtgactcaggcactggtgtcttgagactgctacggtgtcaggaaacttccataaaatctagtgcgttttaaaaaaagaggccagagccggccaggcacggtggcttattgcctgtaatcccagcattttgggagaccgaggcaggtggatcacctgaggtcaggggttcgaagccagcctggccaacatcgcgaaaccctgtctctgctaaaaatacaaaattagccaggcatggtggcacatgcctgtagtctcagctatttgggaggctaaggcaggagaatcacttgaacctgggaggtggaggttgcagtgagcggagatcgtgccactgcattccagcctgggcaacaaaagtgaaactctgtctccaaaaaaaaaaaagccagagccagcctttgcctcctatgtcagaaatgatcatttgcagctgctttgctttggggtagaagcctcaaatcctgaaaccctttaccctggggcaggttgtcttgtgctgtaagcaacagaaacccatttagatcatttttaaataatgagaatttctgttggaaggatgtcggcttagctcacacagtgtctaggaagactggaaaatgggtctcagaaacactgcaggcagctttgtgtggcaggatcaatccagttccttcttggtgactgctcaggggaacatcccatttgccttgcatggtactgagccagaaggtcaactccaggcctgtctgcctgtatccgagaaagcagcagctccccacaatgaaatgtagcgttttccagctccggatccttccgccatcctccctgagatctacctgccttaggatctgtgagatccacgcactttgcttttcctgggtgtctggttactgttcacaaaagtccagcagtttggcctggtgttgtctttgtttttgactgagcatctctcatttcacaagtatttattgcagctgcagctctaagcaataccaggcccagggatgggcgtcagcactgccttgagctggtgcacagcacatcccggacggaggggcagggccgtcctggtgcacacgcaagcctgaaaccagatagtaattgataccaggggagccggcagggctttctgctctacacagttaatgtgggcaagctgtcaacagtaaggcactgatgtcatttccgtgatgtgtccagttgcagctggaattgtcctgaaatggacaaggcaggtttactggcgggagacggtagaaaggaaaaatagcgcatagagggcaccagggccctgtgaccctcgtccgcaagtgtctcctcatacctcgtggttgcgcaccgtggtacggggccaccctgagcgctgactcccgggctgtgaagtgggaagaacagcagcactgcaggactcttgtcagccttgtggtctgtacgcatggaaaaggccgtcagctgtgcatagcaactggaagccatggctttttagcataaagcccagttcttcggaagccctcattacgtactgcgccttgggctttctcctcgcaaattcccaatcctgccccactgggcctggggaccccacgtccctgaaagggtcgtgttccatcttaatgtatatgaatcttactctgtgtgtcagttacatcctaataggttaaaaacttgctcaaatggtcagaagcctgaaagaggcgtcaggaatcctgtgtgaggtaagatgggggatctgtttgcaccttcatctctccatatgagatcttccatatgagctcttccagaaacctctgccccaggctccagcaagcctgtagggcagcggctgctaggcaagggcttgaatttcagtccagattctctggtgtgtgggtggacagtttccttctgggactgaaggagcacttggaagatggtgctttcccttctagagcaaaccttggcattgtcccagctaagctctcatgcccagggcttgggggtctcctgtggcctccatatccctgcacctcatgcagggcacgcaagcatcccacccactcccaaccccccacctccagccgtcgtgcccggcatcttttcccagcatgagaacccgttggcttttctcttttcccgccttgccatgaaggacctgctgccaggattcgagcctcagaccttggacaggtctcgggccagcctcagccacgttctgcgtgcccggccatcagggagggtagagggtgggtttcaccaaggagaaaggcaacccgtgtcggggagggagccgatcgctaggcaacctggagtttgttaccctggtaac

SEQ ID NO: 713973 - DNA, 3158 bp, Homo sapiens
taaatttaatttacttagtaaggccatttttactttctgcagaaagggtacactctccagcagttttcccacgagagttcacccaacaaaggacacagggtcatttataacctgacacgtccaccctaccgctgtgtccagtttccgttggctggaaagggacctcacattctctatttgtcccgattggctagcaacttagaacttttttaaagaggcaaaggtagaggggaacaaaggaaggaggaagtaacttgtggaatgttgagaaaggtaaaaacaccttcaaataaggaagaggaacaggctatgacctaatgcttgcttggaccagtataagcatgctaaggcaaatatttaggctaaattgcgggagctaagaacataacgtacattgatttccttattacggctagcaaatatttaagaatgttagcacagatctttgaataaattttgcctctaagagaagttagtatttattcctaattagacggggaggaaagtctttgaagaggaacctctgctttactctgtacagctcggagctgcttgcagcactctgacaccttctgtcgggatctttggaagacctgcctggatctcccgtctgtggaaggatccaggtacttcttacaacatctgtgttagggcagctggtgacggcacccggcaaattccagcaactgccctcattccacagaggctccctcctgcaaggccactactgtgactctgagcagcggttcttctcatgaatgtgatagctcggtcagctctaagactgcaacctgcagggacttcatggggcaaccctggggtatgtggccagtgtctgtccttgggcagccgtagcccctgtcaggaacagggagtgactcaggcactggtgtcttgagactgctacggtgtcaggaaacttccataaaatctagtgcgttttaaaaaaagaggccagagccggccaggcacggtggcttattgcctgtaatcccagcattttgggagaccgaggcaggtggatcacctgaggtcaggggttcgaagccagcctggccaacatcgcgaaaccctgtctctgcyaaaaatacaaaattagccaggcatggtggcacatgcctgtagtctcagctatttgggaggctaaggcaggagaatcacttgaacctgggaggtggaggttgcagtgagcggagatcgtgccactgcattccagcctgggcaacaaaagtgaaactctgtctccaaaaaaaaaaaagccagagccagcctttgcctcctatgtcagaaatgatcatttgcagctgctttgctttggggtagaagcctcaaatcctgaaaccctttaccctggggcaggttgtcttgtgctgtaagcaacagaaacccatttagatcatttttaaataatgagaatttctgttggaaggatgtcggcttagctcacacagtgtctaggaagactggaaaatgggtctcagaaacactgcaggcagctttgtgtggcaggatcaatccagttccttcttggtgactgctcaggggaacatcccatttgccttgcatggtactgagccagaaggtcaactccaggcctgtctgcctgtatccgagaaagcagcagctccccacaatgaaatgtagcgttttccagctccggatccttccgccatcctccctgagatctacctgccttaggatctgtgagatccacgcactttgcttttcctgggtgtctggttactgttcacaaaagtccagcagtttggcctggtgttgtctttgtttttgactgagcatctctcatttcacaagtatttattgcagctgcagctctaagcaataccaggcccagggatgggcgtcagcactgccttgagctggtgcacagcacatcccggacggaggggcagggccgtcctggtgcacacgcaagcctgaaaccagatagtaattgataccaggggagccggcagggctttctgctctacacagttaatgtgggcaagctgtcaacagtaaggcactgatgtcatttccgtgatgtgtccagttgcagctggaattgtcctgaaatggacaaggcaggtttactggcgggagacggtagaaaggaaaaatagcgcatagagggcaccagggccctgtgaccctcgtccgcaagtgtctcctcatacctcgtggttgcgcaccgtggtacggggccaccctgagcgctgactcccgggctgtgaagtgggaagaacagcagcactgcaggactcttgtcagccttgtggtctgtacgcatggaaaaggccgtcagctgtgcatagcaactggaagccatggctttttagcataaagcccagttcttcggaagccctcattacgtactgcgccttgggctttctcctcgcaaattcccaatcctgccccactgggcctggggaccccacgtccctgaaagggtcgtgttccatcttaatgtatatgaatcttactctgtgtgtcagttacatcctaataggttaaaaacttgctcaaatggtcagaagcctgaaagaggcgtcaggaatcctgtgtgaggtaagatgggggatctgtttgcaccttcatctctccatatgagatcttccatatgagctcttccagaaacctctgccccaggctccagcaagcctgtagggcagcggctgctaggcaagggcttgaatttcagtccagattctctggtgtgtgggtggacagtttccttctgggactgaaggagcacttggaagatggtgctttcccttctagagcaaaccttggcattgtcccagctaagctctcatgcccagggcttgggggtctcctgtggcctccatatccctgcacctcatgcagggcacgcaagcatcccacccactcccaaccccccacctccagccgtcgtgcccggcatcttttcccagcatgagaacccgttggcttttctcttttcccgccttgccatgaaggacctgctgccaggattcgagcctcagaccttggacaggtctcgggccagcctcagccacgttctgcgtgcccggccatcagggagggtagagggtgggtttcaccaaggagaaaggcaacccgtgtcggggagggagccgatcgctaggcaacctggagtttgttaccctggtaac

SEQ ID NO: 713974 - DNA, 3158 bp, Homo sapiens
taaatttaatttacttagtaaggccatttttactttctgcagaaagggtacactctccagcagttttcccacgagagttcacccaacaaaggacacagggtcatttataacctgacacgtccaccctaccgctgtgtccagtttccgttggctggaaagggacctcacattctctatttgtcccgattggctagcaacttagaacttttttaaagaggcaaaggtagaggggaacaaaggaaggaggaagtaacttgtggaatgttgagaaaggtaaaaacaccttcaaataaggaagaggaacaggctatgacctaatgcttgcttggaccagtataagcatgctaaggcaaatatttaggctaaattgcgggagctaagaacataacgtacattgatttccttattacggctagcaaatatttaagaatgttagcacagatctttgaataaattttgcctctaagagaagttagtatttattcctaattagacggggaggaaagtctttgaagaggaacctctgctttactctgtacagctcggagctgcttgcagcactctgacaccttctgtcgggatctttggaagacctgcctggatctcccgtctgtggaaggatccaggtacttcttacaacatctgtgttagggcagctggtgacggcacccggcaaattccagcaactgccctcattccacagaggctccctcctgcaaggccactactgtgactctgagcagcggttcttctcatgaatgtgatagctcggtcagctctaagactgcaacctgcagggacttcatggggcaaccctggggtatgtggccagtgtctgtccttgggcagccgtagcccctgtcaggaacagggagtgactcaggcactggtgtcttgagactgctacggtgtcaggaaacttccataaaatctagtgcgttttaaaaaaagaggccagagccggccaggcacggtggcttattgcctgtaatcccagcattttgggagaccgaggcaggtggatcacctgaggtcaggggttcgaagccagcctggccaacatcgcgaaaccctgtctctgctaaaaatacaaaattagccaggcatggtggcacatgcctgtagtctcagctayttgggaggctaaggcaggagaatcacttgaacctgggaggtggaggttgcagtgagcggagatcgtgccactgcattccagcctgggcaacaaaagtgaaactctgtctccaaaaaaaaaaaagccagagccagcctttgcctcctatgtcagaaatgatcatttgcagctgctttgctttggggtagaagcctcaaatcctgaaaccctttaccctggggcaggttgtcttgtgctgtaagcaacagaaacccatttagatcatttttaaataatgagaatttctgttggaaggatgtcggcttagctcacacagtgtctaggaagactggaaaatgggtctcagaaacactgcaggcagctttgtgtggcaggatcaatccagttccttcttggtgactgctcaggggaacatcccatttgccttgcatggtactgagccagaaggtcaactccaggcctgtctgcctgtatccgagaaagcagcagctccccacaatgaaatgtagcgttttccagctccggatccttccgccatcctccctgagatctacctgccttaggatctgtgagatccacgcactttgcttttcctgggtgtctggttactgttcacaaaagtccagcagtttggcctggtgttgtctttgtttttgactgagcatctctcatttcacaagtatttattgcagctgcagctctaagcaataccaggcccagggatgggcgtcagcactgccttgagctggtgcacagcacatcccggacggaggggcagggccgtcctggtgcacacgcaagcctgaaaccagatagtaattgataccaggggagccggcagggctttctgctctacacagttaatgtgggcaagctgtcaacagtaaggcactgatgtcatttccgtgatgtgtccagttgcagctggaattgtcctgaaatggacaaggcaggtttactggcgggagacggtagaaaggaaaaatagcgcatagagggcaccagggccctgtgaccctcgtccgcaagtgtctcctcatacctcgtggttgcgcaccgtggtacggggccaccctgagcgctgactcccgggctgtgaagtgggaagaacagcagcactgcaggactcttgtcagccttgtggtctgtacgcatggaaaaggccgtcagctgtgcatagcaactggaagccatggctttttagcataaagcccagttcttcggaagccctcattacgtactgcgccttgggctttctcctcgcaaattcccaatcctgccccactgggcctggggaccccacgtccctgaaagggtcgtgttccatcttaatgtatatgaatcttactctgtgtgtcagttacatcctaataggttaaaaacttgctcaaatggtcagaagcctgaaagaggcgtcaggaatcctgtgtgaggtaagatgggggatctgtttgcaccttcatctctccatatgagatcttccatatgagctcttccagaaacctctgccccaggctccagcaagcctgtagggcagcggctgctaggcaagggcttgaatttcagtccagattctctggtgtgtgggtggacagtttccttctgggactgaaggagcacttggaagatggtgctttcccttctagagcaaaccttggcattgtcccagctaagctctcatgcccagggcttgggggtctcctgtggcctccatatccctgcacctcatgcagggcacgcaagcatcccacccactcccaaccccccacctccagccgtcgtgcccggcatcttttcccagcatgagaacccgttggcttttctcttttcccgccttgccatgaaggacctgctgccaggattcgagcctcagaccttggacaggtctcgggccagcctcagccacgttctgcgtgcccggccatcagggagggtagagggtgggtttcaccaaggagaaaggcaacccgtgtcggggagggagccgatcgctaggcaacctggagtttgttaccctggtaac

SEQ ID NO: 713975 - DNA, 3158 bp, Homo sapiens
taaatttaatttacttagtaaggccatttttactttctgcagaaagggtacactctccagcagttttcccacgagagttcacccaacaaaggacacagggtcatttataacctgacacgtccaccctaccgctgtgtccagtttccgttggctggaaagggacctcacattctctatttgtcccgattggctagcaacttagaacttttttaaagaggcaaaggtagaggggaacaaaggaaggaggaagtaacttgtggaatgttgagaaaggtaaaaacaccttcaaataaggaagaggaacaggctatgacctaatgcttgcttggaccagtataagcatgctaaggcaaatatttaggctaaattgcgggagctaagaacataacgtacattgatttccttattacggctagcaaatatttaagaatgttagcacagatctttgaataaattttgcctctaagagaagttagtatttattcctaattagacggggaggaaagtctttgaagaggaacctctgctttactctgtacagctcggagctgcttgcagcactctgacaccttctgtcgggatctttggaagacctgcctggatctcccgtctgtggaaggatccaggtacttcttacaacatctgtgttagggcagctggtgacggcacccggcaaattccagcaactgccctcattccacagaggctccctcctgcaaggccactactgtgactctgagcagcggttcttctcatgaatgtgatagctcggtcagctctaagactgcaacctgcagggacttcatggggcaaccctggggtatgtggccagtgtctgtccttgggcagccgtagcccctgtcaggaacagggagtgactcaggcactggtgtcttgagactgctacggtgtcaggaaacttccataaaatctagtgcgttttaaaaaaagaggccagagccggccaggcacggtggcttattgcctgtaatcccagcattttgggagaccgaggcaggtggatcacctgaggtcaggggttcgaagccagcctggccaacatcgcgaaaccctgtctctgctaaaaatacaaaattagccaggcatggtggcacatgcctgtagtctcagctatttgggaggctaaggcaggagaatcacttgaacctgggaggtggaggttgcagtgagcsgagatcgtgccactgcattccagcctgggcaacaaaagtgaaactctgtctccaaaaaaaaaaaagccagagccagcctttgcctcctatgtcagaaatgatcatttgcagctgctttgctttggggtagaagcctcaaatcctgaaaccctttaccctggggcaggttgtcttgtgctgtaagcaacagaaacccatttagatcatttttaaataatgagaatttctgttggaaggatgtcggcttagctcacacagtgtctaggaagactggaaaatgggtctcagaaacactgcaggcagctttgtgtggcaggatcaatccagttccttcttggtgactgctcaggggaacatcccatttgccttgcatggtactgagccagaaggtcaactccaggcctgtctgcctgtatccgagaaagcagcagctccccacaatgaaatgtagcgttttccagctccggatccttccgccatcctccctgagatctacctgccttaggatctgtgagatccacgcactttgcttttcctgggtgtctggttactgttcacaaaagtccagcagtttggcctggtgttgtctttgtttttgactgagcatctctcatttcacaagtatttattgcagctgcagctctaagcaataccaggcccagggatgggcgtcagcactgccttgagctggtgcacagcacatcccggacggaggggcagggccgtcctggtgcacacgcaagcctgaaaccagatagtaattgataccaggggagccggcagggctttctgctctacacagttaatgtgggcaagctgtcaacagtaaggcactgatgtcatttccgtgatgtgtccagttgcagctggaattgtcctgaaatggacaaggcaggtttactggcgggagacggtagaaaggaaaaatagcgcatagagggcaccagggccctgtgaccctcgtccgcaagtgtctcctcatacctcgtggttgcgcaccgtggtacggggccaccctgagcgctgactcccgggctgtgaagtgggaagaacagcagcactgcaggactcttgtcagccttgtggtctgtacgcatggaaaaggccgtcagctgtgcatagcaactggaagccatggctttttagcataaagcccagttcttcggaagccctcattacgtactgcgccttgggctttctcctcgcaaattcccaatcctgccccactgggcctggggaccccacgtccctgaaagggtcgtgttccatcttaatgtatatgaatcttactctgtgtgtcagttacatcctaataggttaaaaacttgctcaaatggtcagaagcctgaaagaggcgtcaggaatcctgtgtgaggtaagatgggggatctgtttgcaccttcatctctccatatgagatcttccatatgagctcttccagaaacctctgccccaggctccagcaagcctgtagggcagcggctgctaggcaagggcttgaatttcagtccagattctctggtgtgtgggtggacagtttccttctgggactgaaggagcacttggaagatggtgctttcccttctagagcaaaccttggcattgtcccagctaagctctcatgcccagggcttgggggtctcctgtggcctccatatccctgcacctcatgcagggcacgcaagcatcccacccactcccaaccccccacctccagccgtcgtgcccggcatcttttcccagcatgagaacccgttggcttttctcttttcccgccttgccatgaaggacctgctgccaggattcgagcctcagaccttggacaggtctcgggccagcctcagccacgttctgcgtgcccggccatcagggagggtagagggtgggtttcaccaaggagaaaggcaacccgtgtcggggagggagccgatcgctaggcaacctggagtttgttaccctggtaac

SEQ ID NO: 713976 - DNA, 617 bp, Homo sapiens
aaattaagatggctagttactaggtagaacaacaacagattaaggttatttggatgccaaaaattgggaaagcatactagggatgtgatacgagtgatacagcatgaaactgtagctttctgaggctacttatttagtagtcaaaggatgaactttttatttctcacttaaatgttaaagaaaaaaacaacaaacattcataagaatacttttattttaaataagtataagagataaaaaatgtcctgcaaaatttctgacttaattgtctgggtgtggcgcaaacatttatttttgcaaatgtcaccaggcaattctagtaagcatctttgaaccactactrtgcaccctgacagcctccatgtctgggagaatttctggtaaaggtgatgtgatgacaatgatagtgactgttctggcttttcaaatggcagtgggagaggtttgcccattaaaaaaaaataaatatatgcactctaaaacaaatattggatctaatgtttttagtgagttttcatttgccttttaattaattatattttacctgtgtttttcttttaattgcaaggtctaaacattctttatagtttctgtctttaatggcgtttttaatgaca

SEQ ID NO: 713977 - DNA, 617 bp, Homo sapiens
aaattaagatggctagttactaggtagaacaacaacagattaaggttatttggatgccaaaaattgggaaagcatactagggatgtgatacgagtgatacagcatgaaactgtagctttctgaggctacttatttagtagtcaaaggatgaactttttatttctcacttaaatgttaaagaaaaaaacaacaaacattcataagaatacttttattttaaataagtataagagataaaaaatgtcctgcaaaatttctgacttaattgtctgggtgtggcgcaaacatttatttttgcaaatgtcaccaggcaattctagtaagcatctttgaaccactactgtgcaccctgacagcctccatgtctgggagaatttctggtaaagrtgatgtgatgacaatgatagtgactgttctggcttttcaaatggcagtgggagaggtttgcccattaaaaaaaaataaatatatgcactctaaaacaaatattggatctaatgtttttagtgagttttcatttgccttttaattaattatattttacctgtgtttttcttttaattgcaaggtctaaacattctttatagtttctgtctttaatggcgtttttaatgaca

SEQ ID NO: 713978 - DNA, 1995 bp, Homo sapiens
gctgttgttgaataaaaaagcttgacttacatagactccaccacatgacttaaaaggccctggaatgaaaggaaggcctggtgtaacatccttgggacctttgagaaagatagttatattttaggggatatgaattggggattgggagaaattagaatttatttaacaagtattttttgagcacctactacacgccagccactgtttcaggtgttagaaattcagcagtgaacaaaacaaagttctttttctcatggagcccacacttgggtggagaacacaagaactacccaagcacataaatacccagtatgtcaggggatgctaactgcttatgtggaataatggtcctttgtcacaactgatttttttttttttttgagatggggtcttactgtgttgcccaggctggcctcaaactcctgggctgaagtgatcctcatgtctcaggctcctgagtagctgggactacagttatgcactgccatgccccaaccttcttcacaattgaaagttacttgctttttggatttaaagtatataatttcagaaaataataataccccctaatagatatgttgatgtttctggcttgtattatgatactaagtgatgtgcattagacattaccagccagagctctgtcactgctgtgaaattattttgcctaacctcagtcactattgttggtgtcgcttctgatattcctatgttacaaacactcattcttcagttgaacacaaatgatttaatatatgcaaatgaatgtggaagtttttttgttttttkttttgtttgttttttttttttttggagacacagagtcttgctctgtcactcaggctggagtgcggtggcgcgatcttggctcactgcaagctccgcctcccaggttcactccattctcctgcctcagcctcccaagtagctgggactacaggcatccaccaccacgcccggctaattttttgtatttttagtgagacagggtttcaccgtgttagccaagatggtctcgatctcctgacctcgtgatctgcccgcctcggcctcccaaagtgctgggattacaggcgtgaaccaccgtgcccggccgcagattgttaataggatctatatttgattttagtggacatgtgagggcctgaaggttggttcttgtgctagagggaaaaagtggtggctgaccagttgaagtgatggagaattaataaaattatttaaagcatttgacagtatcttaagtaccagcctctcaagttatatactgtgtgctttattggacaaacacaacgtgctattacaatcaaggtataatggtacttcagggctaaggttacactgaaaaatttgtatcatgtagatagtttctttggctcttagagtttttgtgacttctcagactttaattttgctatagttttgttccaacaacagaaacattaaggccatctaagataaactcagctgatacattttaacaaatttgggcatacagtacttaaaatataacatccagcattaaccacattaatttgataagcgaacaaagtgaccaataattaaagggccctaagtaagttaaactttgcatttgaattctctagatgtttgttacagacagacatgtacatatgtttccccctacttctttgtaacggcttaggctcattagacccaaggggttataaaatatttttagtagagaagagaacttataggtagtgctggcaaaaaaagaaattatgtagccaggttccatgctatttgtcattagtgacttctttcatctttattgagctctgtgaggtaggttattctattcccttctacagaagaggcttggagagatgctgccttacagtagccagctttgcaccccagcctgcctgtagcatctcttaagacaagataagacatgattgctggctgggtgtgatggctcacgcctgtaatcccagcactttgggaggccaaggcgggtgggtcacttga

SEQ ID NO: 713979 - DNA, 2642 bp, Homo sapiens
tgaaggaactgcactgcagtccttgctactccttgccttcctcactggactgcacgccacttggggacagagaccgtgtcatattcatttatatccccaaagctaagcactgggcctggtatactgtggacactcatttgttgaaataaaaagcaataacattaaaatgctaattactactaaagattaatgtaccttgtagacagagagcagctaattccacagctgtttcataagggcatttcaatcttgaaaaaaataaaatgaaattaattcgaaataggaacttaagtacaaccatacaaaatgtcattaaaatcatttttcaaaaggtagcgctatttagataatgacttgtattcttagtcatatttttgctgtctacattaaagaatgcaacaagcgacttgcactacaaatttcccaaagtcaattctcatcatagggcaaaataacccaatgtaggtatagtttctatcaatcgtgtacaattttactgaatttggcaagaatggaaaagtttggaaaacagaatgaaaagtattccctttgccttattatttttaaacatattttaaatttattttatcttgatatagtacatgcatcttttttaaagctgccttcaaatctttcttgaaacaaggtcatagcgttaaaaataaacacacagacaccatatcgaacactgccagcatggctggatacactcagcattctaagtctatctaaggcacagccatagaagagtactactgcaaattcagtgatctcattcatacgtaatatttcaaatttggttagaaaaacaataatgacatacattggtatagcacttcatagttttcaaagccttttcatttatattatccaatttggtcaatgcatcaagtttgtaaacctttaggataggtgttgccagtgagcccccccgacccatctcccattatatagatgaggaactcagtgttaagggctcttgccccaggtcatccagctggaaaggagcaatgttgggacttgaacaccattctgctttkaaatacaaagcaggctaaactgcatgtaaactacaaagtactgtacaaatgcaaggtgttgccattaatatttttccaaaccgaagacaatttctagagttacacagcctttagtatgaggagcacagtatggagagagagaggtagagagagagagagagagggagagaggattaaaaaaaagtacacacactcataatacacacaccaaccaaaggtctgtattgcacggctgaataaggcaaatgtatacactgtacaatctacttgttctattggtctatggagtacatttcactgaggtttttatagcacatattctatggagagtttgcaaattcggaaattacatatttaatttccttcagattatattcaaaatcagaacgtattcttttcaatagcaggggttactttttagactcaatatagccttagtttttcatgtaatagaaaatattcaatacagatgctgaaaaatgacacagttataagagctatgcctgttgaaacctcttatctttacggtaaattaagactgcatgcgaaatcaaccacttcagtgccaatgcttcttatactcaatgatcactgtgtgctgccagaggcctagtatttcaaagccatttttaagaggagaaaaggaagtgagatgagatgtctaaaactttctactggaatcagaacataacctctttccattacatatatgcagatggtgatgaatgacactttttgactgtccaaatacttgtaagtgtatacatactaataacgtatcttgcttgcaaatacgacaaaagccattatgaatgggacagtgatgtgatcagggagagagttattcccaaatacacatcacttaagatattaaatggtcttggaaatgcttcaagccatatagtaatcatttaaaataggatgataatgacagtgatacaagtattagactcactttacaatgcctggtgcactttttttgaattttgaaaagggaacaagggtaaaagagttaaaacagtgaattattttgaaatacactatgatctatcctgggttaagagttagaacaaaaacatacttactttccagaaagaatgtcatgcctgagttgtaaaacaaacaggtacctgacaaacatatacaaaagtcaacagagggtaactctttcccagctgctcccaatccccagcttcccactgcaaaccccaccccacacacagcatggagttttgcattgtaaaaaaggagtccaaatcaaatgagaactttggtggaagcatctcctcttgggtctccaggaaggcatcccagaaccacgctaggaaggtgagtgcatgtggggaactcgcaagatacttgtaggatggaacgtgatacacgtcatggtccaatgacggcctccacaaccccctccgtgctggagaagagagccgaacgtggcacatgggcatgcaacatgtccaataacccaggcagggtggggccgcggggtctggctctcagccagctccaccagcggattccagatctgctgcggtggattgtaacaaaaagtttgcagctgattctagtcaaaaaaccactgggggttcttttccc

SEQ ID NO: 713980 - DNA, 643 bp, Homo sapiens
tttgaaatggagttttgctcttgtcgcccagcctggaggtgcagtggtgcaatcttgactcactgcaacctctgcctcctggattcaagcgattctgctgcctcagcctcccgagtagctgggattacaggcgtgcgccaccaagcccggcttatttttagtagagacagggtttcaccatgttggccaggctggtctcaactcccgacctcaagtgatccgcccacctcggcgtcccaaagtgctgggattacaggcgtgagccaccgcgcccggccaaatgattccatttctttcttcaacaagcagaatatagggaagagaagagatagaggggatacctacagattaaaagagatttaaaatacacttttttcttaaaggcaaaatgaaaatgcamcgtctacagatgcacacttgggtgacaaaactggagaagaacaaggaagcagccacaataaagtcagggtaattgttgatcttctggcaaggttacactaagggcttctgggcggtgggcagggttctcccctgacttgtgtagtgttaccaggatgtctgccttcttgtaacccagtaaactgggtacctttgttttctttgtgcagctgtatttgtgtgacacacatagcagcagtaacac

SEQ ID NO: 713981 - DNA, 631 bp, Homo sapiens
tgttaaaattcaggcagtttgaattcagagcccactctcccttttttttgtttatttgcagattttatttcatgtctgtgtgtgtatgtgtgtgytgaaatctttcaaatatacagaaatgtacagagactaataaaatgaatacacttcgcccatcacccagcactctccagtgctttgccatttaaccacaaatcagtttcattctcagtagtgtctaattgttccatttgtcttttttttttcttggtctgtcttgctaaagaattctttatctattgttttctgatttagttgctcttttctattgtctctttattttctattttgttaatttcccttctgctactttctttgaatttactcttttgttctttttcttacttcttgatttgagttcttctttaccaatataaatatttacagctatacatttcctctcagaattgttttagccatttcccactcattttgaaattcattcaaatatataatttccgctaagatttcttctttgattaattatttcgaagaatttttaaaatttcagacttatgggggattagttatcttttaattattgatttctgattgaattgctttgcggtcagagacatatatgatattgggg

SEQ ID NO: 713982 - DNA, 631 bp, Homo sapiens
tgttaaaattcaggcagtttgaattcagagcccactctcccttttttttgtttatttgcagattttatttcatgtctgtgtgtgtatgtgtgtgttgaaatctttcaaatatacagaaatgtacagagactaataaaatgaatacacttcgcccatcacccagcactctccagtgctttgccatttaaccacaaatcagtttcattctcagtagtgtctaattgttccatttgtcttttttttttcttggtctgtcttgctaaagaattctttatctwttgttttctgatttagttgctcttttctattgtctctttattttctattttgttaatttcccttctgctactttctttgaatttactcttttgttctttttcttacttcttgatttgagttcttctttaccaatataaatatttacagctatacatttcctctcagaattgttttagccatttcccactcattttgaaattcattcaaatatataatttccgctaagatttcttctttgattaattatttcgaagaatttttaaaatttcagacttatgggggattagttatcttttaattattgatttctgattgaattgctttgcggtcagagacatatatgatattgggg

SEQ ID NO: 713983 - DNA, 1541 bp, Homo sapiens
gtattgctttcattacatcataaagtcaaaacaccatgtcaaatgacagtaagttgggaactgtctgttatttaaataaagtacttaatatattagaaaacctttgtaccataattggcaataaaattaagaattttaagaggttttagtccatctatttccaaattctacttatcttgaggaaggtttacatttaagtgatatatttcatttcaaagactttcttaacattgatctattcaacagatttttcagcatcaactaaatatctgacaccactgctatgtgttggggatgtcaattcaaaatatagatggcttctggattaatcctgatagaaatctgttttcaaaaagtcaatgtattttgggaagagttataataatgtatcatagctctaaggtacaataatacaatatataaattcatgtcaatcttgctcagaaattctattcagatgcctaaaatctaatcaatatatcataattaattaaaacagtttactctggtagttctctgtgataaatttaatatattttcactgtattagacataaataatgtttattaataaatcccactgcaaaacagttcgggtggctttgggtctacccagttctcccctgactcttgcttgtatttttcaagaataaccatagaatgtgctaggaaggcaacattctgagaagaggagaaattgtcctgaacagcattctatgttctagtctccctgctagaaacaggatgtccttcatgccttatcccagagtttcctgggaccctggtatataagacccaagattgctgttttctagagtcctccagggtcagtgcaagggggacacatgcagataaaattccgtctaacccaggcagcttttctgagcctcagggaaccagctcacagtgaatcccaagtttctgttactccttgccgcccatctataaactgacttcatggatgttcggatgtgtgtgcggatgttctgactcattggactcggacaagttggtaactctgaactttcttcatatccatctaatcatggcactcaaaatgaattaacgtacttgagaatttgaaaagatcaaaaatattttctctgatatggacttactactactgctgtatatacacagacaaatsatagtggctatgttccaacaaaactctatttacagaaacaggcaaaaattggtcagtaggctgtcatttgctaatcatcgattcagataatattacatctgattttcattactcaattcttgaaagattgatactgtatacaacacaattaacgtggaatactgggaaaatggaatccaaaatactcattttaaaacattaatttgttaacacaattcattttaatgattccacaaagccaaaagacaaagtcggtataaggcagaggtggtatttttttgaaaatctacgagtgtgtcctgctgactatcgagttacatagagcacttatcaagaaaataaaaataaatcctagaaatgtcagtattgctttaattcaattcaaatttaaagca

SEQ ID NO: 713984 - DNA, 1541 bp, Homo sapiens
gtattgctttcattacatcataaagtcaaaacaccatgtcaaatgacagtaagttgggaactgtctgttatttaaataaagtacttaatatattagaaaacctttgtaccataattggcaataaaattaagaattttaagaggttttagtccatctatttccaaattctacttatcttgaggaaggtttacatttaagtgatatatttcatttcaaagactttcttaacattgatctattcaacagatttttcagcatcaactaaatatctgacaccactgctatgtgttggggatgtcaattcaaaatatagatggcttctggattaatcctgatagaaatctgttttcaaaaagtcaatgtattttgggaagagttataataatgtatcatagctctaaggtacaataatacaatatataaattcatgtcaatcttgctcagaaattctattcagatgcctaaaatctaatcaatatatcataattaattaaaacagtttactctggtagttctctgtgataaatttaatatattttcactgtattagacataaataatgtttattaataaatcccactgcaaaacagttcgggtggctttgggtctacccagttctcccctgactcttgcttgtatttttcaagaataaccatagaatgtgctaggaaggcaacattctgagaagaggagaaattgtcctgaacagcattctatgttctagtctccctgctagaaacaggatgtccttcatgccttatcccagagtttcctgggaccctggtatataagacccaagattgctgttttctagagtcctccagggtcagtgcaagggggacacatgcagataaaattccgtctaacccaggcagcttttctgagcctcagggaaccagctcacagtgaatcccaagtttctgttactccttgccgcccatctataaactgacttcatggatgttcggatgtgtgtgcggatgttctgactcattggactcggacaagttggtaactctgaactttcttcatatccatctaatcatggcactcaaaatgaattaacgtacttgagaatttgaaaagatcaaaaatattttctctgatatggacttactactactgctgtatatacacagacaaatcatagtggctatgttccaacaaaactctatttacagaaacaggcaaaaattggtcagtaggctgtcatttgctaatcatcgattcagataatattacatctgattttcattactcaattcttgaaagattgatactgtatacaacacaattaacgtggaatactgggaaaatggaatccaaaatactcattttaaaacattaatttgttaacacaattcattttaatgattccacaaagccaaaagacaaagtcggtataaggcagaggtggtatttttttgaaaatctacragtgtgtcctgctgactatcgagttacatagagcacttatcaagaaaataaaaataaatcctagaaatgtcagtattgctttaattcaattcaaatttaaagca

SEQ ID NO: 713985 - DNA, 2412 bp, Homo sapiens
tctcattttgaaagttgcttttatacccttcatttttctatattactgtttaaaattttatagctgtggcagaacttcagaggatgctatagttgttttgtttcgaaactagttaaagagcaaaatggaaaaagtaaagcaacaaggcagtaactggttagtaattaaacctaagttatcaaatggtcagtaatggtaagaatggcaaatgttatccgtactatccagttatataggaaatatggatttgttcatttatatatacatggagtcatcccataacaataaaataagaacaatgctcagatgttttactctagtacctgtcattcctatgtaacacttaaattatcttaaaagcaattttctattagattgtgtattttcaaaaaacacgttgcatgatgaaayttgccagctgtattaagatttttctgatcctttcaaaagtaaaaattgatgttttgcaacaattcttcaattatctttaaaaactatttttcttactttccactgttttctgaatttttactgtacctatttaaactatttccaaacaacagtaggagttattgttctaaagtcatgcttctaataatgttaaaatagtattgtttctgagatccatctccatgttctgaagagaaaccatataaaagctgtttttaaaactcaacccattatttgagtgccaagttaagtgacacaggtgtattgcttctgactcacacataattgcaatacagtcaaacaaagcaggatgtttttgttgttcagaaaacatttggctctgtggttttgttccatttcatatcagaaatagcaccaccaataaacacaataacaataacaacaaaaaaataaatttggttaccaatttccagttagtgttaaaattcaaggaaccaaccaaaaggctctgtacttcgaaggccaagacaatctcctgaacactgatttcctcagctcctgctaatatcaagaattagtttgtggttagattagcttatgcttttaaataacattaatgattttaaagcactggataaattctcgtttcaggggatatgaacaagtccattgccttgtatttaaacaaaatacaattttgccttttgcagctctgcaaaggttattgttatttactatgcatcaataaataatctttcaattatcttgtaagcacatccaaaaatagcatgacaatcaaaaggcaatggtgtatccagtaattgttccaaatagataattttgataaatatgatctttgcttaatttcaggtaaaaaagaaatcttacgaaatttagttttgctagacttaaaccatgcaaaaataccctatgaaatggacactctatttaaactgtatactactgtcttttacagtgattataacttattaaaatcattttttcatctcttgtatgaataatatatttacaagaaaacattacttaagctaatacaggtggggggttcccacctcctgtgtttttttaaaaaaataagcagtttcatttgagttaaaaagtatatttctttataatatttgttatgtatgtttattaacttatgctaacaatggcttagctcagcaaactgaaaggaagccgtcctttaacttatgtgtgcgtacgtatgtgtgtgtgttgtgctaaattccattgcctgtacttctaaattatttgttgagccctttaagactttttttttcacgtttttctgtatcaaactaatcacatttatactcacagcatatgtgtgttcttattttctctactctgtattttgataatattttaaagaaaagaaccataatagaaattccctagaaataatttacaggactaatgaatttgtaggtctcttagacagttctacattacagtcacattaatattctctcctttttataaggcttgaagtaaatcccacgacactagaagcatttagatactgattacttgcgattggttcctggtgatttgctcttaataatttccagttgaatttaatgaaagtatgattcctgaaatgctgcttcattaaaattgcagcttttcccctttaagtgtggtttcggtcatttcacccattttgcggtgtgttttcctcccccttaaaaagtaatgattgagaaagcagaaataattaagaataccactttagttctccctggaactcatcctcagagtttctctgagtgaaatgatgcaagctgcatttcatcaggattttataatactattttcccattcaatgagattatttaataatatataaagttttaaaacataaatatgaattttgggggtagttgagggaaattgaagaaagaatctgttgcatgtacaagagaactgaggtctttagaatttttactaatatgtatatacatatatttaggttga

SEQ ID NO: 713986 - DNA, 2412 bp, Homo sapiens
tctcattttgaaagttgcttttatacccttcatttttctatattactgtttaaaattttatagctgtggcagaacttcagaggatgctatagttgttttgtttcgaaactagttaaagagcaaaatggaaaaagtaaagcaacaaggcagtaactggttagtaattaaacctaagttatcaaatggtcagtaatggtaagaatggcaaatgttatccgtactatccagttatataggaaatatggatttgttcatttatatatacatggagtcatcccataacaataaaataagaacaatgctcagatgttttactctagtacctgtcattcctatgtaacacttaaattatcttaaaagcaattttctattagattgtgtattttcaaaaaacacgttgcatgatgaaatttgccagctgtattaagatttttctgatcctttcaaaagtaaaaattgatgttttgcaacaattcttcaattatctttaaaaactatttttcttactttccactgttttctgaatttttactgtacctatttaaactatttccaaacaacagtaggagttattgttctaaagtcatgcttctaataatgttaaaatagtattgtttctgagatccatctccatgttctgaagagaaaccatataaaagctgtttttaaaactcaacccattatttgagtgccaagttaagtgacacaggtgtattgcttctgactcrcacataattgcaatacagtcaaacaaagcaggatgtttttgttgttcagaaaacatttggctctgtggttttgttccatttcatatcagaaatagcaccaccaataaacacaataacaataacaacaaaaaaataaatttggttaccaatttccagttagtgttaaaattcaaggaaccaaccaaaaggctctgtacttcgaaggccaagacaatctcctgaacactgatttcctcagctcctgctaatatcaagaattagtttgtggttagattagcttatgcttttaaataacattaatgattttaaagcactggataaattctcgtttcaggggatatgaacaagtccattgccttgtatttaaacaaaatacaattttgccttttgcagctctgcaaaggttattgttatttactatgcatcaataaataatctttcaattatcttgtaagcacatccaaaaatagcatgacaatcaaaaggcaatggtgtatccagtaattgttccaaatagataattttgataaatatgatctttgcttaatttcaggtaaaaaagaaatcttacgaaatttagttttgctagacttaaaccatgcaaaaataccctatgaaatggacactctatttaaactgtatactactgtcttttacagtgattataacttattaaaatcattttttcatctcttgtatgaataatatatttacaagaaaacattacttaagctaatacaggtggggggttcccacctcctgtgtttttttaaaaaaataagcagtttcatttgagttaaaaagtatatttctttataatatttgttatgtatgtttattaacttatgctaacaatggcttagctcagcaaactgaaaggaagccgtcctttaacttatgtgtgcgtacgtatgtgtgtgtgttgtgctaaattccattgcctgtacttctaaattatttgttgagccctttaagactttttttttcacgtttttctgtatcaaactaatcacatttatactcacagcatatgtgtgttcttattttctctactctgtattttgataatattttaaagaaaagaaccataatagaaattccctagaaataatttacaggactaatgaatttgtaggtctcttagacagttctacattacagtcacattaatattctctcctttttataaggcttgaagtaaatcccacgacactagaagcatttagatactgattacttgcgattggttcctggtgatttgctcttaataatttccagttgaatttaatgaaagtatgattcctgaaatgctgcttcattaaaattgcagcttttcccctttaagtgtggtttcggtcatttcacccattttgcggtgtgttttcctcccccttaaaaagtaatgattgagaaagcagaaataattaagaataccactttagttctccctggaactcatcctcagagtttctctgagtgaaatgatgcaagctgcatttcatcaggattttataatactattttcccattcaatgagattatttaataatatataaagttttaaaacataaatatgaattttgggggtagttgagggaaattgaagaaagaatctgttgcatgtacaagagaactgaggtctttagaatttttactaatatgtatatacatatatttaggttga

SEQ ID NO: 713987 - DNA, 2019 bp, Homo sapiens
ttacaaatgaagtccattgattaggtcacgtggtgtcatttcagggctgggaaaaattcctacttctctttccctttccttgtggtgcccactcttctctgtgaccccaccttatttcaagatttttaaatttgatgctaactaaggtggatgcattttctgagcttactagtgggaatagaacagaactctctcaagtgctgtaacaactaattaatatgtatgtaattccagcaaagaatcaatatcttatggatagctttgagagatagtatggcatgcacaacagttaattactgaggacatacccatctttcatatagaaagatatttcttatttagatataatatttatctaatatgagagaatagatattatctgttctctaatattcatctaatatcagtgttatttagatacagtattttagttttataacttaaaataccttacgtaaaattgtgaatgtgtatctgtaaatatatgaagattttataccactcttaaatttcttttctccaactgacaaattcagtcctacctcagtatccacgggagattggttcctggacttcccacagataccagaatttgttcatactcaagtcctgtagtcagggccctgtaaacctgcagatatgaaaaattggccttccatatatgtgggtttcaaatcctgctaatgctatatttttgatccacatttggtggtgaatgcaggacccaccaatacagagggcaacctgtatttattgaaaaaaattcacacacaagtggacttagacagttcaaaccaatgttgttcaagggtcaaatgtagtaatatatgaaaaatgagctcagaaactacaaaacttactcaaatgtttttgcaatttaaaaatttacatgggatttaaaaatttacatgggattaaagtgataaaggaaacaattatagtcatttttattaatttagtgccacaaacatgctgaatgattattatttgaggaacaaaacactttaaaagcagaagaaacaccatgataaataaaacatggtctctgtctgaaatttcctccctctattggacctattcacctaggttgggacctcagttgctgatggcacaggccaaaccaggaactaataggcataagagagagaacccagtatcagaagaaggtattgatacctagtaggtggttatccaggcaaagcagctagtgtcaaattgcacttggggttggatataagatgagacctttagttcggactaggaccacaccctgacattaatatgtggcaggttttggaggcagggaaacaagagtagagtgcgaagaaaaagactgagttactaaacctggaatttgtgaaaatttgagccagagataagtcagtcatccagttcgttgacttgaaggctgcctcaacttgttccccaacctacacaatggtagaagccttattgacttgaggtatttgagcatctctgtctactcattggatgactattactaggctacacagacacacatgggatgacccattgagcactaggctaaaaatttaaattaggataaaaaaagtactgggtagagctgtatgcaattacactttatggcaaaaacacattccatagattgaatccagacaagataccaaaataaagtaaaacccaaaataaaagaaaaactatccagaacagctgtcctcaggggggaaaaaaccataatccaaggttgctacwctatgtgatctaaaatatctacttttcaacaacaacaacaaaataaagaaccatgcaaaaaaacagggaagggtgacccaaattcaggaaacaaacaaacaaacaaaaaaacaaaaagcagtttctgaacaggccaagatcttcaatttagcaaagagttcaaagcagccatggtaaatattttatataattaaaggaaatcaggtttaaaaaattgaaggaggccgggtacggtggctcatgcctgaaatcccagtactttgggaggccaaggcaggtggatca

SEQ ID NO: 713988 - DNA, 633 bp, Homo sapiens
gaaagggtrccaggctgaacaaagccacaaattatttccatatgaggaagagaatggcactggtcaggtggggaaaatgggatgagcaaatagcaggagagggcggagagaggaaagtgtttgaatcagggcactgccctgcctagaaactttctatgggttcagacctcttactctagggatggaagccaaactctttgccccccagtcccaacacaagctgattcttgcaggctaccctcatgctccctcatctgctgctcatcatgtccagggcaacctctgcctgaaatgctctccctagctcaaatgtcacttcctccaggaagccttctgtagctcaccctcacaaccagtctctccctagtctctgcccctaagtccctggtgccaactcccaccatagctcttattacactgttttataattatgtaacaggaagggggaatgtgtcatttttaaacagtcacttgcaatctgggccaattgtcctaggaagaatgtggaattaatattaggaatagaatgttattttgcttacagaaaaacaataagaagtaaatcttgaaataaaatgtccttggccaaaggctaaatgtaagatgagcagattaaagagactttaaatcact

SEQ ID NO: 713989 - DNA, 2227 bp, Homo sapiens
gattgcaaaaccacaaacatttcacaatactggaaacctctaattaaccataataaatgacaggatgggtttgttttaaatacatggttaataatgcttactgctttaagaccataaactgtgtgattctctatggaggtgacagaggtaggctgcaaatggttttgcaaagtacgtttctacctctgcatgttaagtctgacccagaacattctactaatattggatcagcctctcatctgacgtaatttgcctgtgggaattgtatcggctgttaaactagctcctcttagtagctgtttgaaaaaaaaaaggaagaagaagcacaattctgtggtgtgtttcaaataactgaagccagtgtcctaggtactgagacaagaaagaatgtcaaacaggacctttaatgtgtatttatatttaaacatcagacctaacagaaaaccctgaagctttatacaatgattagagccttgtaagatcctaattaatgtattgtcaggtgaatggttggcctggcactcaagctgttctgagggacgcaaggggtttcaggtaccgcctaggaagaatagatgcagttgtagtgattcagtggcccatctgaaagggacatataaaggcagctgtgtctggtgtgctgtcttttcagactcacttgataatgctagtgtcagtttcaactgaagcgtgtgccagattccagacagcttgagctggcatttcagagaggttaattgtgaaacttgagaagaaaatgggcacattcttcctaagatggctattcaaatatagtctctttcctccccccccagagctttctgggtctcagtctcacttttgttctgcttccacgtaaaatgcatgaggaacactgagccttttccccttggcagctcctatattgccatctttgctgggactgctttgccttgttaaaatgtgccccgtgtattaaaatggaattgtcactgctgggtggtgcagcgtaacatggtttgacactaagcgccggcagctacagaaaacagacttttattgcatttattctttcagagacgggagtctctaaaggctcacagcagacattcacttagttaaatctgaatgaacccaaagtgaacaatctactctgctgtctttgtgttcatagaaacagcccccatccagcttgatatggctgtaaaacagtgttaagaaaagatgatcacacttagaatgcagaagggaggacttgaggctttcaaacagaacaaaaatattttaagtgggtggagtgggttagccacttgattttcttttttagcttcctctctattccctaaaatgtattatgtagaataaacacacacacacacacayacacacacacacccctacacacacacacacacccctagtattagtcttcatttataattccatgccattttaagacaaaggatttgatttgtaggactcttgcaagcaagctttagattcttaactgccttttatccagatgagtacccagagagagattgaacagggagggggctctgaggcataaactttgcattttgtagctctcctggaataaaaattccataaagtaacatctgtagtaattaagggcttacatttcctctcccattcatgtctctgctaggagagaaggttattttcccaaagagacaatagtggatcctgtgggaagagagaaagaacagagttagaattcttttcttcctggaaatggaaattttctacttaaaaaaaaaaaaagataaaaaaattgaaagacttacagtaaaaggttccactggaaaggaaacttgaaagagttaggaaaattgtacttagctgttcctaaatatttagaatgaggaaagattccgcttgcctttcttatccaaacatcttctgatataggggaacttgtgagtgagtagtaaacaaaatgctgtttttgtttttatttttatctattaaaattgcataaagagttttctttttatttggacatcaaattgattcattctgaagactttttttttcaaaataatacttatgtggatccattgggtcacctgatgatatacatactgagcgttaatgttaagttagtttcctacactctcttgtcatagcaggatcagctacttaaattagggtgaaatatgacaatgtagatccctttgttaaaacactgttaagaagttcaaggtggcaacagcagaactttaaa

SEQ ID NO: 713990 - DNA, 2227 bp, Homo sapiens
gattgcaaaaccacaaacatttcacaatactggaaacctctaattaaccataataaatgacaggatgggtttgttttaaatacatggttaataatgcttactgctttaagaccataaactgtgtgattctctatggaggtgacagaggtaggctgcaaatggttttgcaaagtacgtttctacctctgcatgttaagtctgacccagaacattctactaatattggatcagcctctcatctgacgtaatttgcctgtgggaattgtatcggctgttaaactagctcctcttagtagctgtttgaaaaaaaaaaggaagaagaagcacaattctgtggtgtgtttcaaataactgaagccagtgtcctaggtactgagacaagaaagaatgtcaaacaggacctttaatgtgtatttatatttaaacatcagacctaacagaaaaccctgaagctttatacaatgattagagccttgtaagatcctaattaatgtattgtcaggtgaatggttggcctggcactcaagctgttctgagggacgcaaggggtttcaggtaccgcctaggaagaatagatgcagttgtagtgattcagtggcccatctgaaagggacatataaaggcagctgtgtctggtgtgctgtcttttcagactcacttgataatgctagtgtcagtttcaactgaagcgtgtgccagattccagacagcttgagctggcatttcagagaggttaattgtgaaacttgagaagaaaatgggcacattcttcctaagatggctattcaaatatagtctctttcctccccccccagagctttctgggtctcagtctcacttttgttctgcttccacgtaaaatgcatgaggaacactgagccttttccccttggcagctcctatattgccatctttgctgggactgctttgccttgttaaaatgtgccccgtgtattaaaatggaattgtcactgctgggtggtgcagcgtaacatggtttgacactaagcgccggcagctacagaaaacagacttttattgcatttattctttcagagacgggagtctctaaaggctcacagcagacattcacttagttaaatctgaatgaacccaaagtgaacaatctactctgctgtctttgtgttcatagaaacagcccccatccagcttgatatggctgtaaaacagtgttaagaaaagatgatcacacttagaatgcagaagggaggacttgaggctttcaaacagaacaaaaatattttaagtgggtggagtgggttagccacttgattttcttttttagcttcctctctattccctaaaatgtattatgtagaataaacacacacacacacacatacacacacacacccctacacacacacacacacccctagtattagtcttcatttataattccatgccattttaagacaaaggatttgatttgtaggactcttgcaagcaagctttagattcttaactgccttttatccagatgagtacccagagagagattgaacagggagggggctctgaggcataaactttgcattttgtagctctcctggaataaaaattccataaagtaacatctgtagtaattaagggcttacatttcctctcccattcatgtctctgctaggagagaaggttattttcccaaagagacaatagtggatcctgtgggaagagagaaagaacagagttagaattcttttcttcctggaaatggaaattttctacttaaaaaaaaaaaaagataaaaaaattgaaagacttacagtaaaaggttccactggaaaggaaacttgaaagagttaggaaaattgtacttagctgttcctaaatatttagaatgaggaaagattccgcttgcctttcttatccaaacatcttctgatataggggaacttgtgagtgagtagtaaacaaaatgctgtttttgtttttatttttatctattaaaattgcataaagagttttctttttatttggacatcaaattgattcattctgaagaytttttttttcaaaataatacttatgtggatccattgggtcacctgatgatatacatactgagcgttaatgttaagttagtttcctacactctcttgtcatagcaggatcagctacttaaattagggtgaaatatgacaatgtagatccctttgttaaaacactgttaagaagttcaaggtggcaacagcagaactttaaa

SEQ ID NO: 713991 - DNA, 2227 bp, Homo sapiens
gattgcaaaaccacaaacatttcacaatactggaaacctctaattaaccataataaatgacaggatgggtttgttttaaatacatggttaataatgcttactgctttaagaccataaactgtgtgattctctatggaggtgacagaggtaggctgcaaatggttttgcaaagtacgtttctacctctgcatgttaagtctgacccagaacattctactaatattggatcagcctctcatctgacgtaatttgcctgtgggaattgtatcggctgttaaactagctcctcttagtagctgtttgaaaaaaaaaaggaagaagaagcacaattctgtggtgtgtttcaaataactgaagccagtgtcctaggtactgagacaagaaagaatgtcaaacaggacctttaatgtgtatttatatttaaacatcagacctaacagaaaaccctgaagctttatacaatgattagagccttgtaagatcctaattaatgtattgtcaggtgaatggttggcctggcactcaagctgttctgagggacgcaaggggtttcaggtaccgcctaggaagaatagatgcagttgtagtgattcagtggcccatctgaaagggacatataaaggcagctgtgtctggtgtgctgtcttttcagactcacttgataatgctagtgtcagtttcaactgaagcgtgtgccagattccagacagcttgagctggcatttcagagaggttaattgtgaaacttgagaagaaaatgggcacattcttcctaagatggctattcaaatatagtctctttcctccccccccagagctttctgggtctcagtctcacttttgttctgcttccacgtaaaatgcatgaggaacactgagccttttccccttggcagctcctatattgccatctttgctgggactgctttgccttgttaaaatgtgccccgtgtattaaaatggaattgtcactgctgggtggtgcagcgtaacatggtttgacactaagcgccggcagctacagaaaacagacttttattgcatttattctttcagagacgggagtctctaaaggctcacagcagacattcacttagttaaatctgaatgaacccaaagtgaacaatctactctgctgtctttgtgttcatagaaacagcccccatccagcttgatatggctgtaaaacagtgttaagaaaagatgatcacacttagaatgcagaagggaggacttgaggctttcaaacagaacaaaaatattttaagtgggtggagtgggttagccacttgattttcttttttagcttcctctctattccctaaaatgtattatgtagaataaacacacacacacacacatacacacacacacccctacacacacacacacacccctagtattagtcttcatttataattccatgccattttaagacaaaggatttgatttgtaggactcttgcaagcaagctttagattcttaactgccttttatccagatgagtacccagagagagattgaacagggagggggctctgaggcataaactttgcattttgtagctctcctggaataaaaattccataaagtaacatctgtagtaattaagggcttacatttcctctcccattcatgtctctgctaggagagaaggttattttcccaaagagacaatagtggatcctgtgggaagagagaaagaacagagttagaattcttttcttcctggaaatggaaattttctacttaaaaaaaaaaaaagataaaaaaattgaaagacttacagtaaaaggttccactggaaaggaaacttgaaagagttaggaaaattgtacttagctgttcctaaatatttagaatgaggaaagattccgcttgcctttcttatccaaacatcttctgatataggggaacttgtgagtgagtagtaaacaaaatgctgtttttgtttttatttttatctattaaaattgcataaagagttttctttttatttggacatcaaattgattcattctgaagactttktttttcaaaataatacttatgtggatccattgggtcacctgatgatatacatactgagcgttaatgttaagttagtttcctacactctcttgtcatagcaggatcagctacttaaattagggtgaaatatgacaatgtagatccctttgttaaaacactgttaagaagttcaaggtggcaacagcagaactttaaa

SEQ ID NO: 713992 - DNA, 791 bp, Homo sapiens
caatactccttaataaactccctctcatatacacatctggcatatttgttctgtccctctaaagaacctgactaatacagttggtatgttctaagtcttagttgtactgaactaaataaatgattgataataaaagggaagaagcaaacataagccacaggctttcactatgttagagcgagtattaatgtatcacgagtacttagagttttgaattacacatcccaatacaagtatccaacagctaattacatgatttcagaatgcacttaggaagtatgtagttgtcagcagtaatttctaaataaggtgcatagttaggaagacaaatcccttaattcgtgaagcttttagtttaggaattaccaaatttagttgatggagatgatggagatgtacaggacaaaatgtcagcaaaaacagcagggtgtatatttaatgccacggttaagtagcagctgatcaggccttggctactgagtacatgctttcaaaccggtgagtattctgggcactcagctaatctttggtgtccaaaaaacaatatttataacacacagaacctttccaattttcatctaatgtgtgtacataaatgtaagcccaaactggtcctcgtcctacttaaatmtattttgcgtgacttcccatgtgcaaatatagcaaggcacaaaaaatttgtttgcttcttgattgagagaagctgactgcctctcttgggaagtactcttgttcattgtagaagaggaaaggcttcggctgcaaaagaaccggctgcatgattttttctg

SEQ ID NO: 713993 - DNA, 791 bp, Homo sapiens
caatactccttaataaactccctctcatatacacatctggcatatttgttctgtccctctaaagaacctgactaatacagttggtatgttctaagtcttagttgtactgaactaaataaatgattgataataaaagggaagaagcaaacataagccacaggctttcactatgttagagcgagtattaatgtatcacgagtacttagagttttgaattacacatcccaatacaagtatccaacagctaattacatgatttcagaatgcacttaggaagtatgtagttgtcagcagtaatttctaaataaggtgcatagttaggaagacaaatcccttaattcgtgaagcttttagtttaggaattaccaaatttagttgatggagatgatggagatgtacaggacaaaatgtcagcaaaaacagcagggtgtatatttaatgccacggttaagtagcagctgatcaggccttggctactgagtacatgctttcaaaccggtgagtattctgggcactcagctaatctttggtgtccaaaaaacaatatttataacacacagaacctttccaattttcatctaatgtgtgtacataaatgtaagcccaaactggtcctcgtcctacttaaatctattttgcrtgacttcccatgtgcaaatatagcaaggcacaaaaaatttgtttgcttcttgattgagagaagctgactgcctctcttgggaagtactcttgttcattgtagaagaggaaaggcttcggctgcaaaagaaccggctgcatgattttttctg

SEQ ID NO: 713994 - DNA, 1753 bp, Homo sapiens
acagcctgctcactgctcaacagactggaagccaagacaagactatgatgaagatctcagtgtcacaaatttgtacaataacactcggaacctgatagttaggacttctaaaataatgataattaatacaataatttaaataaactggaaggagaaaacaaggaacacatgtaggaatcaggagcttgggttgaccaaaggatagaaaaataaatctacaataatgaaactgggaaaacattttgtaggaccagtggattctggttaacaccaataccctagtccatgtctgccaaatggaagaagcttttattcataaaaaagcacatatcaaattctataaatctctctctctctctctstctgtctctgaatttttcccttcttttcatttggctggtattttaagcattctcttagtctagcaattgggtaatccaaaagtgattccaacatacaatgtgattttccttcacacagtctaattaaaacttaataaattcttgacacagcaaagaagggctgtgctgtcagtgcaacagaaatgagattaaaatataaaagagtttttccccagggattttgtcatccaacaaaaaagctgacaacaaattttctttggtcgaggtcaagatagctctgttctaccctcataggtataagaatagattgtgtagatataaagtatagataaatgtttccaaatatatgtcatccaacctttacaagcatagaatcataacaattttagcccccagaatttcttaataattaaaaatccaccattacaaccattttgattccaaggaaaacacctgcattttaactaaaggtcttagcaaatcaaactagaaaaagcctttaaaaaggagatcttaggtcccagagatactcccctttgaaagattattgggtaaatatgactcattttgttgaaagtaaggcagtttggagaatgacttagaaggtaagcaatctctctgattctttttatttaattatatgaactcaaagtgctgcaaaagccaagagattcacaagtcatttgcttcctttttggctttgaaggcaaaaaatgtagtatattcttttccaccccaatatttcctctcactgcatttttattatacctacactcagtgctaagagctcaagtcttcactcaacgtcactgttgggagacccaatagctagataagaatacatttaaagtctgctatgataggaatatttgtgtgcccacaaaactcatgtattgaaattctaactcccaaagtgatgatattaggaggtcggcccctggaaggagatttaggtcacatgagtggagttggtgcccttgtaaaagaggccctagagagctcctcacctttcccatcttgtgaggacatgttaagagtgaattgtcaaagggctaatatccagaatctacaatgaactccaacaaatttacaagaaaaaaacagacaaccccatcaaaaagtgggcgaaggatatgaacagacacttctcaaaagaagacatttatgcagccaaaaaacatgaaaaaatgctcatgatcactggccatcagagaaatgaaaatcaaaaccacagtgagataacatctcacaacagttagaatggcgatcattaaaaagtcaggaaacaacaggtgctggagaggatgtggagaaataggaacacttttacactgttggtgggactgtaaactagttcaaccattgtggaagtcagtgtggcgatatcctca

SEQ ID NO: 713995 - DNA, 640 bp, Homo sapiens
tgccagactctggggttgggacagccagcatgtggcagagagggtaggagtttggccacaaccctgctgttagaatagtttgctgggtgatttttgggtaggttgctttctaagttccgatcctcagtttcctcatctgcaagatgggaaattaatcacaacccacttccccagggtgttgagaggatcagagaacagcagcaatagcagtagcagccacaagtcccaatgagagcttggggctcaaggctttatgactctttcccatccatggtctcacctgggtccctgtggcyactctgggaagtaggcagagaccactctgctcccccattttaagagaggatacagttcagcctctgaggaaaggtttcctggaggaagaaggctttgacccaagcttcgaatgaagaaaaaaaatttggatctgggcaaaggtggaatgggctgcctcgagaggtaatgagctgcccatcactgaaacggtgcaaactatggatggaagagcccttggcagagatgtcatttcctcacactctgctgagaaagttcagcttgactcttccaaggaaataatgtgatgtgcagctagcgttgtgattagttcttagggctgagtgaacacaacgtttgtgcagca

SEQ ID NO: 713996 - DNA, 1206 bp, Homo sapiens
tggtcagaagttcccgaggcctgaacttgcaactggtgtgtgtatgggctggggggggggggggggcttgtgggaccgagccctcaacctgtggggtctgatggcatcttcaggtagatagtgtcagaattggattggaggacactcagccgctgtccccggcagaattgcttgcttgcctggtgtgtgggaaaaaactcacactcatttggtcacagaagtcttctgtgtggattgttgttaacacagtgagagcccagaaaaaaacactgtgaaaaaaaatccagtggaaccaattcctaatggatcagtccgcctttttacatctgagaacagtctgcagctctgcccaaaaatataatgtttgtgttcaggggaggggagttcctctcattaccatcctrctaccttctacagttaggaccctccaatgttgaagctcgtgattagtacctgggtttcttgttaagaagtagatatctgggctcaacccccagggaatctgatttagtaagtctgggtgagacccaggaatatgcattattagaagcttctaagaaatgttgatgcaggtagtccttagaccatttttttccaaacacagtctttggttctcatctaaaggcctacatgattaattaatcagtttccacccaaggacaataagcaaaaattacacaaactcgcatacacacacaaacatacacacataattaaggaaaggttacactgataaagccctaaggctaatttaagcagaatgcaggacatacattgggcaatcccatacttctgagccctgttaaccaaatgcagagccacaccttttggctacacagtggccttgttcatcagcatagcactggagcaagggtggaactcttcatctgccaactgcctcattaaacaaggatcagaggttcagataaattttttaaaaattaaaagattctatgattcttccagtgcttgaaaagatcctaaatgcctaatgttcttttttttttttttttttttttttttttttgagacggagtctcgctctgtcgcccaggccggactgcggactgcagtggcgcaatctcggctcactgcaagctccgcttcccgggttcacgccattctcctgcctcagcctcccgagtagctgggactacaggctcccgccaccgcgcccggctaattttttgtatttttagtagagac

SEQ ID NO: 713997 - DNA, 1206 bp, Homo sapiens
tggtcagaagttcccgaggcctgaacttgcaactggtgtgtgtatgggctggggggggggggggggcttgtgggaccgagccctcaacctgtggggtctgatggcatcttcaggtagatagtgtcagaattggattggaggacactcagccgctgtccccggcagaattgcttgcttgcctggtgtgtgggaaaaaactcacactcatttggtcacagaagtcttctgtgtggattgttgttaacacagtgagagcccagaaaaaaacactgtgaaaaaaaatccagtggaaccaattcctaatggatcagtccgcctttttacatctgagaacagtctgcagctctgcccaaaaatataatgtttgtgttcaggggaggggagttcctctcattaccatcctgctaccttctacagttaggaccctccaatgttgaagctcgtgattagtacctgggtttcttgttaagaagtagatatctgggctcaacccccagggaatctgatttagtaagtctgggtgagacccaggaatatgcattattagaagcttctaagaaatgttgatgcaggtagtccttagaccatttttttccaaacacagtctttggttctcatctaaaggcctacatgattaattaatcagtttccacccaaggacaataagcaaaaattacacaaactcgcatacacacacaaacatacacacataattaaggaaaggttacactgataaagccctaaggctaatttaagcagaatgcaggacatacattgggcaatcccatacttctgagccctgttaaccaaatgcagagccacaccttttggctacacagtggccttgttcatcagcatagcactggagcaagggtggaactcttcatctgccaactgcctcattaaacaaggawcagaggttcagataaattttttaaaaattaaaagattctatgattcttccagtgcttgaaaagatcctaaatgcctaatgttcttttttttttttttttttttttttttttttgagacggagtctcgctctgtcgcccaggccggactgcggactgcagtggcgcaatctcggctcactgcaagctccgcttcccgggttcacgccattctcctgcctcagcctcccgagtagctgggactacaggctcccgccaccgcgcccggctaattttttgtatttttagtagagac

SEQ ID NO: 713998 - DNA, 1206 bp, Homo sapiens
tggtcagaagttcccgaggcctgaacttgcaactggtgtgtgtatgggctggggggggggggggggcttgtgggaccgagccctcaacctgtggggtctgatggcatcttcaggtagatagtgtcagaattggattggaggacactcagccgctgtccccggcagaattgcttgcttgcctggtgtgtgggaaaaaactcacactcatttggtcacagaagtcttctgtgtggattgttgttaacacagtgagagcccagaaaaaaacactgtgaaaaaaaatccagtggaaccaattcctaatggatcagtccgcctttttacatctgagaacagtctgcagctctgcccaaaaatataatgtttgtgttcaggggaggggagttcctctcattaccatcctgctaccttctacagttaggaccctccaatgttgaagctcgtgattagtacctgggtttcttgttaagaagtagatatctgggctcaacccccagggaatctgatttagtaagtctgggtgagacccaggaatatgcattattagaagcttctaagaaatgttgatgcaggtagtccttagaccatttttttccaaacacagtctttggttctcatctaaaggcctacatgattaattaatcagtttccacccaaggacaataagcaaaaattacacaaactcgcatacacacacaaacatacacacataattaaggaaaggttacactgataaagccctaaggctaatttaagcagaatgcaggacatacattgggcaatcccatacttctgagccctgttaaccaaatgcagagccacaccttttggctacacagtggccttgttcatcagcatagcactggagcaagggtggaactcttcatctgccaactgcctcattaaacaaggatcagaggttcagataaattttttaaaaattaaaagattctatgattcttccagtgcttgaaaagatcctaaatgcctaatgttcttttttttttttttttttttttttttttttgagacggagtctcgctctgtcgcccaggccggactgcggactgcagtggcgcaatctcggctcactgcaagctccgcttcccgggttcacgccattctcctgcctcagcctcccgagtagctgggwctacaggctcccgccaccgcgcccggctaattttttgtatttttagtagagac

SEQ ID NO: 713999 - DNA, 1206 bp, Homo sapiens
tggtcagaagttcccgaggcctgaacttgcaactggtgtgtgtatgggctggggggggggggggggcttgtgggaccgagccctcaacctgtggggtctgatggcatcttcaggtagatagtgtcagaattggattggaggacactcagccgctgtccccggcagaattgcttgcttgcctggtgtgtgggaaaaaactcacactcatttggtcacagaagtcttctgtgtggattgttgttaacacagtgagagcccagaaaaaaacactgtgaaaaaaaatccagtggaaccaattcctaatggatcagtccgcctttttacatctgagaacagtctgcagctctgcccaaaaatataatgtttgtgttcaggggaggggagttcctctcattaccatcctgctaccttctacagttaggaccctccaatgttgaagctcgtgattagtacctgggtttcttgttaagaagtagatatctgggctcaacccccagggaatctgatttagtaagtctgggtgagacccaggaatatgcattattagaagcttctaagaaatgttgatgcaggtagtccttagaccatttttttccaaacacagtctttggttctcatctaaaggcctacatgattaattaatcagtttccacccaaggacaataagcaaaaattacacaaactcgcatacacacacaaacatacacacataattaaggaaaggttacactgataaagccctaaggctaatttaagcagaatgcaggacatacattgggcaatcccatacttctgagccctgttaaccaaatgcagagccacaccttttggctacacagtggccttgttcatcagcatagcactggagcaagggtggaactcttcatctgccaactgcctcattaaacaaggatcagaggttcagataaattttttaaaaattaaaagattctatgattcttccagtgcttgaaaagatcctaaatgcctaatgttcttttttttttttttttttttttttttttttgagacggagtctcgctctgtcgcccaggccggactgcggactgcagtggcgcaatctcggctcactgcaagctccgcttcccgggttcacgccattctcctgcctcagcctcccgagtagctgggactacaggckcccgccaccgcgcccggctaattttttgtatttttagtagagac

SEQ ID NO: 714000 - DNA, 628 bp, Homo sapiens
caatgaaagatgattaggcattagattctcataagaagcatgcaacctagatcccttgcatgcacagttcacaatagggtttgtactccaattagaatctaatgctgtcgctgatctgacaggagatggaactcaggctgtaaggtgagtgatggggagcagctgtaaatacagatgaagctttgctctcttgcctgctgctcaccttctgctggtgcagcctggttcttaaccagtccatggcctgggaggtgtggacccctgctttagacaactcattgattttaaaagttatcaattctattttagtaatattgtttacatcatttctttttttwaaaaaaagtatttattttgaacttacttctgtgtaaaacacacaaactgtgctagaccctcagacgaatttcaagaaagacaagacgtggagactgcctttgagaactttactaaaaagtagagtgtttttaaactatttatggacaagattaataagtatgagagctaccctgtaatcattttgaaaataacctggattcttaaatattgataaccagaaagtgagaagaatggttaaaagaattgttgtgttgatgtcttgattataaaaagtcttcaataaagctaa

SEQ ID NO: 714001 - DNA, 1411 bp, Homo sapiens
  misc_feature 901, 902, 903, 904, 905, 906, 907, 908, 909, 910, 911, 912,913, 914, 915, 916, 917, 918, 919, 920, 921, 922, 923, 924,925, 926, 927, 928, 929, 930, 931, 932, 933, 934, 935, 936,937, 938, 939, 940, 941, 942, 943, 944, 945, 946, 947: n = A,T,C or G
  misc_feature 948, 949, 950, 951, 952, 953, 954, 955, 956, 957, 958, 959,960, 961, 962, 963, 964, 965, 966, 967, 968, 969, 970, 971,972, 973, 974, 975, 976, 977, 978, 979, 980, 981, 982, 983,984, 985, 986, 987, 988, 989, 990, 991, 992, 993, 994: n = A,T,C or G
  misc_feature 995, 996, 997, 998, 999, 1000: n = A,T,C or G
tgcctggcccccaataatcttaaaaaagagtatagtggccccatggtaactctgtcttctgccccagaacagccctggctggattatcctcctggtagaaatcaattttgatcatcctggcaggaaatcaggatacagggcagcttcagacaggagtaccacatccttctcagaaatcaaccaacatgagatgctgagtgaaagctggtctcttggttaagagacggatgtaggcagggctggtaacaagtagttagaatcaaagactcaaactaaacctgctagctaacaccagcttcactgatggagataccagagcaggtaggttgcagagaggtaatgacatttgacaatggtcaagagaccaacatggaggttctcattggagcctccaaaatggaggctctcttgttggagctacaatggtttggggatcagagcatctgggctctattcttggccttttctctcaagttcatgactctaatacagccccttctcccctttggcattagttttctcatctataagaaggggtaatgaattttactccccatcccaggtccccttactgcagtatgagaagggtgagatagggactattttaaagggctgtgagagagtctccagagagggctgtgatgaacatctgtattcctcatggaatggacagcccaggaggatggtacatttaagtaagacaaagcaagactcttctaatggtaagagatgtaagaccagtaaattggatcacgtgccctggatgatatgtaattccctcatagtgctctagcctcaaaatcccaaatattggtgaggatctcccaaagctgctaatgtcaaaaactttgattttactgtagttaaagtgatggaaatcattagctttaaattactgggnnnnnnnnnnnnnnnnnnnnnnnnnnnnnnnnnnnnnnnnnnnnnnnnnnnnnnnnnnnnnnnnnnnnnnnnnnnnnnnnnnnnnnnnnnnnnnnnnnnngaattctcctgaatcacagctttatgaaccaaaaagaagaagatgcttgaatttcatcaactgcacgtctcaaatttattcaactttcgaggcttcatttacaatcacataaagtaaccaatgatttgttgtgcgtttagcaacttaacattacttggcccagtgagaagctctgtggctaagaaatcctttattttgatgaattcatttcactggaactgastgttgactgcagctatgttctgttaggaactgcgaagatatacaagaaatgagatgtgactcccatcttaatagcccgtggttttgtaatgttaggtcaacaacacatgaaacaagtaggaaacactttaaagcaagatataacaatgggccaaccctattgtacaattaatttctccaaaatataat

SEQ ID NO: 714002 - DNA, 1059 bp, Homo sapiens
gcaacatcatggcagacctcccggcccagtatgatgagctggcccagaagaactgagaagagctggacaagtactggtcccagaagactgaggaacacaccacagtggtcaccacgcagtccaccaaaataggagctgctgagacaacattcatggagctgagatgtatagttcagtcctaagagatcaacctagactcaatgagaaatctgaaggccagcctggagaacagcctgaggtgggtggaggcccgctatgccatgcaaatggagcagctcagtggggcygtgctgcacctagattcagagctggcacaggcccaggcagaagggcagcaccaggcccagaagtatgaggccctgctgaacatcaaggtcaagcgggaggctgagattgccgctactactactactgccgcctgctggaagatggggaggacttcaattgtggcgatgccctggacaacagcaactctatgcaaaccatccaaaagactgtccaggatagcggatgacaaagtggtgtctgagatcaacaacaccaaagttctgaggcgctgagccagcagaagcagggtacactttggggagcaggaagccaataaaaagttcagaagtcattggatgtcaaaaataaattggtaagtaaaagaatggacatgaatgaggaagtactccaaagttttttacgtcttcctgaatggatataacattattaggttttctctctcttaagaggggatccacctcccaagtactccccaaatgcaccccttaactaggagcagggtgttattaatagttttctgattaaatgatatcatatcctctcaatgagattgagagaagtgccgtcatcatagtgcttcatctttgctgtctcagaatcaaaactgtgtccctcactctaaaaaagactgattatttgatcatctaatttttctcttttaaaaaattgccttccctggccgggcatggtggctcacgcctgtaatcccagcactttgggaggccgaggcgggatcacctgaggtcaggagtttgagaccagcctggccaa

SEQ ID NO: 714003 - DNA, 568 bp, Homo sapiens
cctcagatatctttagatgcagtcaacccaaagcctgcctgcttgtccagctgtgaaccgcagagtgatacccccagaatgggcatccttttctcatctacgcagaggtgcaggtgaagctagcaatgggcatgctggtcagtaaatgccacttgaggaaaggtctgaagaggtgagcaagtaagttgtgyagaatggaggaagaaggagttaggcaaaaggaacagtgaatgccgctgaatgccactagaatactatggttatgagcttttcatttggctgcattgagggaaacggtagtaatttatttaaggggaaaataatttaatactagattatccaagataggagccactagctatatgtggctactgaatacttgaaatatagcatgtgtgaatgagaaagttaatttttaattttaattttaaaacatatctgattcagttatttcaaaactttcatatatgttttaaacaatatgggcatgtaaatctattttctaactgtaattttataaaatttaaatacagatcatatatttgtgatgaaaatccagactctgaac

SEQ ID NO: 714004 - DNA, 1423 bp, Homo sapiens
tgggacatatctcaaaataataagagctatttatggattgatgtttttatacatattagactgttttgatgagatggccttgccaagtaggtgtttgttttgtttattttcttccttctgtgtaaagatttttaattccttgaaccatcctctagttcctatggttttctcattgttctcttaggaaagtgaaaggtaataggaaatatgcactctttaccctttctttgttctcggggggcattgtgatgttaccttgagtcctgtattgagttttcagtgacaatgctatgaggcatgtgagtaagcatttaataatgaccaagaactaagtcagattcaaacccagcaatacagaattctcattttaatttcaagttatggatatttgtctttgatttttatggattttcccatttttaaacaaacaagttttcaatgcttatcttctcagtaagagatgggaaggcctatgaacattttagcaacccaaaagatgattcctcagttttttcctaaggggaatgttttatttataggtaatcaaaggaaatgtttgtttccacagggaagtatggataaaatataaaatctgtttttcagtatcaactagggttcactaggcagtatgttggtacagagatgtaaatgtgaaaaggaaaaatgtgaagaagaattatttttaaatataagttgccacttctgtaactcccccaccccaaaaaagagattagagttgtccaagatagctgtaaacttgagttcctattaatttgcatatatattcagggaatgagattaaattaacaaaggaggagagaaagcaactctggacctggagcacaactgctgttgtgttgatgcagaaaatgactggctcacagactttctgcagaagctgccacaattctttgagttgtgttaagaaaaaactctggagctcaagagagtctggctttgaatctaggcttcaccatttatggattatatgaatttaagcatattacttaacctctaggttcagttaccttgtctataaagtgggcaccaacaaaataccttgaagttttwaaaaaaaatagaactaagtaagttaatatttgtgtaactcatgctgcagtttctgacaaaataaaaattcttaagtgtttacctttttatattactcaactaacaagtatttaccactaatatttgacatgtaattaaaattttcaaacatttaatttttttccttgtgttaagataaaattatagtgacattaataaaaagataacaggtaaggattgtcctttggttaacttcggttaattttaagtggtgttagtgtgatatgactttagcattactcattattggttattctatgtatcagttaggggagagaaatcatccagaaatttgaacagggaaagatgaaca

SEQ ID NO: 714005 - DNA, 1279 bp, Homo sapiens
acaatgtcatatttggtaatgttaagattgatcaatgagttcctagtgtatcagcctgattcatccactgtgatcttacatatcaacttttcatcttatggttttagtaactaaaaaccatgattgcctaagtccattatttcattggaggctgataatggcaatattccaatccagagtagatagtaaatcccaccaagatgtgattctgaatggctggattcatggtccagagtgcagctagtgaacaactctgtgtggcctgaaaaactgggatttttcttttttttttctttttccttttttttttttttttaagatggagtctcgctctgtctgaagtgcagcggtgcaatctcggctcactgcaagctccacctcccgggttcacgccattctccttcctcagcctcccgagtagctgggactacaggcgcccgccaccacgcctggctaacttttttttttggtattttagtagagacggggtttcaccgtgttagccagaatggtcttgatctcctgacctcgtgatccacccgcctcagcctcccaaagtgctgagattacaggcgtgagccactgtaattaaaagtagagtaatttctacttatatagtggcaggcaagagagcttgtgcaggggaactcccctttataaaaccatcaggtctcataagacttattcactgtagaatcatatgtagaagaaaagtatgcatttcaatacccttcatagattcagtatctccttwgcgtagtccattagtagcatttgaagcataattccacatctgaatttctgccagtgagatgtgctgctgttgttagatgatttggtagtgttcctccattcattcctaccagctcctgcttaagtattatttgtttactatattcgtgtattttcttatttttaattaatgtacttatttttggaagaaaataccactgaggagcatggcaatagtatctcatgtggcaatattagaataccagagccgataacattccgagcatccctctgtgaatgcattggtgaaaacagccatcccacagtgatatgtcattgaacaccgccttgttagcctaccttgagccttcctagatggccacatataatagatttcaataatatgtgcaaattggtgtttgacatttgtagtcacaaagggaaaacattcagagtgactcatgctgctttttaatgctctgctgtcactgtcttgaaattcttttaagctcttttgctacgccactagcatatagcatttgagatg

SEQ ID NO: 714006 - DNA, 1279 bp, Homo sapiens
acaatgtcatatttggtaatgttaagattgatcaatgagttcctagtgtatcagcctgattcatccactgtgatcttacatatcaacttttcatcttatggttttagtaactaaaaaccatgattgcctaagtccattatttcattggaggctgataatggcaatattccaatccagagtagatagtaaatcccaccaagatgtgattctgaatggctggattcatggtccagagtgcagctagtgaacaactctgtgtggcctgaaaaactgggatttttcttttttttttctttttccttttttttttttttttaagatggagtctcgctctgtctgaagtgcagcggtgcaatctcggctcactgcaagctccacctcccgggttcacgccattctccttcctcagcctcccgagtagctgggactacaggcgcccgccaccacgcctggctaacttttttttttggtattttagtagagacggggtttcaccgtgttagccagaatggtcttgatctcctgacctcgtgatccacccgcctcagcctcccaaagtgctgagattacaggcgtgagccactgtaattaaaagtagagtaatttctacttatatagtggcaggcaagagagcttgtgcaggggaactcccctttataaaaccatcaggtctcataagacttattcactgtagaatcatatgtagaagaaaagtatgcatttcaatacccttcatagattcagtatctccttagcgtagtccattagtagcatttgaagcataattccacatctgaatttctgccagtgagatgtgctgctgttgttagatgatttggtagtgttcctccattcattcctaccagctcctgcttaagtattatttgtttactatattcgtgtattttcttatttttaattaatgtacttatttttggaagaaaataccactgaggagcatggcaatagtatctcatgtggcaatattagaataccagagccgataacattccgagcatccctctgtgaatgcattggtgaaaacagccatcccacagtgatatgtcattgaacaccgccttgttagcctaccttgagccttcctagatggccacatataatagatttcaataatatgtgcaaattggtgtttgacatttgtagtcacaaagggaamacattcagagtgactcatgctgctttttaatgctctgctgtcactgtcttgaaattcttttaagctcttttgctacgccactagcatatagcatttgagatg

SEQ ID NO: 714007 - DNA, 968 bp, Homo sapiens
tagctgggctcccgccggaacgagcagccctgaggctcagcaggggcgcggaagccgtggagctccccgtcctgctgcackggtcccttggggcgctctggtgtgggaagatgtcttcagaccgggcctcagggtaaccacctgccaccaccctcctcagccaggaccatccactccacccaagagggggagacaggccccatgtcccccggagtgggctcctcaagcccaggccatccccttcacacaccaccctctgggagccctcagggtctcaccagcctggccccaagaccaacctgggtagggctctccctggcgctgggcgtcaggcagcgtgctaccatcgtcctcaccccaccaggagggctgcccatacaggggtgtgcggtaagaggctgcctctgtggagggagcgagaggtcagaccctgtgttgctggggcccccagtgtgaaaagcagagaactggcagcccaggagaggctggactctggggcaggccctggcatcacctcccagcttggccctgtggcagcccagggccccgcctctgtggggaatgttgactaccttgagttccgaggtggctcactggcccctccctgcctggccccacctcctcccacaagtgcttagaggctccctgcctgcctggcccctcctccctgcctggcccctcctctctcccctctgatgtactcagaggctcatcccctggggcatggtgggggccacccacctccgtcctgcaaccctgccccggccttcccgaccccagagcgcatccaacagagggcaggaggccagggggagcccacacctgggtccagccacctccaaggctggtaaatggttcaggccacaaatgggtggccctgggggtgggcagccactgcaatctacatggtccctgcggcattttagtttgtttgccttaatgaccaggagggaaattgtatatttcag

SEQ ID NO: 714008 - DNA, 968 bp, Homo sapiens
tagctgggctcccgccggaacgagcagccctgaggctcagcaggggcgcggaagccgtggagctccccgtcctgctgcactggtcccttggggcgctctggtgtgggaagatgtcttcagaccgggcctcagggtaaccacctgccaccaccctcctcagccaggaccatccactccacccaagagggggagacaggccccatgtcccccggagtgggctcctcaagcccaggccatccccttcacacmccaccctctgggagccctcagggtctcaccagcctggccccaagaccaacctgggtagggctctccctggcgctgggcgtcaggcagcgtgctaccatcgtcctcaccccaccaggagggctgcccatacaggggtgtgcggtaagaggctgcctctgtggagggagcgagaggtcagaccctgtgttgctggggcccccagtgtgaaaagcagagaactggcagcccaggagaggctggactctggggcaggccctggcatcacctcccagcttggccctgtggcagcccagggccccgcctctgtggggaatgttgactaccttgagttccgaggtggctcactggcccctccctgcctggccccacctcctcccacaagtgcttagaggctccctgcctgcctggcccctcctccctgcctggcccctcctctctcccctctgatgtactcagaggctcatcccctggggcatggtgggggccacccacctccgtcctgcaaccctgccccggccttcccgaccccagagcgcatccaacagagggcaggaggccagggggagcccacacctgggtccagccacctccaaggctggtaaatggttcaggccacaaatgggtggccctgggggtgggcagccactgcaatctacatggtccctgcggcattttagtttgtttgccttaatgaccaggagggaaattgtatatttcag

SEQ ID NO: 714009 - DNA, 968 bp, Homo sapiens
tagctgggctcccgccggaacgagcagccctgaggctcagcaggggcgcggaagccgtggagctccccgtcctgctgcactggtcccttggggcgctctggtgtgggaagatgtcttcagaccgggcctcagggtaaccacctgccaccaccctcctcagccaggaccatccactccacccaagagggggagacaggccccatgtcccccggagtgggctcctcaagcccaggccatccccttcacacaccaccctctgggagccctcagggtctcaccagcctggccccaagaccaacctgggtagggctctccctggcgctgggcgtcaggcagcgtgctaccatcgtcctcaccccaccaggagggctgcccatacaggggtgtgcggtaagaggctgcctctgtggagggagcgagaggtcagaccctgtgttgctggggcccccagtgtgaaaagcagagaactggcagcccaggagaggctggactctggggcaggccctggcatcacctcccagcttggccctgtggcagcccagggccccgcctctgtggggaatgttgactaccttgagttccgaggtggctcactggcccctccctgcctggccccacctcctcccacaagtgcttagaggctccctgcctgcctggcccctcctccctgcctggcccctcctctctcccctctgatgtactcagaggctcatcccctggggcatggtgggggccacccacctccgtcctgcaaccctgccccggccttcccgaccccagagcgcatccaacagagggcaggaggccagggggagcccacacctgggtccagccacctccaaggctggtaaatggttcaggccacaaatgggtggccctgggggtgggcagccactgcaatctacatggtccctgcrgcattttagtttgtttgccttaatgaccaggagggaaattgtatatttcag

SEQ ID NO: 714010 - DNA, 522 bp, Homo sapiens
agggtggagatggtgggtggtgatggagggtggggataaatggtggtaatggacagtagagatggacggtggaaatggaggatggtgatggttgtacaacaatgtgaatgcacttgatgtcactcaactgttcacttaaaaatggcaaacatagtagtttttatgttacatatattttactacaataaaaaaagaatgaaaagcctataaaattctgaaaaataaaaaagggggctttagccctgccagagagtagaatccatcatagaacatcttgctatgggcagttgactggacacacacatcagagcaggtctgtgtgatcatttagcatatgattaatggggcatttaaaatccacgaggggccrggcgcagtggctcacgcccgtaatcccagcactttgggaggccgaggcgggtggatcacctgaggtcagcagttcgagaccagcctaactaacatggggaaaccctgtctctactaaaaatacaaaaaatagctgggcatggtggtgggtgg

SEQ ID NO: 714011 - DNA, 621 bp, Homo sapiens
tttctaaaaatagctaatgcttcatggatttttaaagttttgttttgttttgtttttttgtttttgagatagggagaagatactaggggaaaaargcagatggaaaacttccttgtggtttttctgtagtagcttagagtctgttctaaggagcagagatttcagagtatggtcttggaaacctttgtgttctttgtttcttgtagacgccacacgcctctgtcccctggccacagaggctgattttgctgtatctgacatgggtttcttgacctgctgggaaggcccaatgtctaatttcctggtctgcaccatgcagaaaccagtggaaattaagcagcgatcgattatcctaccccatcacacctttcctagatcagatgatgctggctgaggctttgaagtattgacaacacactcttttttctttttacaccttttcttcagaggacctgactcattccctgtaaagggaggaatcactgcagagacaccccctgtagccacactgcacccttgcaggggctgggggacgagaagcaggatgttggtagtggtgttgttacctctcatgacacgaatcaggcccttccaccatacacttcattgaggggattctga

SEQ ID NO: 714012 - DNA, 621 bp, Homo sapiens
tttctaaaaatagctaatgcttcatggatttttaaagttttgttttgttttgtttttttgtttttgagatagggagaagatactaggggaaaaaggcagatggaaaacttccttgtggtttttctgtagtagcttagagtctgttctaaggagcagagatttcagagtatggtcttggaaacctttgtgttctttgtttcttgtagacgccacacgcctctgtcccctggccacagaggctgattttgctgtatctgacatgggtttcttgacctgctgggaaggcccaatgtctaatttcctggtctgcaccmtgcagaaaccagtggaaattaagcagcgatcgattatcctaccccatcacacctttcctagatcagatgatgctggctgaggctttgaagtattgacaacacactcttttttctttttacaccttttcttcagaggacctgactcattccctgtaaagggaggaatcactgcagagacaccccctgtagccacactgcacccttgcaggggctgggggacgagaagcaggatgttggtagtggtgttgttacctctcatgacacgaatcaggcccttccaccatacacttcattgaggggattctga

SEQ ID NO: 714013 - DNA, 1164 bp, Homo sapiens
gcgcctggcctatattttagtgttctaagatttttctacaatgactctgtattgcttttaatgtcaaaaatctcaataattttgaaggttatggtatttatatacttttttaaaaaatgacaaatgttctccctaaatcagaaatgtggacaccgtgttttggctttagtgtagtgaggtggagtattatgattaaatactgtgttttcaagcattaatgactcaaagagcaggtacttacagagcacctattattgccatcaaccagtgttattgagcacttactcaataagtgttggcctctgactttacgcctaagagtcaggagaccacaaaaaagcaacaatgtcaggtctgcaaggtgaaggcaagaagctcatgttctaggtacttgtgactgtcctgtaatgctaaagaatgaaccattaccaaagatttggcaaactcgcccaagcttactcctaaggagtctaacctttgcccaagtatctaggactcaggcccacctgcttagcctggtctcactgaagtgtggaggcaaagcatttgcagcttcatcatattccattttgtctcataaggaaattgtgttagtccaagaggcttggtgtgttacatggttgtacagcttagtgctttcttagcaytctgtttaagtgctgacaacttgatattttcatcaatggttgctatatttctccaatgttaggttgacaggctaataatttcagaagtcaatttctccctctctctctcttctcccagtttacatatttctattttccaattcctttatctgcattttgtaaatacctcaaaatagtggaaggcaaggcctctaggatcacttggcccaatctccatataattggatccttagggcttgctatatctttaaagaaattgaggtcaccttttgtcaccaagaattaagcacctgttgtgtgactgatggagatctgtacacagagcacattgcccagggcaggggtgatttggttacaggcagcctctcgatgtatgataaaagttggcatcaggttgtaaacattttgctcactgtagcagaaagctctctgtgaacggagagctgtctaaacagggtggttggccacagaacctgcccagggatgcacctcctttccacattagcccatggccttt

SEQ ID NO: 714014 - DNA, 661 bp, Homo sapiens
cacgccattgtactccagcctaggcaacaagagcgaaactccatctcaaaaaaaaaaaaaaaaaaagataaaatataagaagtgtacacagggctttccctttaagtggagctaacaaaaaagagggaggccrgggtagtggaagccagaaatgtgcgagtcccctagttcacaagactgtacagctcaccatactccctcgaaacctggatccagaacttgcaggtagtttgattccttagggcaaaaccagcctgcatggtagtgctctagaatatattttgctatgtgtttaccctgcgagctgtctacttggcttaagacactattgggctcagaagaaggatttttgaaatccgtcccaatgctcctagagtgccattacttccagcgttgctatttttacaataaaggtgaacatgagtggaggaggtgaggacataggtcctaggtggaagagaaaaccgtatcatgattgtgagttcttggttgcttgtgcctcttaaaatcttaacttggaaatggcttgcctctaaaacatgataagtgcaaccttcccccgattttaaccacttgttgatgactattttgattttggaaatagtgaagccagcccttcaagtgttttgtcattttggcctgagttgataactttgtgtga

SEQ ID NO: 714015 - DNA, 661 bp, Homo sapiens
cacgccattgtactccagcctaggcaacaagagcgaaactccatctcaaaaaaaaaaaaaaaaaaagataaaatataagaagtgtacacagggctttccctttaagtggagctaacaaaaaagagggaggccggggtagtggaagccagaaatgtgcgagtcccctagttcacaagactgtacagctcaccatactccctcgaaacctggatccagaacttgcaggtagtttgattccttagggcaaaaccagcctgcatggtagtgctctaraatatattttgctatgtgtttaccctgcgagctgtctacttggcttaagacactattgggctcagaagaaggatttttgaaatccgtcccaatgctcctagagtgccattacttccagcgttgctatttttacaataaaggtgaacatgagtggaggaggtgaggacataggtcctaggtggaagagaaaaccgtatcatgattgtgagttcttggttgcttgtgcctcttaaaatcttaacttggaaatggcttgcctctaaaacatgataagtgcaaccttcccccgattttaaccacttgttgatgactattttgattttggaaatagtgaagccagcccttcaagtgttttgtcattttggcctgagttgataactttgtgtga

SEQ ID NO: 714016 - DNA, 1031 bp, Homo sapiens
cagtcacatgctgtataggtttcagcctagaagcgaaaggctgtccccacatagcctagggtgtgtactagtctatgccatctaggttcatgtaagtacactctgtgatgtttacacaatgatgaaattgcctaatgatgcatttctcagaacatgttcctgttgttaagtgacacatgattgtgtatgcatatatattttttatgtatattgattctgttttcctagagaatcctgattaatacgcctacatacacaagagaaagatgattatgaatttcctatgctgtaccctcttctgaaaagtctctgtgcttggttgaactcagtggcatttaaatttttgtcacagatgctatggtcagatctttttgcaaggacagcacgttggggttacgcatcaggttggccaactctaaagcctgtcctgtaaggtctacacagcaagaccttacacacatttcacacactgctgaattctttgatgcttctctcgactctccattttccagcttgtgctcctctttctgttttgttcttttgaccttgcaggctgtaagcaattcacatccagctatttgacattcagaccagacactttttttttttaattwatttattttttattgataattcttgggtgtttctcacagaggaggatttggcagggtcataggacaatagtggagggaaggtcagcagataaacaagtgaacaaaggtctctggttttcctaggcagaggaccctgcggccttccgcagtgtttgtgtccctgggtacttgagattagggcgtggtgatgactcttaagagcatgctgccttcaagcatctgtttaacaaagcacatcttgcaccgcccttaatccatttaaccctgagtggacacaacacatgtttcagagagcacagggttgggggtaaggtcacagatcaacaggatcccaaggcagaagaagttttcttagtacagaacaaaatgaaaagtctcccatgtctacctctttctacacagacacggcaaccatcc

SEQ ID NO: 714017 - DNA, 635 bp, Homo sapiens
aggaaaagaagaccaagatgtgactacacctgagcagacctttttataagtgtgatgactgtctccaaggattatttaaatttgaaagaaaattatttacaagttaatttctgcctccccatgcaatcattctccctagcaatcattaattgcccctcaatagaatgcctcttctcttccctcccataacctggattcaagcccccattctttctgtaaccccaagtaaagtttctgtaactcattgggaagttggatcttcattctgaaggctcccatttatgcgcactcaatacatttgtatacttttcctcctattaatcaacctgcttcatgcctgtgatttttaagcaaatctttagggggccaatagcaatggcccataaaccatttaaaagtgtacgaccttgggaaagtaatttatatcccytatatattcctcttttttcagctataattcagctgaataacaaccattttactaagtaattgaaagacaaaatatataagctttatcgttaataaaatattataaaagaatatcattactaagtagagctgatattatcaccactttacaaatgagaaaatattagtaagttggttcaatatcttacagtgtttaggtgtgaatg

SEQ ID NO: 714018 - DNA, 1989 bp, Homo sapiens
tgtcttctaatttttattaaatgctagatcttgtagtaaaataacactaaagactgaggaaaataatacttatgcacagataaaggtgcaattctttattttctatcaggtcattagtgtgtcttgttgagtcagggtactcagcagtcattcctggtctggttttgtttatttgttttcttttgttacattgaaacatgacaggcttcacaatctttgagaacaggatcatacaaatttttaaagcagggattggaatcgtggagcttggatattttgtcacaggtctccttcatacccccaggcttcatcgaggtctttgtacctcctcaccaatgtcaaaactctgatctgcctgaccctcccagagggtaggtagacagtgatttattcagtgggtaatagctgaattatttctttgagttatttcatcctggcttgagactatagcaatcccagcaatctacaactcagaagggatttctctcagctctactgccattcctccagtgaaggcacttcattgcctcattctcaggcttagtaagggagtatgcaaagttttttcccaggtcatctactcttgtctcagatcatagcaggaccagtgcttcaaagagaacatttttcagtatctctcccctgccgctaattgctttgtaggcatttggcctatragaaagaattggcatgtggttcttttatgtttggggatccctggaattttaaaacccttcctcatgctgctctaccaaacatgaaaacagtgtgggtttcctctctccaaagaaaggcttataactttctggatttcagttcaccagattcttttgcaatctcagctcactgaagggcttaaaataattatgattgtgtagatattctagcacattcttgttgttagttgaaaacagcagttgaataatgacttttaccttgctgttatcagatggttctaagtataattaatttcaatagtggtttgatttctttagtccaattcaacaaattaacataaagttttgaatttataccttatcaaaaataaaagcaactatcattttgcggtatgctatttacaaactccatccaaaacgattttttaaaattacgtaaaattacatatttaatttagaaaaagttttggttttgaatggagtattcaaatagaatggttttgaaggttcaacaatataatgaaaccaatggtcaatgaaaaatggttacaaaataacataataatataaattatgtgagtacaatatttctcaattagaagtcctctgctttggagaaaaatatcctggggaatttgggtggaatgttatatgattgcttctctctcgtgtcttgccactacttctcacaacgagcttatataactctcgtctagcaccactataacctaaaattctaagaaaaatcccttaatatttaggtggtccagacataagttattctaatttttaaagtatcaatttttaaatttgatttcattttttacaatttcactatatctgtgcaacttacatttatttccaaagcgcttatctttcttcttcctaaggaagacaaactttctttaacatttataccatcacttttatctactaatacccttctttgttgctatcattattaatatcccccatggaccctttcttctcatttattaatgcctctaaaacctgcatcagttttttcactattcattttatcataaattatgatatttcaatacatgtttatatttatttagcaccttttcccctctgatgtcaacctcctcatttgcaacaatccattcccacagtcataatttctcatggtcatactctcaacaataattgtaaccttccaaaatttcctggcgggtggtattcccatctctgactatatcatttccttctagatcccataggttcaaatcagtagttctggcacccaattaataccttcaatatttaaactctatcatgttttcactat

SEQ ID NO: 714019 - DNA, 1989 bp, Homo sapiens
tgtcttctaatttttattaaatgctagatcttgtagtaaaataacactaaagactgaggaaaataatacttatgcacagataaaggtgcaattctttattttctatcaggtcattagtgtgtcttgttgagtcagggtactcagcagtcattcctggtctggttttgtttatttgttttcttttgttacattgaaacatgacaggcttcacaatctttgagaacaggatcatacaaatttttaaagcagggattggaatcgtggagcttggatattttgtcacaggtctccttcatacccccaggcttcatcgaggtctttgtacctcctcaccaatgtcaaaactctgatctgcctgaccctcccagagggtaggtagacagtgatttattcagtgggtaatagctgaattatttctttgagttatttcatcctggcttgagactatagcaatcccagcaatctacaactcagaagggatttctctcagctctactgccattcctccagtgaaggcacttcattgcctcattctcaggcttagtaagggagtatgcaaagttttttcccaggtcatctactcttgtctcagatcatagcaggaccagtgcttcaaagagaacatttttcagtatctctcccctgccgctaattgctttgtaggcatttggcctatgagaaagaattggcatgtggttcttttatgtttggggatccctggaattttaaaacccttcctcatgctgctctaccaaacatgaaaacagtgtgggtttcctctctccaaagaaaggcttataactttctggatttcagttcaccagattcttttgcaatctcagctcactgaagggcttaaaataattatgattgtgtagatattctagcacattcttgttgttagttgaaaacagcagttgaataatgacttttaccttgctgttatcagatggttctaagtataattaatttcaatagtggtttgatttctttagtccaattcaacaaattaacataaagttttgaatttataccttatcaaaaataaaagcaactatcattttgcggtatgctatttacaaactccatccaaaacgattttttaaaattacrtaaaattacatatttaatttagaaaaagttttggttttgaatggagtattcaaatagaatggttttgaaggttcaacaatataatgaaaccaatggtcaatgaaaaatggttacaaaataacataataatataaattatgtgagtacaatatttctcaattagaagtcctctgctttggagaaaaatatcctggggaatttgggtggaatgttatatgattgcttctctctcgtgtcttgccactacttctcacaacgagcttatataactctcgtctagcaccactataacctaaaattctaagaaaaatcccttaatatttaggtggtccagacataagttattctaatttttaaagtatcaatttttaaatttgatttcattttttacaatttcactatatctgtgcaacttacatttatttccaaagcgcttatctttcttcttcctaaggaagacaaactttctttaacatttataccatcacttttatctactaatacccttctttgttgctatcattattaatatcccccatggaccctttcttctcatttattaatgcctctaaaacctgcatcagttttttcactattcattttatcataaattatgatatttcaatacatgtttatatttatttagcaccttttcccctctgatgtcaacctcctcatttgcaacaatccattcccacagtcataatttctcatggtcatactctcaacaataattgtaaccttccaaaatttcctggcgggtggtattcccatctctgactatatcatttccttctagatcccataggttcaaatcagtagttctggcacccaattaataccttcaatatttaaactctatcatgttttcactat

SEQ ID NO: 714020 - DNA, 1199 bp, Homo sapiens
tgagtcctggctctcaagaatccaattaaaatcattcaagattgttattgagtctaaagccaaaaagtgaaaattcacactccatcctagaattttgttgtggaaaaggatcatctggtccaacaataccactttacttaataaatgagaaagatgagtttggtaggatgggagccacagtcaaagtagaatgtatttcagctgcttgggaaaaagctggggtaggaggactttgtgtacacgtggtatcatcagcttgagaggatttctgagttggaggatgaagttgacagaacagagaactgggattgaacaaagcccagcatggaaggagtctggatctaggcagaagaaagaatgctggacaccaagcatggcaaaatgcaaatcattgtcaaagctggttgctgtgcacaggggstcatcacaccattctctctgctttgtgcatgtgtgcaacttttaataataaatagaaaagtatgcagggcaggttaactgtggaagtttcatatgctggtgaggttgagagccttgtgaacatggattactcagtgagtctgaatatgttgaacttctgttcaaaaacactacttggtgacaattcaaaaattaacatagggccagaagcagagggagcttcaagtttagatggcccagatggtatatgattgaagtgactcagggaagaaccccagaaaatatgtgcctggccctagagccaccaatcatggctgatacaataaagaattcagcatccatctcaactcctctgtagttgcctccctggaaagctaggaaccatgttttccaagcttctttaccacttggttcaacatgggacccaggtttggtcaagcacttccacctgcacaaatataggaggcagaagtgagcaacaggacctgctgttgggtgaggggaagtagcctcttgtgacaatggcaaatgtggaggaattaggctcttctgggatagctgcgggaaagctcttggtgtccagttcctagtattatgggagccaaagaacaagaagaataattctgctcagtggcgtggtgttcagccggattgctcttggctacggtggtcctggatgtgagctttcctaactgggtgttgtttttttctgcccttcccaaagattgagttgcctcttaatatcctcaaactcctttctgactaatcagcaaagggat

SEQ ID NO: 714021 - DNA, 1199 bp, Homo sapiens
tgagtcctggctctcaagaatccaattaaaatcattcaagattgttattgagtctaaagccaaaaagtgaaaattcacactccatcctagaattttgttgtggaaaaggatcatctggtccaacaataccactttacttaataaatgagaaagatgagtttggtaggatgggagccacagtcaaagtagaatgtatttcagctgcttgggaaaaagctggggtaggaggactttgtgtacacgtggtatcatcagcttgagaggatttctgagttggaggatgaagttgacagaacagagaactgggattgaacaaagcccagcatggaaggagtctggatctaggcagaagaaagaatgctggacaccaagcatggcaaaatgcaaatcattgtcaaagctggttgctgtgcacaggggctcatcacaccattctctctgctttgtgcatgtgtgcaacttttaataataaatagaaaagtatgcagggcaggttaactgtggaagtttcatatgctggtgaggttgagagccttgtgaacatggattactcagtgagtctgaatatgttgaayttctgttcaaaaacactacttggtgacaattcaaaaattaacatagggccagaagcagagggagcttcaagtttagatggcccagatggtatatgattgaagtgactcagggaagaaccccagaaaatatgtgcctggccctagagccaccaatcatggctgatacaataaagaattcagcatccatctcaactcctctgtagttgcctccctggaaagctaggaaccatgttttccaagcttctttaccacttggttcaacatgggacccaggtttggtcaagcacttccacctgcacaaatataggaggcagaagtgagcaacaggacctgctgttgggtgaggggaagtagcctcttgtgacaatggcaaatgtggaggaattaggctcttctgggatagctgcgggaaagctcttggtgtccagttcctagtattatgggagccaaagaacaagaagaataattctgctcagtggcgtggtgttcagccggattgctcttggctacggtggtcctggatgtgagctttcctaactgggtgttgtttttttctgcccttcccaaagattgagttgcctcttaatatcctcaaactcctttctgactaatcagcaaagggat

SEQ ID NO: 714022 - DNA, 1199 bp, Homo sapiens
tgagtcctggctctcaagaatccaattaaaatcattcaagattgttattgagtctaaagccaaaaagtgaaaattcacactccatcctagaattttgttgtggaaaaggatcatctggtccaacaataccactttacttaataaatgagaaagatgagtttggtaggatgggagccacagtcaaagtagaatgtatttcagctgcttgggaaaaagctggggtaggaggactttgtgtacacgtggtatcatcagcttgagaggatttctgagttggaggatgaagttgacagaacagagaactgggattgaacaaagcccagcatggaaggagtctggatctaggcagaagaaagaatgctggacaccaagcatggcaaaatgcaaatcattgtcaaagctggttgctgtgcacaggggctcatcacaccattctctctgctttgtgcatgtgtgcaacttttaataataaatagaaaagtatgcagggcaggttaactgtggaagtttcatatgctggtgaggttgagagccttgtgaacatggattactcagtgagtctgaatatgttgaacttctgttcaaaaacactacttggtgacaattcaaaaattaacatagggccagaagcagagggagcttcaagtttagatggcccagatggtatatgattgaagtgactcagggaagaaccccagaaaatatgtgcctggccctagagccaccaatcatggctgatacaataaagaattcagcatccatctcaactcctctgtagttgcctccctggaaagctaggaaccaygttttccaagcttctttaccacttggttcaacatgggacccaggtttggtcaagcacttccacctgcacaaatataggaggcagaagtgagcaacaggacctgctgttgggtgaggggaagtagcctcttgtgacaatggcaaatgtggaggaattaggctcttctgggatagctgcgggaaagctcttggtgtccagttcctagtattatgggagccaaagaacaagaagaataattctgctcagtggcgtggtgttcagccggattgctcttggctacggtggtcctggatgtgagctttcctaactgggtgttgtttttttctgcccttcccaaagattgagttgcctcttaatatcctcaaactcctttctgactaatcagcaaagggat

SEQ ID NO: 714023 - DNA, 1199 bp, Homo sapiens
tgagtcctggctctcaagaatccaattaaaatcattcaagattgttattgagtctaaagccaaaaagtgaaaattcacactccatcctagaattttgttgtggaaaaggatcatctggtccaacaataccactttacttaataaatgagaaagatgagtttggtaggatgggagccacagtcaaagtagaatgtatttcagctgcttgggaaaaagctggggtaggaggactttgtgtacacgtggtatcatcagcttgagaggatttctgagttggaggatgaagttgacagaacagagaactgggattgaacaaagcccagcatggaaggagtctggatctaggcagaagaaagaatgctggacaccaagcatggcaaaatgcaaatcattgtcaaagctggttgctgtgcacaggggctcatcacaccattctctctgctttgtgcatgtgtgcaacttttaataataaatagaaaagtatgcagggcaggttaactgtggaagtttcatatgctggtgaggttgagagccttgtgaacatggattactcagtgagtctgaatatgttgaacttctgttcaaaaacactacttggtgacaattcaaaaattaacatagggccagaagcagagggagcttcaagtttagatggcccagatggtatatgattgaagtgactcagggaagaaccccagaaaatatgtgcctggccctagagccaccaatcatggctgatacaataaagaattcagcatccatctcaactcctctgtagttgcctccctggaaagctaggaaccatgttttccaagcttctttaccacttggttcaacatgggacccaggtttggtcaagcacttscacctgcacaaatataggaggcagaagtgagcaacaggacctgctgttgggtgaggggaagtagcctcttgtgacaatggcaaatgtggaggaattaggctcttctgggatagctgcgggaaagctcttggtgtccagttcctagtattatgggagccaaagaacaagaagaataattctgctcagtggcgtggtgttcagccggattgctcttggctacggtggtcctggatgtgagctttcctaactgggtgttgtttttttctgcccttcccaaagattgagttgcctcttaatatcctcaaactcctttctgactaatcagcaaagggat

SEQ ID NO: 714024 - DNA, 641 bp, Homo sapiens
tgaactcattcatttagatagaaaaaatctgcatcaaaattttttctccctgatacctttacatagaaaaatactcaacatttagaatttcctacctctcttcacttgagagtgttattagacttaggtgcaagaaaggaaaacttaccgagaatgacttaagtataaagcttgacgatgaatatcttctgggtctatttctacaggatttattacagctagttgatcaatagaccatctaaatttccctggagtcttaacaaaagaaagtgagcttatgagtaaaggcaaactaaaatagttcatcaaaatgctaacctatgtgagaaataatatgaatggttataatatgaaaatattttaaagcttgtattttaaaatttgactttaccatgaaattaaatggcaaagggtaatcatatcacattcgatcaactgacttaattgtatctctctctctctttgtttaagacagagtctcgttctgtcaccgaggctggagtgcamtggtgtaatctcagctcactgcaacctccacctccccggttcaagcgattctcctgcctcagcctcctgagtagctgggattacaggcacccgccaccacacccagctaatttttgtatttttttttttttttt

SEQ ID NO: 714025 - DNA, 644 bp, Homo sapiens
tctatttcctcatgctgaaaaagcactggcaagaagaaattttatcatgaatacttacattcctagtattgtctatagagtctgaaatgaatcttctaaaacaggaattttaaatattatcatcaagagtacccttgaagtcccaagcctatagaatattgagttatgatgacagagaagtgccataggaaaaaaaatcctgaaacacatttgttctctgggaggaattctttacctgggaaaaaaatatgtcatccaaagaagaggaatccaaataatccactgggcagaggccttttgatctccagaaataagtattttgaggtatcttcttcctctttagatgctgagcatgggctcatcgtggcccaactctatagaaatagcactttgggaggccaaattgggtrgattacttgaggtcaggtacaatttctatagaaatacagaggacttagctgagtcccacatggtcctgtcttggcttaggttgacataacaaagtaacatagactgggtggtttaagcaacagaaatttacttttcacaggtctggaggctggaaaattcaagatcaaggtgccagcaggataggtttcattctgaggacacttctctcggaaggtctgaggacctcctcactg

SEQ ID NO: 714026 - DNA, 597 bp, Homo sapiens
acaaaagtgcattctaaataagatctacttttgctctcaataaaatttaaaatataaaataagagatgacagatgaaataagaaagcaaactgagataaaagggaacttgatgtaggcaggaataaaaaaagtaagatgattgagatataaaatgttttaaataagttaaaaatgccaccacaatattataaaaagtactagcatcagaactaaaaaatgtttctgctgtttgaaagaaaagtcagaacttttattataatgcagatgaacagaacaaagttcccattttagaatctaatggaaagcataaaactcatccatgaaaagatcacagcacttacaattttgaataaatttcaaagttcatggattccccccaccaaaaaaagataaattatggacytcaaaggaagaatctctgatctagtaaaagaaaatgagctataattcaggtccagaattaaataaggtctttgtacattaatcgctgatgatatcttatatctagaaaaccccaaagactcaatcaaaaaactcttagatgataaataaattcaggaaagtttcagaatacaaaatcaatgtagaaaaatcag

SEQ ID NO: 714027 - DNA, 620 bp, Homo sapiens
caaggtcagtcaaaacagggacatacgcctgtaatcccagcactttgggaggccaaggcgggcggatcacgaggtcaggagatcgagaccgtcccggctaacacggtgaaaccccgtctctactaaaaatacaaaaaattagtcgggcgtggtagcgggcgcctgtagtcccctctactcgggaagctgaggcaggagaatggtgtgaacccgggaagcrgagcttgcagtgagccgagatcacgccactgcactccagcctgggcaacagagtgagactccgtcttaaaaaaaaaacaaaaaaaaaaacagggacgttgcacttgtggtattctgaatgcccagatggtgggatgtaaagagttgtcctgaaagatccccttcccaaaactctctctcccactaacctgccacagtacctggactccgtcactatgaatccacccctgtggatgatggcttcctcgcttgaggagcatcctatgacaatgcaggcactccacacagatttgaaaaaaattactctacgtacagtctaagactgacactgtctgttgaccttgggcaaggtactcgacctccctgtgcctcactgttctcatctgtaaaacaggaataat

SEQ ID NO: 714028 - DNA, 861 bp, Homo sapiens
actagttctacgcaaataagaatttatactacctataaatgttagaaagaaaaatatataattccaaaatttgatttttataatggcattttatttttatcataaaaaggatatatgtgtaatgaattaagtgggaagatagaaatattagcatatgtgtgtgtaaaggcctaaataaaacatagtcctacatagcagattaaagtgtgtgtgtacacatgggttcacagtttcatgcacaagtgattgtgtgtgtgagagacaaaataaattgtgaaaacactggagtgattggctatgtgctattaattgagggaaggtagaacaacagaatcagtggaaactttggagaacatatgagctaatctgcagctctgaagctcgttggtgactcagctattgtaaatatatatgaagttgcatgttgccatctcaaagacttgcagagagaatctcttactatcctaagaataacaaaaacattttgttgtgttatttttatatctagctaaaaacctcccttttaagttattttactttgggttttgcctttgaggacagagacgtttgaggatatggagtggaacttgtaaacatttactgcctcacaaattcacagacacacatcaaggcagttgagcttggttttagctacatcttgactctttagctactttgtttttaatggtatttacctttattgttcttatttgtttattattyagtcactaaaatcagatttcttacctttcatgaaagtcaacatataacttcataaaataattgaattgtccctgaaataagttttccattttttgatgctgttgaaggtttctttggcagtcttagaataaagcagtc

SEQ ID NO: 714029 - DNA, 1249 bp, Homo sapiens
gcatccattagttattattatttgttkgttagaacatatagatcacatgaccttaccatttatctttctatcatcaaacactttaaaaaaataaatgttacaggtaaaatgtaatagattccatacaaatttttacagataaggaaatatatattatagtgaatatgagaaaaacattgggtttaataatgtcagagtaaaatacccactgagggctcttatccaaaactatatgaatatttacacaaagcatctttcttttactctccctgtaagtatgtgtttttctaatttgttattgtggttaaaatacccataatgtaaaatttaccatgcaaactatttttaagtgtgcattttgctggaatgaaatacattcacgatgtttcactgtcatcaccactattcagccacatcactcttcaccaagtaaattgtacctgatgaagtacaatttgatgatgtacttgatgaaattgtaaagtttcaattgaaactttataccaattaaagaataatttcccatttccatctcccccaccccttggaaaccagcattctactttctgttttatgtgtgctctaaggacctcatataaatggagttgcatagttttggtcttcttgtaactggcttatttcacctcgcataatgtcctcaaggttcatctatgttgcagcatgtctgaatttcattcttttgtagggctgaataatattccattttatgtatatacaacattttgctgcctattcaacagtcgaaggacacaagtttcttttatagtttagctattgtgtaaagcagctataaacataggtgtaaaaatgtctctttgagaccctgctttcaacttggagggttatattcccagaagacttcaatgggaaaagcaaaatctctttaaaaattggtgctgtcatggacataaggatgaaataacagactgaggacaccaaaagaaaggaaatagggagaggggcaagggttgaaaaagctacctattggatactatatttactatttggtgatggattcaccagaagcccaagccccagcattagacaatacaactatataacaaacctgtacacctacccctggatctataatagaaggaaaataatggtgttgagaaaagtagatttccacatgcaaaacaataaagttggaccctaatccaacgtcatatataaaaagtaactcaaaaaggattacaagcctaaatgtaagacataaaactataca

SEQ ID NO: 714030 - DNA, 1249 bp, Homo sapiens
gcatccattagttattattatttgttggttagaacatatagatcacatgaccttaccatttatctttctatcatcaaacactttaaaaaaataaatgttacaggtaaaatgtaatagattccatacaaatttttacagataaggaaatatatattatagtgaatatgagaaaaacattgkgtttaataatgtcagagtaaaatacccactgagggctcttatccaaaactatatgaatatttacacaaagcatctttcttttactctccctgtaagtatgtgtttttctaatttgttattgtggttaaaatacccataatgtaaaatttaccatgcaaactatttttaagtgtgcattttgctggaatgaaatacattcacgatgtttcactgtcatcaccactattcagccacatcactcttcaccaagtaaattgtacctgatgaagtacaatttgatgatgtacttgatgaaattgtaaagtttcaattgaaactttataccaattaaagaataatttcccatttccatctcccccaccccttggaaaccagcattctactttctgttttatgtgtgctctaaggacctcatataaatggagttgcatagttttggtcttcttgtaactggcttatttcacctcgcataatgtcctcaaggttcatctatgttgcagcatgtctgaatttcattcttttgtagggctgaataatattccattttatgtatatacaacattttgctgcctattcaacagtcgaaggacacaagtttcttttatagtttagctattgtgtaaagcagctataaacataggtgtaaaaatgtctctttgagaccctgctttcaacttggagggttatattcccagaagacttcaatgggaaaagcaaaatctctttaaaaattggtgctgtcatggacataaggatgaaataacagactgaggacaccaaaagaaaggaaatagggagaggggcaagggttgaaaaagctacctattggatactatatttactatttggtgatggattcaccagaagcccaagccccagcattagacaatacaactatataacaaacctgtacacctacccctggatctataatagaaggaaaataatggtgttgagaaaagtagatttccacatgcaaaacaataaagttggaccctaatccaacgtcatatataaaaagtaactcaaaaaggattacaagcctaaatgtaagacataaaactataca

SEQ ID NO: 714031 - DNA, 1249 bp, Homo sapiens
gcatccattagttattattatttgttggttagaacatatagatcacatgaccttaccatttatctttctatcatcaaacactttaaaaaaataaatgttacaggtaaaatgtaatagattccatacaaatttttacagataaggaaatatatattatagtgaatatgagaaaaacattgggtttaataatgtcagagtaaaatacccactgarggctcttatccaaaactatatgaatatttacacaaagcatctttcttttactctccctgtaagtatgtgtttttctaatttgttattgtggttaaaatacccataatgtaaaatttaccatgcaaactatttttaagtgtgcattttgctggaatgaaatacattcacgatgtttcactgtcatcaccactattcagccacatcactcttcaccaagtaaattgtacctgatgaagtacaatttgatgatgtacttgatgaaattgtaaagtttcaattgaaactttataccaattaaagaataatttcccatttccatctcccccaccccttggaaaccagcattctactttctgttttatgtgtgctctaaggacctcatataaatggagttgcatagttttggtcttcttgtaactggcttatttcacctcgcataatgtcctcaaggttcatctatgttgcagcatgtctgaatttcattcttttgtagggctgaataatattccattttatgtatatacaacattttgctgcctattcaacagtcgaaggacacaagtttcttttatagtttagctattgtgtaaagcagctataaacataggtgtaaaaatgtctctttgagaccctgctttcaacttggagggttatattcccagaagacttcaatgggaaaagcaaaatctctttaaaaattggtgctgtcatggacataaggatgaaataacagactgaggacaccaaaagaaaggaaatagggagaggggcaagggttgaaaaagctacctattggatactatatttactatttggtgatggattcaccagaagcccaagccccagcattagacaatacaactatataacaaacctgtacacctacccctggatctataatagaaggaaaataatggtgttgagaaaagtagatttccacatgcaaaacaataaagttggaccctaatccaacgtcatatataaaaagtaactcaaaaaggattacaagcctaaatgtaagacataaaactataca

SEQ ID NO: 714032 - DNA, 2488 bp, Homo sapiens
tcttcacacaaatttccattgtacctctaatggtgtcatggtaattggatggaagtcatagccatttgcacactttcttaagtatattcttcaatgactggaattgtctagaatctaaagaaattatacaatagaacatgtttttttaagtaaatagaaaaaatactattataaaaagtaaatgtgcataaattagacggcccctcctcaaaaccatgattccttaatgtttgtaaaaaagtgtgtatatatttttattagtatttttacaaatactgatccaaggttttcgaaatatttgtcgcaaatgagttcaaagtttattatagcccttatttaataatatcaaattaaaagcagttggcagataggcatttttactacccgttttaatagacaacttaggcaatttaaaaggaaaacattataattaattttaaaaacactttgactctaccagaaatatgtgaataagtatcaaaagaaagctattagaatgattccttttcactgaaaggctacaaaaattcctactgatatttaaacagctactggatggtcagcaattttctcaaattgccaaatattattacaagtgatccatactgtgacaactcctttgtattgagaagatctttagggaaaccaaaaaaattgagtgcagatttatgcagatttcttcttctccagtcatgtaattgcttaggaaaaaaaagctgtaataccacattcagtagttaaatatccaataaaattagtccatggagctacgttgtaaggtatggtattatacatttccatataggccacctctcaagtgttcaggattattttaatttctctcagaaccattatgaaaaaagtataagaaaatagttgaaaatttgagatgaaaattatgcaagtctcttcaatatgacagttccatgttacttttaatggatttgttgttccctagctactttacttctagcaataatttggatatttattttctaattaaattttgactttagaaatgacttatacacatttaatgtaataataaagctctttacagttttgaaaatattcaaaatttttcccttcattggaagatttttcaattaacacctagagcaaaattttaagaattatataattagaaaaattctgattacttcaggaaataatgatgtcaaattgttcaagtcgttacaagttatatttattaaagttcatggataaaaatgttgttttgaattcagattgcttaatatggcctgtagaatttgatgtatgggtgtattacataaacttatgcttgaaatgatttttctaagtgtcaatcttgcctgacagctccaagaaagctgaagaaattaagaagcaacatgatattccttaataaataaatccataagacaacaccaagcaaccagaatgagaaaggatgcagataagagcaaagacatgggggtcgtgcatgggaggcagcatgggtggcatgcatgggtggcacccatgggtcatgcatgggtggcagcatggtcttgtcttctattttgatttagatactttgagagtagtcttgattccccatttcttaagtatgaatagttatgcttatgtaataaaggtctaattgtaattaaccttacaatttaagccttagaatgtggtaaattaaggaagactcttcatttatactttgcatgctttaaaaaatcatgtacatatattttgtaaactttgtttatgtcaaactctcttaaacacaaattatttcatggtctttataccaacactatgtaaaggagaagactttgactcaatagcaacagcaaaacttaaaaagaaaacctgaaggcttgtgtctagcggttttatcgttttcatcttatgcatccaactcaatagcaaaagacatagaggttctgtgtttctttgcttatattattatacatatatataaaatatgtaattattgtatatataaatatgtaaaaccccacaaaaatcctttcacatccttcacccatgtgataaacctctgagaggtttatcactggacattctttagtaattctaattagtaattctaatgagaaattgccaagtaacagcctctccaacaatgaactacatcaatgaactctgtttctaagcaggttatgtgaacctcttccttttcacaaataaaagcttctctttacccttccctcaccaaatgcactggtagcttaccattctgtgcattttggattrtaattctcatttctcatttctcatttcctagtaaacgcaacatattttgggaaaattttctttagtgactttttaggttgacactggttactctatttagaacctcaaaaaaatttctaggcaccaaacaaatgaaatgaggaaaagaaagggctctttatctgtcaagtctattaatcccattacttaattcccataataagaacattaacagtgataaccattattaagtatcttcaaa

SEQ ID NO: 714033 - DNA, 790 bp, Homo sapiens
gtcaaacgtggtggcgggcacctgtaatctcaggtactcrggaggccaaggcactagaatcacttgaaccagggaggcacaggttgcagtgagctaaaattgtgccattgcgctccagcctgggtgacagagcaagactccatctcaaaaaacaaacaaccaaaaaaaaaaaacctaataaaaggatagtaaggaaatactaagcaactctacgtatataatcccaagaagttggatgaaatggaccaattccttgaaaactacaaactaccaaaaaatactcaatatgaaacataatttttaaaatcttgtaacaatgttaaaaatggaattcatggtttttcattttattttgttttattttgagactgcatctcactctattacccacactggagtgcagtggcacaatcacggctcgctgcagccttgacttcctgggatcaggtgatcctcccacctcggcctcgtgagtagctaggactacaggtgcctgccaccacatccagctatttttttatttttttgtagagacggggttttgccaagttgcccaggctagtctccaactcctggggctcaagcaatccacctgcctcggcctcccaaagtgttaagattacaggcgtgagtcaccaggcctggctgaattcttcttttttttatgaccagattttcacagagtcaaatctgatccttttattctcagagttcaagtctcagcattaaaatgtatagcatcagtataacctaccctgtagaaagctgcccaatatgtgccagggcatgc

SEQ ID NO: 714034 - DNA, 790 bp, Homo sapiens
gtcaaacgtggtggcgggcacctgtaatctcaggtactcaggaggccaaggcactagaatcacttgaaccagggaggcacaggttgcagtgagctaaaattgtgccattgcgctccagcctgggtgacagagcaagactccatctcaaaaaacaaacaaccaaaaaaaaaaaacctaataaaaggatagtaaggaaatactaagcaactctacgtatataatcccaagaagttggatgaaatggaccaattccttgaaaactacaaactaccaaaaaatactcaatatgaaacataatttttaaaatcttgtaacaatgttaaaaatgraattcatggtttttcattttattttgttttattttgagactgcatctcactctattacccacactggagtgcagtggcacaatcacggctcgctgcagccttgacttcctgggatcaggtgatcctcccacctcggcctcgtgagtagctaggactacaggtgcctgccaccacatccagctatttttttatttttttgtagagacggggttttgccaagttgcccaggctagtctccaactcctggggctcaagcaatccacctgcctcggcctcccaaagtgttaagattacaggcgtgagtcaccaggcctggctgaattcttcttttttttatgaccagattttcacagagtcaaatctgatccttttattctcagagttcaagtctcagcattaaaatgtatagcatcagtataacctaccctgtagaaagctgcccaatatgtgccagggcatgc

SEQ ID NO: 714035 - DNA, 3119 bp, Homo sapiens
tgaaaaaagttgaaggacacgctgcaaagtgtgaaaaaaacagggcctgagcttgccaagagggtccaagtggttactttaatcatgtggaacagcccccttttcatggaaaattttctactccaacacctgtggccattaaaggtgccctcggctctttcctacccgggatcccaggggtcactctccaactgaggctggctgccagctctggtcattactcctgtgcccctcctctgtgccttcctcagcccttcccagcccagccctgctttgccccaggcctgctgggtgcaggcatgcagtccttcctggcttcccttgcctctctgcagtttctgaaatgaacacttcagtgagacgaggttccctcctgttgcactggttgctctctgaggcttcttgggacaggcctgtctctgtccccctgccacctctgactctctgcttcctccagagtcttccttaggcaggctcacttccccggaccctggagatgctccagtgccttccatcccccaggctgaagtgccctgtgcctcctctcaactcagagacagggaagccctggagaaacagccccaccagcccttttttgatctgctgttcctctgcatgcccagttttcgttttcagattgtgtatgctgctttgggtttgcaattgatcatcagtgtgcttgggatagtgtgcagccccctccccaccattctttggtgaaaaactgggatgcagaggagtgaagagatttccctaaagttccgcagtgtctgccaagacagggaaggactgggcatagactgtgkaagccagacctcctgaaggacttgccccagctttctctccccatctccttacttgctccatggtccacccaaccttgcctcctccatcacactgcagacacagctcttactcaggccactagtgacctgtgtctctaaatcccatagacattttctctcctcatcttgccttcttgacagcattggacacttgcttccctccgctgctcaggacattctcttcgtctgcttctgtgcatcctcctgctccttgttttcctgaccacacaggccagttctttgtgggaggcctgttctccagcacttgaaagctggcgctcctctgggatcaggtctgggttctcttcccattctcaactttcttcctttgcaagctcaccctgacccactgcttctaccaccatccacatgtctccagccctgcgctctcctgggtgctccatctgcctcctttctgatatcatttggatgccacaaagacgcctcaaaaataatttgcctagaactgaatccatgatctttctcaagactccaatgttgcacaaggccacaatcatcattgaacaaagtggggccctactctttaccccaaacttggtccccttggtacttctgaacccactgaataggaccaaccaaacagggctgcaggctggaaatcacagagtcattctcaatgcctccttctctctgtccccctgccagatgcaatccgtcccctggtcccctgtcctgtgcgagctgctatcacctccacacttcaatgttaccacatgatatagcaggtggtgaaagtggaaatgaggaccagggacagatggagactgactactgagatggtgattttctagctcccaatctagaatttggactacatccctgtaggaaagtgtgtctaggaaattgcatccagttaggaaaataaacatggtagtcagtgcatccatacccaagccaggtgacacagactataccacattgcttggtatggaaggtggcatccagccatggatggtgttgaccttttgtgtccagagctttgttttcctgtaaggccatttaaatatgcaggagcaattcaaaatattgaaagccattcctaagtcaaggggaaaaaaacaggcactttcaaaataatatgattcccctgatattattcaagtgtgaagcagactaccagagggtggcccgcacagctcatttgtttctatactgcccacagtacccaacagaatgcttagcacgcagcagcttcctacaagtatcttgagtaagtgaacgtgtgccttctaaaatacacgggactcactggtcaagtgctggaaaacatcaagcatgattcaatgataatcagaagaggcactaaaggtgacccaatctctaaatgtctccttggcccagacttttctttctgccaatttagttcttgctaaaacaatacttttactaatgacccaggaaggagtgggcagagctgggcagctaaagaggtggtgacagtgggaggggagctccctacagccatgtcactggtacctgggccctccatctgggcatcccaagtttcaaggtgagcttactaaaaagcctcaggtctcattccaagtaggaaatggaatttggaacgctcttgactccattttgcagaagagtaaagcaagacctaaagggaagatgtggccaggcatggtggctcatgcctgtaatcctagtatttttggaggctgaggtgggtggatcacctgagatcaggagttcaagaccagcctggtcaacatggtgaaaccccatctctactaaaaatacaaaaatcaactgagtgtggtggcaggcacctgtaatcccagctactcagggggctaaggcaggagaatcacttgaacactggaggcagaggttgcagtgagctgagattgtgtcattgcactccagtctgggcaaaaagagtggaactctgtctcaaaaaaaaagaaagaaaagaagaagaagaagaaggaaggaaattctgacccatgctataacatggatgaacttgaggacattatgctaagtaaaataagccagccacaaaaggacaaatactgcatgcttccacttataggaagtccctagaggagtcaaatccaaaaacagagtcgaggttgccagggtctgggggaaggggaatgtggctgctgttgccaaaggaccataggttcctttctcctcccgtggcctcaccaagactacagcagtctctcccctaatcccctttgtcttcttctcctcccagtccagcccccatgttgctgtcagaaaggtttttctaaaatg

SEQ ID NO: 714036 - DNA, 1737 bp, Homo sapiens
cacttataaatgggagctaaacattgggcattcatgaacataaagatggcaacaatagacagtggagacaactagaagggagaggaaaggaggagcaagggttcaaaaactattgggtaacatgctcactacctgggtgacaggatcaatcgtatccaaacctcagcaccacgtaatataccgatgcaacaaacctgcacatgtacccccaaatctaaaataaacagctgaaaataatttttttgataacaaaagtaggctaggccaagctttaatactcagtaggttagctgtgttttaaatccattttccatttgggatattttcaaccccgtagtaagtcgagaagcatctgttcctacctagaaaatcttccataaggtaatcgattaaaaggttttaaggaaatacaagaaaaacctgaccagtgaagaggtaaaagcccctaaagaaggcgtaccgacactctccaggacgctcgcagagccttcaccccctggccctggggaaggaaattcccagtgcaggagtgagggagagacccaaaagccaagaggagcctgcgcaaagcgaccgcagtggcggccccaggggccactgcccagaaccatccctcccacacaaacgcacaaccctaaacccccaccgcccgcccttcgctccaaggcccccggggccagcarccagggcgtccctggcacttcagaccaaagctgcaggcccgcagaaggccacttcggtcgctcctgccgccttccctccctcctccctcgttggcctgctccggcgccactccctgctttgtcccgcacgagcctacaggctgtcgcagcctcccgagcttccccctgcaggacgcaccggcgaaaatctgacagaaaccactggccctgcaaagaagtccttctggtaaccagctatcccctcgccgccggagaagctcaaggatcccgcctcggcgaagccaatcgcggacgagcccgccgcgcgtgcgcactacctagccgctgcactgccctgtcctgccctactctgattggacgaccctactgcatcactgcgcatgtatctttgcgtttggctttaaatgcttccaagtttgattcaagtttacggttcaattaaaaaaatactggtttagtgcctactttcagacacagtgtagatgccgaggctacagacctcaccatctgcgtggataagtaataaatacggtatgattcggtgtgtgcgataatagaaatgcgtgcatcgcagaagtatacgatatcctattggttattcattcatccgaaaaaacattgacttagcggtgcctgcaggataattttcaaactctttgttaggttctgggaatatagaaacgaatacgtgattattaggctctcagaaaaggggagccgcctccggacttggaaaagcattaaagcatgttaagtaggaaagttacatcattcaatgagtatttactgagcaccttctaagtgctaggcggtaacacagtcaactatccctgaaaaatggtattagaaaggctaatctgaaaggagagagaatggctaaaggttgtttattgagttttatccagcagtttgacaaaaagtaaaagctaaaaaatatcaagggtgaaatgaagatgtgaaacaatgggaactcttgggctgctggtaggagtgtaaataggtacagccatttaaaagagtaatttgaggctgagagcggtggcttgtgcctgta

SEQ ID NO: 714037 - DNA, 1737 bp, Homo sapiens
cacttataaatgggagctaaacattgggcattcatgaacataaagatggcaacaatagacagtggagacaactagaagggagaggaaaggaggagcaagggttcaaaaactattgggtaacatgctcactacctgggtgacaggatcaatcgtatccaaacctcagcaccacgtaatataccgatgcaacaaacctgcacatgtacccccaaatctaaaataaacagctgaaaataatttttttgataacaaaagtaggctaggccaagctttaatactcagtaggttagctgtgttttaaatccattttccatttgggatattttcaaccccgtagtaagtcgagaagcatctgttcctacctagaaaatcttccataaggtaatcgattaaaaggttttaaggaaatacaagaaaaacctgaccagtgaagaggtaaaagcccctaaagaaggcgtaccgacactctccaggacgctcgcagagccttcaccccctggccctggggaaggaaattcccagtgcaggagtgagggagagacccaaaagccaagaggagcctgcgcaaagcgaccgcagtggcggccccaggggccactgcccagaaccatccctcccacacaaacgcacaaccctaaacccccaccgcccgcccttcgctccaaggcccccggggccagcaaccagggcgtccctggcacttcagaccaaagctgcaggcccgcagaaggccacttcggtcgctcctgccgccttccctccctcctccctcgttggcctgctccggcgccactccctgctttgtcccgcacgagcctacaggctgtcgcagcctcccgagcttccccctgcaggacgcaccggcgaaaatctgacagaaaccactggccctgcaaagaagtccttctggtaaccagctatcccctcgccgccggagaagctcaaggatcccgcctcggcgaagccaatcgcggacgagcccgccgcgcgtgcgcactacctagccgctgcactgccctgtcctgccctactctgattggacgaccctactgcatcactgcgcatgtatctttgcgtttggctttaaatgcttccaagtttgattcaagtttacggttcaattaaaaaaatactggtttagtgcctactwtcagacacagtgtagatgccgaggctacagacctcaccatctgcgtggataagtaataaatacggtatgattcggtgtgtgcgataatagaaatgcgtgcatcgcagaagtatacgatatcctattggttattcattcatccgaaaaaacattgacttagcggtgcctgcaggataattttcaaactctttgttaggttctgggaatatagaaacgaatacgtgattattaggctctcagaaaaggggagccgcctccggacttggaaaagcattaaagcatgttaagtaggaaagttacatcattcaatgagtatttactgagcaccttctaagtgctaggcggtaacacagtcaactatccctgaaaaatggtattagaaaggctaatctgaaaggagagagaatggctaaaggttgtttattgagttttatccagcagtttgacaaaaagtaaaagctaaaaaatatcaagggtgaaatgaagatgtgaaacaatgggaactcttgggctgctggtaggagtgtaaataggtacagccatttaaaagagtaatttgaggctgagagcggtggcttgtgcctgta

SEQ ID NO: 714038 - DNA, 627 bp, Homo sapiens
tttgtttagggcaatcaatacctgtcagtctcaaagcttggtccctatttcctcaccccatcatgccatctgagaggccaatgcttccacagccatgaaggtggatggggtgaattttttgctaacttaccacaatgtgcagctctaagtgtgaggctgatatccctcctacctaattcccaagaaaggggctgacattattcccaaacaagaacaccaaactatcagyttaaagctctaacaatggttctccatatcaccttgctgttgaatcctggcatttaatgcccacctgccccgcatcctgggatgaagttgatgtttccctaatcccgcaacataaaagcatcacagcccaaagatctgagtcttttcccagacctgagagttaagctctactaggctgctgtgtagtgccccacagcccctgctattgctcctgccacctgagtattccccaagaaatgctactcaagcaagcctagttcaagtgacatatggccacttgaacttgtctatacagtatcaaattacatttttgttttgctaacttgaaaggtataaaatgctttcaatatgcatacccttggctgctaggggactgaacatcttttcatggtgttattg

SEQ ID NO: 714039 - DNA, 1330 bp, Homo sapiens
tactactaagcaaaagaagccagtctgaaaaggctacatactctcatttcaactgtatgatattctgaaaagggcaaaattatgaaatcagtagaaagatcaatggttgccaggggtttgggggacggaaggagggatgaacagttgaaacacaggagatgtttagggcagtgaaactaatctgtatgatactgtaatggttgatacatgtccttattatttgtcaaacttttctgctcaaatttgcaggtcattttttccatcaacttataactactctaaaaaataaagtcattaatcttaagaaaaaaggtttgttaaagatgcaatacaaacagcattctcagacactagagagaggtataaattggtactgcctttccggtaaacagtctggaaatacaaatccacagcctttaaaatgatcacacccttcaatccactaattccgcaagcatttgcactagggaaatctcagaaatatgaccaaagtctgattgataaatatgttcacattatttacaggatggaaaaactgaaaacaaagtaaatgtctaagagtagagcattattttaaagactgtgtctattaatacagccattacacaaccactaaaaatactaacatggaaaagtagtgacaaatcacaaaaggagagcaggctacaaaacaataaacacaacacacttctattttttgctgtcttaaaagtgcttgttgggctaggaatacaaagcctgagacacagcttgaccaaagtgaccactaataatggacatgagaatggtgagggtgggggcacctgggaaggggcatgaacaaacacggaatgttggaaattgtctctatcccaatgctgattacaggactgcaggtataagttcactaagctataaacttcagaacggtgtactcaagtgccttatgtaaattataataagaaagtaaaagacaacaccgggaacggcagtgattgagagaggcatgaggagggcctctggaatgcttgtttctcgatccaggtgctggtgatttaggtatgtttcatttgtgaaaattcatcaagttgtatcattatgctttgggctttttaaaaaatgtcctaaaagacatagctcttgcmctcgagaaacccacaacgtaatgacagatgtgcaaataaaaacactatagttagaatatactaagatgcatgctttttgtttaagaagctaaatttaagatctatggaaagaggtcaaagctagaatcagtagctgcagcagcctgataagggctgtgcacatgtgcagatacatataccaactaatggaactgataaactgacaa

SEQ ID NO: 714040 - DNA, 2960 bp, Homo sapiens
acaaggaaacagcagccgtggccaagctgaccccagagcccttcccttcctggccctccctctgaatcatcgcgctccacttgtgacgtcgcggacgcccggctygggcaggcgtggggggcccgcgcgtcccgggagccccgaggcggcagcgcgcgtttccacgccgcggtcccgcgggaaagccgggggcggcggcctggctgaggccaagctcggatccggtgccgagccaagcggggccgtgcgtcgccggggcttcgccttcgctcgcgtgacctccgccgtcctccccaaccctcgtcctctggccgcgcctgcggccgcacgcccagcgcccctcgcctaacctcgcgcccgggccgcgcctcctcctcctcctgctccccgccgcttccgtttctcgagggaaaggctgctgcctcctgctctgtcctcatccccggcttaggtaacacgttttcctccttacgacacccaccacagggtccccgcgccgctgcccctcctccttggatctggggcccgggctggtgagcggcgcgcgccgtcgcctctccgcgggtaggtgagtcgatggcgccgggagggttcctcgcctctgcgcgccggcctgcgaggtccctgccccggcagcgaggccgcccccggccgggcccggccaggcatgcccggcatcgccgctgcagccagcgcggaggggagctcgtgagtcccgcggcgcccttggccctgcccgagcggcccgatggggttggggggcgggaagaaagggtggcaaacaacgattttaaaaatccagtcattagtatttgtaggacgaagaagctgatctgacagttgtccagagcagtggcccagctgcaacaggtagatggcgcagctgtcagtgaccccttggtctcagccttggctttgagagatgcatctgagtgtccctagctgccagctacctccagtgacctacttgatgagtgtgaaataaatatgatgggactatatttagaaaaatctttacttccttgctgttaattctctctgcattttgaaaggtggttttgtgaggtgtgcataattagttggtgtgtccagagtggtagctggaaaaaaatatttaacctgggtttggccctatcatgtagacggttaggcgcaaagagtgtgaaaggaaacgcttactttagtacatctgtgaaaaacacttataagaaaccacggcttgttttttggagatttctcattttaaaggtatttttaaagtgttgaataagcagaagtttgcccactgtatgatggtgttcacttcaaaagaacagtgggttaaaagtatggacagaccacttaagtggatcccatctgttgagtaaaagattttttagcccttttacactgattcctagctttgaagccagaaaagttgataaggatcagccctgctcaacttgataatagtataaggatgaaagtaatccactgaactactcttgattggtgaattagctaagtgatctcattcttaccttttaaaatagagaacataagggaaaaaataaaggcaatggaagaattcattttttcaatacagatatttgtttccattcttatgtagagcctactttatttttaagtttttatggatttttatactacttttgaagtcagcttagtcatgaagagaattatgtcaaatacatagagttacactgtactttttgtgtagaataagctaccacttttcaagcttttggactaaaccaccgcttgcttggaaattgcagctttgactaatgccctttaaaatgatataccttattatagatttaaattatagctttccttgttatagtcctgaaaaaaatgaaaagataatttcttgtttgacatagaaggcctgtgagacaaaagttataaaggttattatatatttattttgctttttaattctgtctctaataacagttagaaaatgtctcattctatttcatgttatacagaaattgcttaaaagataattatgttatataaagtgatcaatgaaaacaaacgtcatcttcattttttaaaggtgaggatggtgtatataagcactttttcccgatgtgagtccttatgaatgttcttgttaaaatactttgaatcttgtaatgaagttaataaaactatgttaatgtgtttggctgagagcttagaaataaaggctctggctggcgtggtggctcacgcctgttatccctgcactttgggaggccaaggcaggtggatcacttgaggttaggagttcgagaccagcctggccaacatggtgaaaccccgtctctagtaaaaatacaaaaattagccaggcgtggtagcaagcacctgtagtcccagctattcaggaggctgaggctggaggatccctggaacctaggaatcagaggttgcagtgagcccagatcgcgccactgcactccagcctgggcgacaaagcaagacttcatctcaaaaaataaaaattaagttaaaattaaaaaaataaaagttctgcttcccgtctcctgtgattgatgttgggtactgtttctcaaacttgtctgattgtaaaattcctcagggtagtaggcaagtcggggagtgggtagagtataatagtggtttaaaagattcccagattgcaacttgagacttcctggatcagaatttctaagagaaaggagatatttcaaatagacaaaaatgataaaattttaaaatagtcaacaacaacaaaaaaggtgagtttgggaaatgcaggtgggaaatgactattgttggaatgaatagttgataaaacttattaggactcctgtacataaaatgttcatatatggaaactgattttattaatatgatgaggccactcatttaggaaatctgaaacttttatatttttttctggtcaagcttctgctgatcaaatttagcaaacatatttttgcatg

SEQ ID NO: 714041 - DNA, 1153 bp, Homo sapiens
attatttggaataattgccaaaggttagatttacaaacatgataagaatgtgtgctataacatagcagtgacataattatcagtgatggagaggaaatagtccctggataccacagaagggacactcttccttgtgccatggccatcataactcagtgttgcctagtgatgagggctgaagctgcgaagcagggaaatcaacttttcaaacccttgcagccagctctgtcttgtcaactgttattggccaacattctcaatggctttgggaaatgtgagtcccagagctggactctaacatactgctgcaattatgaccagtatagacacagggaaactactgtaaaagagcgttagaatctaggtattcacacaccgcactcaaacattcagttcaacccccagcttcttccaggatagagctttttccagagacacagtgtgcgaggtcaattcccatagattttttttttccatcaggattgctttagcatctgctagacatttagccaatgtcatgaaaaaaatatataaggttagttttataacagtcacacaggctacaagggcactgatctgtgcaaagatgaatgactattttggaatcttcctcttcctttcagggtattgtgacatggttcctttatggcaaagccaaatgatgaaagaaacaaaactggtctcagtcctgtcagcccagtttccagcctgagccctccaggcactcagcactgcccacgggctccccagagctgctactagctccccagagctgctactagcagcattccactgggattgaaactcctcccagaaactagaacctggcacccttgtcattcttttgttttgttttgtttttttagayaggggctccttctgccacccaggctggagcgcagtggcacaatcacagctcactgcagccttgacctcctgggctcaagtgatcctcccacctcaacctcccaagtagctgggactacaggcacacaccaccactttcagctattcttttcagttgtttgcagagacagggtctcactatgttgcccaggctggtcttgaactcctgggctcaagtgatccatttgcctcagcctcctaaagtactggaattacaggtgtgggccactgtgcccaaccaccttgt

SEQ ID NO: 714042 - DNA, 666 bp, Homo sapiens
ttcaaacaggagcaagcacaggtgatgtacacagagggtctgtggtgtggggcctcgagccaatcttaaaggatgaatagattggcagggttttgctactgtgaccttgctaaggatttcccaacatttgaacttttattttggtgtgctgatcttaycgctaatgatccagtactgaagtcctgtgatggtatcatttcagaacaaacagtactttatgaattcactatatctaatgggacctttcataacatctggaaatagaatacacttgaaacattttcctcactccttcctctacttctagagattgttctcacatctactgtaggatttataggtaattttattgctatctttttacagatatctcgtttgcccaacaagactgtatacccctcgagggaggaatctagaacataacatattgccctttacccctgtaagctctcaatactgtttattttgacaagcacctgatgacaataaacatataaatttttattaaagtttaatgtgatcaaaaattcattttaggaagtagagtcaaaagaagtcccagttgcatccccctggctttgataaatcagtgcctctttaagcctccttttccatacaaacttaagtcaattaactcccagaaggattctagagcttaaatgaaat

SEQ ID NO: 714043 - DNA, 657 bp, Homo sapiens
ttcctcatctgctgttgaggaaaaatgtatatttgggtaccaaggatgctatattgtttactctttgctataactttaagcctatgctactcagtatggtcggcagatcagagctggcccactcrttgtttctggtccctgaccagtacagaaactgagagcaagtctttagaaaatttttataggaattggacagaataattttatttcatcgaataataacaaatctggggctaccatgttgtgtgactaaacaatttcatttttctagcaattcatgtttattgtattttatataaattggtctgagatgcactggacttttttttttaaaaaaacaacaacaactggtttttcattacaggttgtttgagaagtgctgctctagtgaactgaattgttctaactggttgtatctgcataggtcagatgaagcacaaataaccccataaactagagtcaggagatatgcctgcagtgatggaacttgttaacattttgtttgcctctcgtattctaaatccacaaatttaaaggcatggtcatacaagaaaaaggcaaaacagccaaagggaggcaaagaccaataatctgtggcttttgctaaaattaagaagtttaaaaagtgaattttataatagctttaaagttcataaa

SEQ ID NO: 714044 - DNA, 943 bp, Homo sapiens
cagtcacacaggtaagaaaaggtagagagcgccacaccttggacagatgcggccacgcccaagccctcccaccatgctcagcagcttcactccagcgccaccctccacgtgctccacgcatccccccttctcctcatcccacactgtcctgctgcagtctccaccgatgcttggtgcacttgcatgtgggctttttttttttttttttttttgagacggagtcttgcactgtcgcccaggctggagtgcaatctggttcaagcaattcttccacctcagcctcccgagtagctgggattacaggctaccaccacacctggctaatttatttattttttttgtatttttagtagagacggggtttcaccatgttagccaggctggtctcgaactcctggccttaggtgatccgcctgtctcggcctcccaaagtgctggaattataggcgtgaccaccacgcccagccagcatgtgggctttcaagagacaaggtagtggaggcacaccctggtcagcagcacagagtgaaggggcccatatggaaagggtcataggtggcaggagtagccagaaaggccagggacaggcagagccagctgggggcctgcacatcctcctgctttgggacagccctcggcagcactgccctcaggagtgtggggagaagacagacaggaggccggagccaaaaagccaatgggcagcaggatcctaaaggccccatgtgccagggccaagatagtcctggacgaggagaccaggttcaaatccaggctctgccgccacccagctgacgatctcaggaagatcacttcagctttcagagcccctgggtcctcgagcaaaggakaagcttgccacctgccccttcttaccaaagccaggcgtggctggtggggtaaaaacggggagagcaagatacttcttttaaaacaacccata

SEQ ID NO: 714045 - DNA, 684 bp, Homo sapiens
tcgaaacattgtatctcttacgtacaatgcatcccagccccacagagcttgtctcttaaacagaggacacccatgtgtagccttactcatcatggtttgcctacttccactttcctccatcctcacaatgtaatactatgactgccattttatcttctgcatcccatacccaaggctgctcctctactcctgcaccctttgcagttaatatgcattagttaagaaamaaaacagctataacacaggaaaagctttagtcttaagagtaatatatcagccatctgagaatagagaccagcttgctggatctgtgaatgtcagtatttttttttttccagctaagactttctggatatgaaacgatcacatgacctcaggaacacatcagcaatttcctagtttccaagtaaaagtttttattccctccaagttgggttcccctcgaaatctcaagaaatcagaggtcacccaggagtaaatacagttagctaaaaaggctacaagggtttatgctgatcagataattacacttctttctcccacaggaatggtcaccacaaatagctacatgtcagaattttctcatcattttttcaagcaccatttctaaggtggcttatttttttttatttcaggtgagctttgagttgggagtgatattttaatatactgattcccaagccc

SEQ ID NO: 714046 - DNA, 619 bp, Homo sapiens
atgtttctgccgaggtgtgtttaatgacaaacagcagtagcttatgtaccaccacttagactcacaagacatgtgagcccatgggcctaaacacccaaagaattgaagtgagtcttatccaaatttttctacatatttaagaatatatgcctgtttgttttcatataaaaatgtttccgaattacttgagcaaaagaaaattattggttgaagaagataccagccagagaataaccaagtgtgatacactctggggactgttgtggggtgggggaagtggggagggatagcatcgggagatawacctaatgctagatgacgagttagtgggttcagcgcaccagcatggcacatgtatacatatgtaactaacctgcacaatgtgcacatgtaccctaaaacttaaagtataataaaaaaaaagaataaccaagtgtgataagcaaaacaaatttgataagcctgtattgggtcatacaatcagtttgtagtcaacttcctttcactatgagcttagaatactactctttgggtatgttccgtaatttcttaaccataaatactcaccaaatgctgttctaaccttgctcgcagggcttggctaaagctaataggagct

SEQ ID NO: 714047 - DNA, 987 bp, Homo sapiens
tctatttagatgaataaccagcaactttgctaagagtccaagtcatgtagcagaatcatccatgaggaggttgttacagtagtcaagaagagaggagtttacagcttatagtagttaaacaagaagagacaaaaactcaataaatttgtaggcaaacatagaaataatcagattatggtcctaatagtatgtgcaatgargggtacagagaagctatgaacgagacctagtgttagccccagataaatgatagatggcagtagaaataaagaatagctggaatacaggcaaaggagcagggttctggtcaaagacgagaggaagatgtgtttttgacaagtggtgtttaacctgcctatggaacaaccaagtaaatcccacagaaaagttgttgtggagcttcattcttagcagagagtcaggaaagcacatttgtagaacatgggagacaaagaggagatttcacaaacttctagagaagaaagaagaaaacttgtatgtaaagtattgggaatcacaatggctttagaacactttcaaacagtactcacagtccataggcaatggactttaagactatgatcctacacaagcctgatatgctagaacctgtaacctgtctctagagagacaggcaggtcttcaaaataattgtgggtgtagttttttcatgcataataaaatggaatcaaatacataaaaattcatttgaatgattataaatgctgaatattcaagagagccacaccctaccctaaaagtgcatgagcctgttcaagatgtaaaaggacctcaagggcctcaactttctagaggcaagaagcaagctgagaaggctgttcaggcacaggaagtggtgtatttaatgatcttttcagaaatagccaaggatggtgatggaaaagaaagaatgactcagaaagcagaggaaaatctcacagaagtaaagttaaaaaaaaaagtggaaaatagaacataaaatattta

SEQ ID NO: 714048 - DNA, 1472 bp, Homo sapiens
tgctttcatttttttcaggaacctctctggtcctcaccccactggtttaactcccgtaatttatcattctcatttgggatagagttagcttatcacctgctctacagcaaaacactctctctggaagaaatctgatagtattctatcaacgtgtgaatttaagtcataatgttaccttttttagggacatgagtatttgcataagagccttatctctaattgcaaagtgacactcttaagactgttaaaagatactattgttcaaggtagatggaattagaagaccctcagcatgtgggacttatatgccagctgaatagaccccagactatcagtgcactcagggaagtaaagtttgacagtatttatatgctttacttatgaactggatttggtatcttagaatattttctttgaaaaggtagttccatttttggctttcttgcttcttcatagtgccaatctaggtcaacaggagtaagtgagaccattgttccatatcccgcttaaaaagagaacactacttcaaagacaagaacaacatcacctgacaaaaataaaagaagttatcggttttaaaacattgtgcttatgtgtgcctgttattcttaactttttcagggattcaagttattttagggtacctattctggttgattatatatctagcacaataaagccatttaaataaaaaaatatagaattcatttccaaaaatttcttctttgattttaggaaagaattataattttccaaattgtcccctcccaccttctgctaaaaagacccccaaaacttaaaaacgtacaattaattccttgagcaaacaaaaggggattttacccaaattcctttaaagggtacttagggcttttaaatctaaaatagataaaacaaactacccaaagaaaacaaaaccaatactccacaatgtaccttttagctatattgccttgtaaaatttttcttttgctgattacacttagtgattacaaaattaaacctgctgcatttcttgatagtcaccctggttcatgaattgtcaggtggtaacaggaaataattcatttttgaaacagaggcattacataaatgtattttattccaaattgcattttatatacaatgttagccacttttcatatttatatttgcaaaattaatatataaatgtttaaaatatagatttatatataaattttatttttaatttatgtaacattttattttatatacattttgtaaatataactgttatctaccaagaggttcagatcctttgtgtggcttgtaagccagagctgacctgttaaagatatttgtaatatgacttatgagccaagatctgaccaaattctttatgaaatcagcatgtatcttggaaatgggacccttttcgtcctttgaaaatagagtttaatacatgaaagccagctgagtayatcatttcctccatattcattcatttaata

SEQ ID NO: 714049 - DNA, 1097 bp, Homo sapiens
tcttcacatttttaagcatttttgtgtgtcaagtatttcgataatgcaatatttcaataagtattgagttgtcaactagtgtgtccaaatgtgactgtagtataatatgtttgtgtcacaaagagcacttactttttaccactttcaagaaaacctctaggttttgtttgtcaaatgcttttcgtttgaagataatgcacacatcaatactccataaatagacttccttatattggataaacagaaacattaaagatcttttgttaatttaactgtctcagtttcttgagtgcttttataataactagctggagaaagataacatttcccagaactacagtgtatttgctttttgtgaagaagataatctatcacagaaagctagcactatacatggcatattatagctcattctgttttgtttagttaatctctgatcaaaatataacatttacatttatgtatatttaaaataataatcttgtacataaatgctactggtaaatatcctcgtattaatttaagtaaaaaaatttaggaagccagatttggaaatgttcaacaaattgtcactcaatgtttaataatttatattcatttttaaagatagtgcaagtttcaaatgttgtgtatatatttatgttccaaatattacagcatatcattttatgagttttatgaaaattttaagtaatatcaacataaaatgttaatagatacatatcagtaccaactaacctattgttttgattgacaatatttacagttcaaggttttgctacccttcacaagaaaggtgtatcaaaggtttggtaagaaacaatgtgcatttgaagtcaaatatccttctctaaatctctttataaacttaaattccttcttgtcaagctgcattccgrtacagtttgaatttcacaaatatatttgaattttgcaattcctaaagagtaacttgagtcaacacttgtatatttgcaactcttttaatcatgttagagttaatagcttataagtttcatagactaggatgtacatggacaaataatgctctggcttaatattccaataggggtagcagactttaggtagctgttgtg

SEQ ID NO: 714050 - DNA, 1668 bp, Homo sapiens
tctcatcatatccccaactcttggttttattgtctctgcctaaaaaaaagtcctcttttagagaaacaaagcaaaaaaaaaaaaaaaaaaaaaacaagactctaaaatctgaccttcaccctgctaataaaatgtatatatatatattatatatatatacttattttccaaatttattaaaattttaacacagccagtacaagttttttttgtgagaacacaatagaggaagagtatactgaaactggattttacagttcagaagtagttttctaatatgacccaaatcacttcacttacgagttttctttgctatgcaacagagataatactacttttaactgatttgtgaggataaaatgagaaaatgcatccacaatttacttaacataatgcaataaatttgtgatgtagatcttactgtgagttctcagactctactatcccaatagagttttttgtttgtttgtttttgcttgtctgtctaaagtttatctacaacatacaatggtaaaaataagggcaaaatgttaacttcrccattgtttatatttctaatatttattaaacataaaagagatgcattcaatttgaaagcttatttaagtagtgcatttataattgctttggggggcccgtgggattttgaggagctgcctcaaagaaagtggggagatgtgaggcaaggcttccagctctagcttcagttaaaaaaaatcttactttgtctgtttttttgaataatatgtcattagaggaaatgattcatggccttaaaaaacaacatagaaatcttcttgtctatttgggaggccgaggcaggcggatcacgaggtcaggagattgagaccatcctggctaacacagtgaaaccccatctctactaaatatacaaaaaaattgagcttccagtgagccaagatcacgccactgcactccagcctgggcaacagagcgagactccgtctcaaaaaaaaaaaaaaaaaaaaaaaaaaaaaaaaagaaatcatcttgtctaatggaaaaaaaggaagaaaaacaacaaaataaaacagactatagctagtggctttgtcttgtcttcttctctatctttggtttaactggtggacggctagaagtttaaaggcttatcaactccagcaatacttggtgtgtgttcttgaggtatagcaacaatattggtattaatttatgagttgcataaaattcatgtttgacacttgttatctcatctccagtgatttatttagaatgctttggagaccacaaacataacagaaatttagtaaatgaggcatattatacctatgaatatattttaaaccttatctaaaaataccatcaaaaattagcttctagcaataaagcataaatattacaaataattcaattttgagacatttttaaataatagtatcattactaatctggttctggaagttactgaataatacaataactatcagctgaaaaaatcattaattttattccttttaagaaaattacattgcaaataggtatttacataccggatcatctggattatactgaataacatactctatctgtccatttggtccatcatctatatctgtagctccattgtctcctgaaaatcctgtgaatattgtggtaccaactggagtgagctgaaaggaaaaaaga

SEQ ID NO: 714051 - DNA, 601 bp, Homo sapiens
aaaaacatttagatctttcttaattgcataaacttcatgtcttatactaaaaggacaaatagtatgaaaaataccttgcaatcttgcacagaataaaactcatttcatttaattttattayaaacacagcattgtagatgggcaagatagggatatctatttatacacatacacatatatagtatgtatgtatctaattttaatgtatcttcctaatacataattcataatagataaaattcatgtcaactaaaccaatagataattcataatttataattcattggactaaactaagtactagtactatggaagaactattcaaatgaaaaatgagaataatagctaaatttctattttttttttgatgctatttcaagctttaaatgcactgttttttttttcaagaaagtaaatataaagagtatgggcaaaatcaaaggtgaaaaatatgaccatcaagtacacacatttgatattatcaaaccatagaagatatgaccatagtgtcaatgggataggatgacctcagttatctaaaaggaaatgcattgtgagaaacttaccagttcaacaatgtattgacagctttgcacagtaa

SEQ ID NO: 714052 - DNA, 677 bp, Homo sapiens
tcacttcaaactgagccccacaaaaacaactatgccacatgtaccatggattatacttttggcttactccatgttttctatcttatgtggttcttcttgttaggttttcttttgtcacagtatttctgtctttaaaaagcaaacaaataatcattagtgtgcaggaagcaagaatctatatggacaagtgtttttaaaagaatcagatgatctcattctcagcaaactaacacaagaaaagaaaaccaaacaccacatattctcactcataagtgggagttgaacaatgagaacacatggacacagggaagggaatatcacagaccagggcctgtcatggggtggggggctagaggaggaatacctaatgtagatgacgggttaatgggtgcagcaaaccaccatggcacatgtatatctatgtaacaaacctccacatgctgcacatgtacctcagaacttaaagtatgtaaaaaaagatctcatcgtacctaaaatgctgtaaaaaagaaaatcttccttygaaactaactgtaaattttctattctacttcgatttagtgtttttcttttccattgatcatctcctctcccccttataggtaatttttaaaaaaactaattgatgtcacgtgacctgaaggagtacagactcatttaaagaaagagcacattat

SEQ ID NO: 714053 - DNA, 1284 bp, Homo sapiens
tgagaagagaaggagccaaaatcacagtagcaatttcaccttccagctagacagatgcggagctgtaactagcagcttcccaacttagaaacccgagtatttcacctagttttgtacagcgacaatccattgatataaaaattcaatggagctactsaagatagttcagtgatctaaaacatcttctcactataaaacagactttgtgattcagcctaactgccctgtctatacaaaatattgtaaagtactctgcagtcaacttgtgctcatggcggggggcggggcagaatccatcactgatcacttccaaccgctgtgaatctgtcttcaagctccaactcaactaaggaagtggctcctggagcaaagactcaaatgcttgctgtagtacaggcagccaaattgctgatgtcacttgtcccgtgtaaaatcctctagtggcttcacactgcagtcccagtgaaatccacattccttagtctgaccttcaaggctcttcagggcctggcccagcctctctctctgaccacagtgctccaggctcgctggtcttccatctgtgccttgaacatttcatgtttttatggcctcagggactttgcaatactccttcctcttctgggagtttcctccctgcctccttgtctggttagctcctcatttttcagttctcagacaaatgtcactttcaagatgagcctcacctgactaccttctgtgtggcagcaccctgtcagtctctcatgtcacttggtttattatctgtaagccccaggagagcagagaccctgtcttgctcaccgctgtattcacaacgcctagaacaacagcaggaacataaaaaatgctcagtaactaccaggtgaatacattggtcagtgaataaagatggagattaaccactggggtgtgttctcttctcgactatttgcactgcgatcattccactttcactagctgtgttgccaaagaaatattcccaagaaaagaaaatacaggaaaaaaaaaaaaggccaggcatggtggctcacgcctgtcatctcagtactttgggaggccaaggtgggagcatcacttgagcccaggagtttgagaccagcctgggcaagacagggaaattccatctctaaacaaaatataaaaatcaggtgatggggcacaggcctgtggtcccagctactcaggaggctgaggtagaaggattgcttggttgagccagggaagtggaggatgcagtgagccaagattgcaccactgcactccagcctgggcgacagggca

SEQ ID NO: 714054 - DNA, 230 bp, Homo sapiens
tctcttaaaacaaaacwaaactaaagctggaagccatcttggagatggcctaggcccagaagagcccgtagggagccccagaaggaacatgtagccgtgtgctccctgccaccccaggagccatgttccaccgagctggggcagatgcctggctctctaacaaataggcggctgttcggtagttaaaacttggacgtgctacagacacagcagtcctggaacttggctga

SEQ ID NO: 714055 - DNA, 862 bp, Homo sapiens
cgaagtagacaggtgcagcacccacttcacggmggtgctatgatgacgaaacgtgctgatgcatgtggagacctctagagcacagtgctcagctcataagtacactcagctaatgccggctgacagtcgtggtactaacagtaagagcagcctcactcttactattagcccttcaagggccagatcaaggctacccagttcagaaactttctcctcatttacaataaagatccattgctccttcaaatttaactgctttctaatttgtatatttcgatggtgaccctgatttcattctgtcttgagtgtttgccttctagggacaatatcagatttcagcgattcccccatcacccagccaggaggcacttgatgtttggcttgaattgagaaacctgaagaatattgcgacacggagatttactccgatgtcaaacttccttcctagggcaggaagcccatattcaagtacagcaggaagtaaggacgggcagggggcaagtgagtcctcactgcagaaaacctcagtcttcagaaatccaaaaagcatagaaaaatctgagtcattttggaatttaacaggaatctttgaaattgtatgttaatcatctcacgcaggaattcacaatctcatagcttgaatacggaaatctcctaggtccattttcccaggatgacatttattcggtcactccatcatttgctcaacaagatcttaaatgctctatgatgtcccaagcactgagtcaggcaccgtcctcacctgctcggagcttagatccagtctcctaactcccctgctacatttttgtaatggtgcctgtctttgttttacagcactccatcgatcagcctgatttta

SEQ ID NO: 714056 - DNA, 1398 bp, Homo sapiens
cacacacacacacacacacacacactcacaagcacacacacatcagagctgtactgagtcatgacttacagaaaacatcctaagtctgacttaagcaaaagaaagggatgcaatgatccacagctaggccactggcttcctggtcctttcaagtttgtgtggccagcttcagcactgtgggctgacaatttrttattgcttgagaaaacattcagagtcttggagtctatatttttaaccaaaacttgaataaactctaaaacaaaccaaggatccatcggtgactcagatcctgactgtcctttacagtgaggctcagccaccttccaatagttactggggccacactgtgatcccataagatggagacaaagcccaagacacaaccctcactctgagggatcctgaaacctgaccagagagatgagaccatcctgcatgcaggccatagagacggtaaactaagtaccacactatgtggcacaggttttaaatgttatgagttctagtgacagggattaatgaaaatagaggctgtcagaaaatgagattttagctgatcccagaggggagattagagttttaatatgtggaggagagaaaagtggacttttccagataaagaacagaggagtgaaagcagagagaggactgtttatgggtgggaccccaaagaagctggcctgaggaaacatttctccacccacgcaatggaccatggagctccagtacagacttaaaattatttattttgagacagagtcttactttattacccaggttggagtgcagtggcacaatcttggctcactgcagccttgacttcctgggctgaagccatcctcccacctaagcctccctaggagctgggatcacaggcatgtgcaaccatgcccagctaatttttgtatttttagtagagacagggtttcacaatgttgcccaggctggtcttgaactcctgacttcaagcaatctgcccgcctcggcctcccaaactgctgggattacaggcatgagccactgcaacgggtcccagacttacattattatctattaaaatgttactgaaatatgtacccaaaaagctatgtataagttgttttatgtttgtatagctataaatacacattagcataattctatttatactattaaaatttcaaaataagtctctaaggataaacgaaacccatacaccaataatactctaattcatattaatcctctttgccagatgatgctgttttgctgaaactaaagaataaatttgttttaactaagtattcattaatgaaattggaaaaaacattttaacaaaaggaatttctattgcatattaagaattacacctgtttataaggaactgttacaagatggcacctatagagaagaaag

SEQ ID NO: 714057 - DNA, 1398 bp, Homo sapiens
cacacacacacacacacacacacactcacaagcacacacacatcagagctgtactgagtcatgacttacagaaaacatcctaagtctgacttaagcaaaagaaagggatgcaatgatccacagctaggccactggcttcctggtcctttcaagtttgtgtggccagcttcagcactgtgggctgacaatttattattgcttgagaaaacattcagagtcttggagtctatatttttaaccaaaacttgaataaacyctaaaacaaaccaaggatccatcggtgactcagatcctgactgtcctttacagtgaggctcagccaccttccaatagttactggggccacactgtgatcccataagatggagacaaagcccaagacacaaccctcactctgagggatcctgaaacctgaccagagagatgagaccatcctgcatgcaggccatagagacggtaaactaagtaccacactatgtggcacaggttttaaatgttatgagttctagtgacagggattaatgaaaatagaggctgtcagaaaatgagattttagctgatcccagaggggagattagagttttaatatgtggaggagagaaaagtggacttttccagataaagaacagaggagtgaaagcagagagaggactgtttatgggtgggaccccaaagaagctggcctgaggaaacatttctccacccacgcaatggaccatggagctccagtacagacttaaaattatttattttgagacagagtcttactttattacccaggttggagtgcagtggcacaatcttggctcactgcagccttgacttcctgggctgaagccatcctcccacctaagcctccctaggagctgggatcacaggcatgtgcaaccatgcccagctaatttttgtatttttagtagagacagggtttcacaatgttgcccaggctggtcttgaactcctgacttcaagcaatctgcccgcctcggcctcccaaactgctgggattacaggcatgagccactgcaacgggtcccagacttacattattatctattaaaatgttactgaaatatgtacccaaaaagctatgtataagttgttttatgtttgtatagctataaatacacattagcataattctatttatactattaaaatttcaaaataagtctctaaggataaacgaaacccatacaccaataatactctaattcatattaatcctctttgccagatgatgctgttttgctgaaactaaagaataaatttgttttaactaagtattcattaatgaaattggaaaaaacattttaacaaaaggaatttctattgcatattaagaattacacctgtttataaggaactgttacaagatggcacctatagagaagaaag

SEQ ID NO: 714058 - DNA, 670 bp, Homo sapiens
gaaacacagctgtcacactgtctttctattatctatgctcttgaagtttatcagtaaatcagttaattgccaaatccgattgtctccatcttcactgatggttcattccttctgcaaattgttttcctgttttctgcaactacattatttccgttctccttctgtctgatttatcagtctgtgccaataatttagcacacagtcattccacaaatatttctgcacagcaattatgggtgaggtgctagataaaactatttaaataatttcttaagttgttataattttctttyagcctttccaactatggtggaagttggaattaagggcaagggccatgtctcatattcctgagtcattcccagaagttatctcagcacagaatcacttggttaggtaattatgtgttagtgtttttgattgattatatctgcctgtatataaataacacctgatgaagaagagaaggctggcaattttggtatgaggatacaaatagtgtgcagctagtttggtggaatcaaatctaatgagaaatatgtcaaacgcatttcaaacaatttcattcatcatcatcttgactaccatgattatgatcatttatttaactcttgcttgatagcaggtactgctctagagcactctttatgaatttttcatttaatcctca

SEQ ID NO: 714059 - DNA, 3219 bp, Homo sapiens
gattaagggtgggtctgccttccccaccccactgactcaaatgataatctcctttgacaacaccctcacagacatacccacgatcaatagtttgcatccttcaatccaatcaggttgacagtcagcattaaccatcacatgaagttttctacttattactagaacttaataaaactctgtttatttacttaacaaacactgtgtatatagttcatattagctgcaatgtttttcacttgattttcaaagtctcttattctttcttatgtttgctttgttagtattttattctagttgctttagctaattcatttattttaaccaatcaatacaaataagtttgaggtaattcttttgaaaatttatcaccttgcttatgttcattattttccagattatatatatttttaaaacgtatcattattaaatttttaaaaatgtaataaaagatcataaaatgtctggattttaaaaactgtattatataatgcaatatatatcatatacacaatatatatgtttttcatacatgcatttcattttttctttcttcagttgtctatgaaagtgtctcaactttgctttctacattaatcttcaatttttctatacacatattttattttaaatttgtcaataatattttacattctccctagtgcttatttatactgttgagttacctgtcatctaattattttacttcagttaaactctacttatttatatttgtatgtccattttcattgatgttacatttttatacattatattttaccacagatttgaaaacttttctgaaaacttctcaatctctacataaaacagttttattaaaagcttttaatctatcctttgtagtaaaattgttcatggtctactttctcttgtaattataacatgctcagagttctggggtaggtaggtaaaagctggaagaagaaagggaagagaggctttgagaatttcctggttaaaataaaatgcccctaatgcaccctcacagagtgtattccatgattacttatatttgtgtaacttgagggtgttcaaattgctcaaatggcaaactttccaatgagttctaccctacacatcaaattttttactgcaacatttgcctccctgactttcccaggtccacgttacccttttatcctatctttgtttttatttcataactcttattaacttttataaatttataatttgttttctttgtttcttatagtttctgccttaccttccactagaatgtagcctccatgagggtagaaaatggtcagatttgtttctgtgactaagtatgtactcaataaatatttttaattaaaataaatataattctgaaatctactacagactgaaaataaaattctggatatggattaaggaaatctgcattttacataagttctccccattgattcttatgcacagtaaaagttggaaatttttgtatcttaaaatgaaataaatgggtggagctcaagtatgtgcattttgaaaagctaccttggtgactttgtatattctattttctttcccccatcagactggtagattttcaatagtgcacttcttttgaaccaggataaaatctactcgtaaggtcattcttgttttctggcatttgaacgatggtgctttctgctgaaacagcattctaagataatagggttattcctgcctctgccttttcctagatcacttatcttggtctactaataacagggcatccatcaacaaagaaacaccaccatctttcatgttctgttattaattggactctctggactactgttatctctggtactctaaaaaagaaaattttatagtgtctactggtgggactaaatatctttttacctacctacctataggtaaactgtactccttcctccaagaggcaaattataggtggtacacatttttttttcagattagttttgttcatcatcttaatgagattttccaataattatatgtatagtttggctttaaaggtttaaacgttcagttttctttttgacttcatggaaattttaatgagcatttgggaaagactaattaataggtatggctatcagatgccatgtgaaaccagacatttttcttgatatactggacctgtcttcatatcacataaggaattgaagtatatgatatttcaaaatactttgggatcaatatttgataccagtattgttaaacagggatatttaatttgagcttgatgagatagagtaactatcaaaaacaatgcccaaaatctcatgtraagttgctaatattctgaaaactctcattgttatggacagaatttttaaaagtgaaagatggacaggtatattggtgactatcatgtttcacaatgtttttgatattttgatttaattatacagttatagaaatcttataagcatatacataaaaaccttaagtattcattttatcaataaaatttaattcaaataagtatctctaacagacctactgtgagctagataatgtgctacatactgtgaaagctataataaatgaaacttgaagtagaaatctaatacaggaaacacacacaagcaaatatattcatggcaatgtgataagtacaagaaaaggcatataaatttttgaggggtgttacaaaagaaggagccatcaattctgattcaaaacatcttacacagattcagagaggagagaatacttaggttcagggagtgtaagtgaaataagtaaaatgagctaacacatgatgctatctagtgccagagctggaaatagtacagaaacaccaagactcctaagtcaatgtccttactacataaaacaaactctttatcatttccttctgaattttttattatgttgtttttatagctcaaacctagattatttgagaaattatattaaatcacaggaaacaattatgtaaatacttgattctttaatataaatatgaaaatataataagatatgtctatggttaacaatgtataaaatatttaaaactggtatctattttagagcaattcctcagagaactttgagctgtgaatttgaattattataacagatttttgcaaagttatagaaacttcttacaaacttttatcttccaaagttttgttaagtacaataattacaacagtgtaattatattgatatggtttggctctgtgtccccacccaaatctgatcttgaattgtaatccc

SEQ ID NO: 714060 - DNA, 3219 bp, Homo sapiens
gattaagggtgggtctgccttccccaccccactgactcaaatgataatctcctttgacaacaccctcacagacatacccacgatcaatagtttgcatccttcaatccaatcaggttgacagtcagcattaaccatcacatgaagttttctacttattactagaacttaataaaactctgtttatttacttaacaaacactgtgtatatagttcatattagctgcaatgtttttcacttgattttcaaagtctcttattctttcttatgtttgctttgttagtattttattctagttgctttagctaattcatttattttaaccaatcaatacaaataagtttgaggtaattcttttgaaaatttatcaccttgcttatgttcattattttccagattatatatatttttaaaacgtatcattattaaatttttaaaaatgtaataaaagatcataaaatgtctggattttaaaaactgtattatataatgcaatatatatcatatacacaatatatatgtttttcatacatgcatttcattttttctttcttcagttgtctatgaaagtgtctcaactttgctttctacattaatcttcaatttttctatacacatattttattttaaatttgtcaataatattttacattctccctagtgcttatttatactgttgagttacctgtcatctaattattttacttcagttaaactctacttatttatatttgtatgtccattttcattgatgttacatttttatacattatattttaccacagatttgaaaacttttctgaaaacttctcaatctctacataaaacagttttattaaaagcttttaatctatcctttgtagtaaaattgttcatggtctactttctcttgtaattataacatgctcagagttctggggtaggtaggtaaaagctggaagaagaaagggaagagaggctttgagaatttcctggttaaaataaaatgcccctaatgcaccctcacagagtgtattccatgattacttatatttgtgtaacttgagggtgttcaaattgctcaaatggcaaactttccaatgagttctaccctacacatcaaattttttactgcaacatttgcctccctgactttcccaggtccacgttacccttttatcctatctttgtttttatttcataactcttattaacttttataaatttataatttgttttctttgtttcttatagtttctgccttaccttccactagaatgtagcctccatgagggtagaaaatggtcagatttgtttctgtgactaagtatgtactcaataaatatttttaattaaaataaatataattctgaaatctactacagactgaaaataaaattctggatatggattaaggaaatctgcattttacataagttctccccattgattcttatgcacagtaaaagttggaaatttttgtatcttaaaatgaaataaatgggtggagctcaagtatgtgcattttgaaaagctaccttggtgactttgtatattctattttctttcccccatcagactggtagattttcaatagtgcacttcttttgaaccaggataaaatctactcgtaaggtcattcttgttttctggcatttgaacgatggtgctttctgctgaaacagcattctaagataatagggttattcctgcctctgccttttcctagatcacttatcttggtctactaataacagggcatccatcaacaaagaaacaccaccatctttcatgttctgttattaattggactctctggactactgttatctctggtactctaaaaaagaaaattttatagtgtctactggtgggactaaatatctttttacctacctacctataggtaaactgtactccttcctccaagaggcaaattataggtggtacacatttttttttcagattagttttgttcatcatcttaatgagattttccaataattatatgtatagtttggctttaaaggtttaaacgttcagttttctttttgacttcatggaaattttaatgagcatttgggaaagactaattaataggtatggctatcagatgccatgtgaaaccagacatttttcttgatatactggacctgtcttcatatcacataaggaattgaagtatatgatatttcaaaatactttgggatcaatatttgataccagtattgttaaacagggatatttaatttgagcttgatgagatagagtaactatcaaaaacaatgcccaaaatctcatgtgaagttgctaatattctgaaaactctcattgttatrgacagaatttttaaaagtgaaagatggacaggtatattggtgactatcatgtttcacaatgtttttgatattttgatttaattatacagttatagaaatcttataagcatatacataaaaaccttaagtattcattttatcaataaaatttaattcaaataagtatctctaacagacctactgtgagctagataatgtgctacatactgtgaaagctataataaatgaaacttgaagtagaaatctaatacaggaaacacacacaagcaaatatattcatggcaatgtgataagtacaagaaaaggcatataaatttttgaggggtgttacaaaagaaggagccatcaattctgattcaaaacatcttacacagattcagagaggagagaatacttaggttcagggagtgtaagtgaaataagtaaaatgagctaacacatgatgctatctagtgccagagctggaaatagtacagaaacaccaagactcctaagtcaatgtccttactacataaaacaaactctttatcatttccttctgaattttttattatgttgtttttatagctcaaacctagattatttgagaaattatattaaatcacaggaaacaattatgtaaatacttgattctttaatataaatatgaaaatataataagatatgtctatggttaacaatgtataaaatatttaaaactggtatctattttagagcaattcctcagagaactttgagctgtgaatttgaattattataacagatttttgcaaagttatagaaacttcttacaaacttttatcttccaaagttttgttaagtacaataattacaacagtgtaattatattgatatggtttggctctgtgtccccacccaaatctgatcttgaattgtaatccc

SEQ ID NO: 714061 - DNA, 964 bp, Homo sapiens
tgacatctcctcagaattgtaaactatataagtaaacttatataaagctttgtaggatggagttgtaatgaaagaatcttctttaaagttaaattgtcaatcatctataaaggcaacataaaatattcagtgacaaaagcttaaaaacactgcaggttagttatcttcatagacttgcaccaactcagttctccccactttttcacttgcagttttcaaggataacattgcagcatgctctgggagtgtagcatcctgagctagagagggactgttgaaacagctccagctctgctccagtgccctgtgtaacaccacgcctttcaacattgcagyccagtgcactgtctcagccttcagatataaaacccagggcacgctgcttttcagggtccctaagctgtggtgcaagtagtgcatgcacagacagtctctgtctatgccaagcagctttcctgagccttgaggagctggctggtaatgaattctaatcttttgttgtcccttgtgcctatttgtgagtaatcaatctacttcatgtcacttgttgtagaggaagtgttctgactcaccagagtcaaacaggttggtaaccagtgaacctgcttcacacatactttaattaaaaattcttcatgtacatttcacaataattaaaagatgaattaaaaataaaaattcaagaatggaaaatccatgtcattagcagtacagataacgtcatcccaaatttgaaaaatttgaattaaattaaatttaaagaataacaagaatttaaaaagctctacaatattggccatggctattgtttaaaaaacttacagtgattacataaaaatatcatggtattactccattcttgcactgcagtaaagaaactatctgagagtagaaaatttataaagaaaataggtttaattggctcacaattctgcaggctgcttcttctggggaggcctcagga

SEQ ID NO: 714062 - DNA, 964 bp, Homo sapiens
tgacatctcctcagaattgtaaactatataagtaaacttatataaagctttgtaggatggagttgtaatgaaagaatcttctttaaagttaaattgtcaatcatctataaaggcaacataaaatattcagtgacaaaagcttaaaaacactgcaggttagttatcttcatagacttgcaccaactcagttctccccactttttcacttgcagttttcaaggataacattgcagcatgctctgggagtgtagcatcctgagctagagagggactgttgaaacagctccagctctgctccagtgccctgtgtaacaccacgcctttcaacattgcagcccagtgcactgtctcagcctycagatataaaacccagggcacgctgcttttcagggtccctaagctgtggtgcaagtagtgcatgcacagacagtctctgtctatgccaagcagctttcctgagccttgaggagctggctggtaatgaattctaatcttttgttgtcccttgtgcctatttgtgagtaatcaatctacttcatgtcacttgttgtagaggaagtgttctgactcaccagagtcaaacaggttggtaaccagtgaacctgcttcacacatactttaattaaaaattcttcatgtacatttcacaataattaaaagatgaattaaaaataaaaattcaagaatggaaaatccatgtcattagcagtacagataacgtcatcccaaatttgaaaaatttgaattaaattaaatttaaagaataacaagaatttaaaaagctctacaatattggccatggctattgtttaaaaaacttacagtgattacataaaaatatcatggtattactccattcttgcactgcagtaaagaaactatctgagagtagaaaatttataaagaaaataggtttaattggctcacaattctgcaggctgcttcttctggggaggcctcagga

SEQ ID NO: 714063 - DNA, 964 bp, Homo sapiens
tgacatctcctcagaattgtaaactatataagtaaacttatataaagctttgtaggatggagttgtaatgaaagaatcttctttaaagttaaattgtcaatcatctataaaggcaacataaaatattcagtgacaaaagcttaaaaacactgcaggttagttatcttcatagacttgcaccaactcagttctccccactttttcacttgcagttttcaaggataacattgcagcatgctctgggagtgtagcatcctgagctagagagggactgttgaaacagctccagctctgctccagtgccctgtgtaacaccacgcctttcaacattgcagcccagtgcactgtctcagccttcagatataaaacccagggcacgctgcttttcagggtccctaagctgtggtgcaagtagtgcatgcacagacagtctctgtctatgccaagcagctttcmtgagccttgaggagctggctggtaatgaattctaatcttttgttgtcccttgtgcctatttgtgagtaatcaatctacttcatgtcacttgttgtagaggaagtgttctgactcaccagagtcaaacaggttggtaaccagtgaacctgcttcacacatactttaattaaaaattcttcatgtacatttcacaataattaaaagatgaattaaaaataaaaattcaagaatggaaaatccatgtcattagcagtacagataacgtcatcccaaatttgaaaaatttgaattaaattaaatttaaagaataacaagaatttaaaaagctctacaatattggccatggctattgtttaaaaaacttacagtgattacataaaaatatcatggtattactccattcttgcactgcagtaaagaaactatctgagagtagaaaatttataaagaaaataggtttaattggctcacaattctgcaggctgcttcttctggggaggcctcagga

SEQ ID NO: 714064 - DNA, 964 bp, Homo sapiens
tgacatctcctcagaattgtaaactatataagtaaacttatataaagctttgtaggatggagttgtaatgaaagaatcttctttaaagttaaattgtcaatcatctataaaggcaacataaaatattcagtgacaaaagcttaaaaacactgcaggttagttatcttcatagacttgcaccaactcagttctccccactttttcacttgcagttttcaaggataacattgcagcatgctctgggagtgtagcatcctgagctagagagggactgttgaaacagctccagctctgctccagtgccctgtgtaacaccacgcctttcaacattgcagcccagtgcactgtctcagccttcagatataaaacccagggcacgctgcttttcagggtccctaagctgtggtgcaagtagtgcatgcacagacagtctctgtctatgccaagcagctttcctgagccttgaggagctggctggtaatgaattctaatcttttgttgtcccttgtgcctatttgtgagtaatcaatctacttcatgtcacttgttgtagaggaagtgttctgactcaccagagtcaaacaggttggtaaccagtgaacctgcttcacacatactttaattaaaaattcttcatgtacatttcacaataattaaaagatgaattaaaaataaaaattcaagaatggaaaatccatgtcattagcagtacagataacgtcatcccaaatttgaaaaakttgaattaaattaaatttaaagaataacaagaatttaaaaagctctacaatattggccatggctattgtttaaaaaacttacagtgattacataaaaatatcatggtattactccattcttgcactgcagtaaagaaactatctgagagtagaaaatttataaagaaaataggtttaattggctcacaattctgcaggctgcttcttctggggaggcctcagga

SEQ ID NO: 714065 - DNA, 964 bp, Homo sapiens
tgacatctcctcagaattgtaaactatataagtaaacttatataaagctttgtaggatggagttgtaatgaaagaatcttctttaaagttaaattgtcaatcatctataaaggcaacataaaatattcagtgacaaaagcttaaaaacactgcaggttagttatcttcatagacttgcaccaactcagttctccccactttttcacttgcagttttcaaggataacattgcagcatgctctgggagtgtagcatcctgagctagagagggactgttgaaacagctccagctctgctccagtgccctgtgtaacaccacgcctttcaacattgcagcccagtgcactgtctcagccttcagatataaaacccagggcacgctgcttttcagggtccctaagctgtggtgcaagtagtgcatgcacagacagtctctgtctatgccaagcagctttcctgagccttgaggagctggctggtaatgaattctaatcttttgttgtcccttgtgcctatttgtgagtaatcaatctacttcatgtcacttgttgtagaggaagtgttctgactcaccagagtcaaacaggttggtaaccagtgaacctgcttcacacatactttaattaaaaattcttcatgtacatttcacaataattaaaagatgaattaaaaataaaaattcaagaatggaaaatccatgtcattagcagtacagataacgtcatcccaaatttgaaaaatttgaattaaattaaatttaaagaataacaagaatttaaaaagctctacaatattggccatggctattgtttaaaaaacttacagtgattacataaaaatatcatggtattactccattcttgcactgcagtaaagaaactawctgagagtagaaaatttataaagaaaataggtttaattggctcacaattctgcaggctgcttcttctggggaggcctcagga

SEQ ID NO: 714066 - DNA, 964 bp, Homo sapiens
tgacatctcctcagaattgtaaactatataagtaaacttatataaagctttgtaggatggagttgtaatgaaagaatcttctttaaagttaaattgtcaatcatctataaaggcaacataaaatattcagtgacaaaagcttaaaaacactgcaggttagttatcttcatagacttgcaccaactcagttctccccactttttcacttgcagttttcaaggataacattgcagcatgctctgggagtgtagcatcctgagctagagagggactgttgaaacagctccagctctgctccagtgccctgtgtaacaccacgcctttcaacattgcagcccagtgcactgtctcagccttcagatataaaacccagggcacgctgcttttcagggtccctaagctgtggtgcaagtagtgcatgcacagacagtctctgtctatgccaagcagctttcctgagccttgaggagctggctggtaatgaattctaatcttttgttgtcccttgtgcctatttgtgagtaatcaatctacttcatgtcacttgttgtagaggaagtgttctgactcaccagagtcaaacaggttggtaaccagtgaacctgcttcacacatactttaattaaaaattcttcatgtacatttcacaataattaaaagatgaattaaaaataaaaattcaagaatggaaaatccatgtcattagcagtacagataacgtcatcccaaatttgaaaaatttgaattaaattaaatttaaagaataacaagaatttaaaaagctctacaatattggccatggctattgtttaaaaaacttacagtgattacataaaaatatcatggtattactccattcttgcactgcagtaaagaaactatctgagagtagaaaatttataaagaaaataggtttaattggctcacaattctgcaggctkcttcttctggggaggcctcagga

SEQ ID NO: 714067 - DNA, 633 bp, Homo sapiens
ttattttttgttttgtgatataattggtcttcataacctctggagtgcccagagagaggataaagttatcaataagaagctttttttttttggaggaggagcctctgtcacacaggctggggctcaatgacgctatctctgcttactgcaacctcagcctcccagcttcaagcgattctcctgcttcagcctcctgagcaggtggcactataggcgtgtgccaccacacctggctaatttttgyatttctagtagagatgggttttcatcatgatggccaggctggtcttgagctcctaacctcaagtgatctgcctgctgtggcctcccaaagtactaggattacaagcatgagccaccatgcctggccaataataaactttaaaatgacattctaattattctattgtcgttagcaataaattcctgagccagtaaattgagcaatgtaaagattttcagtcattacatcaattaacctgcttgaaagcctttcactaaacttatcctagagtatagatgtttgatattctagttccagaaatataagtgacctaagaatgctaaactgataaatatagcttaatctctttcctgcattgacaataatattattaatgtccttggtattta

SEQ ID NO: 714068 - DNA, 640 bp, Homo sapiens
caaggtgggcggatcatgaggtcaggagatcgaggccatcctggccaacatggtgaaaccccgtctttactaaaaatacaaaaaatgagctgggcatggtagcatgcgcttgtaatcccagcgactcrggaggctgaggcaggagaatcgcttgaacctgggaggcggaggttgcagtgagctgagatggtgccattgcactccagcctgggggatagagtgagactctgtttcaaagaaaaaaaaaaaaaagaaaagaaaaatccactttatggcagctggttggcttcatgctccctggaatattccattgtttcttgctcttatcctgtatctttcccaactgtcactttgatattgtcctttgaatgtctttctagcaccctaaaatcattgttacaagtggtaatccatcacagtgtctattccctctctcctaccacctcaactacatccatctccccttattcccaccttctcactggcttgggggaactcttcatcctaaagataacaattcctgtcatccaaaaaacaattcttcatccaaactttcctgattctgccaaaagaattacctttttctctaggctacattccatgaaatcatctcgaaataatttttttatttaattcttca

SEQ ID NO: 714069 - DNA, 1623 bp, Homo sapiens
tgagctttgcccacctctgctctccagcagcatcaataataagtgaggaccattcagcattgcaggcaggtgcctgctctttgttctgtgaaactgagacagggcagagtttctgtagaaagatgctccttagctcaccaaggtatgatggtgctcttacatggtatcttatttcaaaagcagtcgataattagttagtccctatagcacgtgggctttgctgataagaaaaactacatgtagggactaggattccaagatgaacaggagtcagtgcatgagcctagaacaaggtgtgccagattgtttctataaagggccaggtaataaatatgtccagctgtgcaagtcatacagtcgctgcagcaaacattcaactctgccattgtagcatgaaataatatgtgactgaaaaagcgtggctgtgttccaatacaattttcttgtcaaaaatgggtggtggaggtggatttggcctgtgggccctagtgtgccaacccctgctctaggactgcatattcagagtccttcaggactatgcgttgacttattgggccaccccatagattacctgtagcaaatgtgcaccgtggcttacccaaggtcacaccactggaaaacgaagctgggagccaaattcaggtcccctcgtccagtgcattttcactacagggtacaatgctacctcttactgttctcataacatcattgacaatcccagtaaacttaattcttcccaatcaatggggaaatgtgtattcctcaggcacagagaaaaggaagaggattaatgaaaataagtcactttcttcccgttttcataagaaaatctagaaaagaaagatttatcagtcaccgcgagctaccctgcttcataaagtcaagcccacagaggctctaggcaaggctgagggtcacttttttgttgtttcctggatcaaactggacagcagcaaactggtattttatgggaaaagtctccctggttcttttctaagtctagctttcctggcagggatgtattttactacaattagccaaaccattgctctcatcagagcagagcaggccacactgtggcttgtgtttggggaactaactttagtttgccatgtgctgtttgtttctatctgcttgaccataaatgtgcaaaggttttaatctaattccgccctcagggtttctacaatctagttggagagataagacataaacatatgagagggtgaaaaaagtgaaagagttggaaaacatttcaatgcaataagaaaaatgcacacacatctattctctccctctctcacctccagtgagcaaggagtaattattgaacactgtatagtattaagctgctttgggaatgagaaactcattttttcttgaacatagcataacctgtcctaatctctctttctcctaatgcccattctattactatgcagaacatttctttcccacttacagacaacgcccagaggttcagaggtgcctaaaaatcaagggccacttccctaccttgccagacagaaccatcaatccctgttggacgcctttagttacytaaaacacataaaaggattggaaatgaggcctttcgttggtaatgaaattctagcttttagg

SEQ ID NO: 714070 - DNA, 1081 bp, Homo sapiens
cgcgcacacacacacaaattaaaagaaatagctgaaaacttccmaaatttaattaaaaaccataaattcgtgtatcaagaagctcagagaactccaagtaggacaaatacaagaccatcaacatccaaatacatcataatcaaaatgtagaaagacaaaaaaatcttttctccctaagttgtggcaggccaggtctcactaatgcaggcctccataataactgtttcagtactgagtggttaagttgaatattaaaagctagtgctcttatacaaaggctgggatgtaacaaaagcccaccaagagttttgccttggcctttcctgggccttaaagcatgacaaaataacgaagcaattcttaataggacacatttaggattaaataagttttactgtgggtctgaagaaactcccctggcctccacaaacaagtttattgggggtgtgaaggaactccccaaacctctaatttagcaggagacaagataagggtaattaccccagcacctggacccatttagattaagtaaatttactgaggctccagaggaaggtccttaggactcagaccttctgggaacatagtgactattcatgaagtgattgctaccatcttttctttcaggaaatctctacctcaacagcaggtttgagccctctccttccctctaagcagcggcctcccttgcacagcccctgaggcaagaaaccccgtcttatcccttccatatcagcttacacccaggggacccttgcccaacaggcagtcttcctggaggaggttggcagtatgtttaaaccagtccacaggatccatagcaaggcgctttaagcagagaagtccatgtgctgttcagacatctggcaggaacttgccctgccaaagggatgcagactgtccttttttttttttttttttcttttgaggcagagtttcgttcttgtctcccaggctggagtgcaatggtgcaatctctgctcattgcaacctctgcctcccaggttcaagtgattctcctgcctcagcctcccgagtagctgggattacaggcatgcgccaccacgcccggctaattttt

SEQ ID NO: 714071 - DNA, 1081 bp, Homo sapiens
cgcgcacacacacacaaattaaaagaaatagctgaaaacttccaaaatttaattaaaaaccataaattcgygtatcaagaagctcagagaactccaagtaggacaaatacaagaccatcaacatccaaatacatcataatcaaaatgtagaaagacaaaaaaatcttttctccctaagttgtggcaggccaggtctcactaatgcaggcctccataataactgtttcagtactgagtggttaagttgaatattaaaagctagtgctcttatacaaaggctgggatgtaacaaaagcccaccaagagttttgccttggcctttcctgggccttaaagcatgacaaaataacgaagcaattcttaataggacacatttaggattaaataagttttactgtgggtctgaagaaactcccctggcctccacaaacaagtttattgggggtgtgaaggaactccccaaacctctaatttagcaggagacaagataagggtaattaccccagcacctggacccatttagattaagtaaatttactgaggctccagaggaaggtccttaggactcagaccttctgggaacatagtgactattcatgaagtgattgctaccatcttttctttcaggaaatctctacctcaacagcaggtttgagccctctccttccctctaagcagcggcctcccttgcacagcccctgaggcaagaaaccccgtcttatcccttccatatcagcttacacccaggggacccttgcccaacaggcagtcttcctggaggaggttggcagtatgtttaaaccagtccacaggatccatagcaaggcgctttaagcagagaagtccatgtgctgttcagacatctggcaggaacttgccctgccaaagggatgcagactgtccttttttttttttttttttcttttgaggcagagtttcgttcttgtctcccaggctggagtgcaatggtgcaatctctgctcattgcaacctctgcctcccaggttcaagtgattctcctgcctcagcctcccgagtagctgggattacaggcatgcgccaccacgcccggctaattttt

SEQ ID NO: 714072 - DNA, 1081 bp, Homo sapiens
cgcgcacacacacacaaattaaaagaaatagctgaaaacttccaaaatttaattaaaaaccataaattcgtgtatcaagaagctcagagaactccaagtaggacaaatacaagaccatcaacatccaaatacatcataatcaaaatgtagaaagacaaaaaaatcttttctccctaagttgtggcaggccaggtctcactaatgcaggcctccataataactgtttcagtactgagtggttaagttgaatattaaaagctagtgctcttatacaaaggctgggatgtaacaaaagcccaccaagagttttgccttggcctttcctgggccttaaagcatgacaaaataacgaagcaattcttaataggacacatttaggattaaayaagttttactgtgggtctgaagaaactcccctggcctccacaaacaagtttattgggggtgtgaaggaactccccaaacctctaatttagcaggagacaagataagggtaattaccccagcacctggacccatttagattaagtaaatttactgaggctccagaggaaggtccttaggactcagaccttctgggaacatagtgactattcatgaagtgattgctaccatcttttctttcaggaaatctctacctcaacagcaggtttgagccctctccttccctctaagcagcggcctcccttgcacagcccctgaggcaagaaaccccgtcttatcccttccatatcagcttacacccaggggacccttgcccaacaggcagtcttcctggaggaggttggcagtatgtttaaaccagtccacaggatccatagcaaggcgctttaagcagagaagtccatgtgctgttcagacatctggcaggaacttgccctgccaaagggatgcagactgtccttttttttttttttttttcttttgaggcagagtttcgttcttgtctcccaggctggagtgcaatggtgcaatctctgctcattgcaacctctgcctcccaggttcaagtgattctcctgcctcagcctcccgagtagctgggattacaggcatgcgccaccacgcccggctaattttt

SEQ ID NO: 714073 - DNA, 613 bp, Homo sapiens
cttcagcagggatatttgaaaatatttaacaattggcaaggcacatgctctatcagagtaaatactggacatcctgatggtctgaccagtgcaaacagttgaatgtcagccctgagaccactctaatctggtgcagcataatgccacaggacctttgcacatgcctgcctrgaatgattactttcctctcttcaccaaactaatggctactgattcatatgggtgaggtgaatccaatcaacctatgctacaggtgccctagaaacactaattttctatgcagatccaattgtccttggtcttatccccacccacaagcagcagcactgattaaacactagcagtaagcatagcattgaaacatttatgtctgtagttctccacctgggctgggaatgaggggagtagtatggcaaaaattcccaagggatattattagtttggctaggcctggtctctcacattgatgaataatatgtatagaccaataaataatattgaattcaggtatgctttcacataatgaaattgatatgttcttgaaagtggtctctaaggcaaatgtttctagcctgaatcaacatttcccattggtttccattagaatttcaaa

SEQ ID NO: 714074 - DNA, 613 bp, Homo sapiens
cttcagcagggatatttgaaaatatttaacaattggcaaggcacatgctctatcagagtaaatactggacatcctgatggtctgaccagtgcaaacagttgaatgtcagccctgagaccactctaatctggtgcagcataatgccacaggacctttgcacatgcctgcctggaatgattactttcctctcttcaccaaactaatggctactgattcatatgggtgaggtgaatccaatcaacctatgctacaggtgccctagaaacactaattttctatgcagatccaattgtccttggtcttatccccacccacaagcagcagcactgattaaacactagcagtaarcatagcattgaaacatttatgtctgtagttctccacctgggctgggaatgaggggagtagtatggcaaaaattcccaagggatattattagtttggctaggcctggtctctcacattgatgaataatatgtatagaccaataaataatattgaattcaggtatgctttcacataatgaaattgatatgttcttgaaagtggtctctaaggcaaatgtttctagcctgaatcaacatttcccattggtttccattagaatttcaaa

SEQ ID NO: 714075 - DNA, 671 bp, Homo sapiens
cccatatctgataattgaaaccctgaagattaacaactggaaaatagcctttcttttttctctcttcatagccatggctctaattcattctagtttccctctgggaaaattacctaaaggttaggcatattccctaaagggatggaccactccttgaaattgtgaaaaagcagaacattggttcagggcatctaacaaagaaagraaatgaagagggaggcaagaaaggaagaccccctgcaaagattgataaagaaactgacctgggagaatacatgattaaagtaatagtaataaactgtgtatttgtgtatatacgttatatatacattaactaatttaaaataagacctcatagagaagaacataaacagcagcaacagaaacagataaatggagatcatcacacttaaaaatacaaagtgaggatccaaacaacaccattcaacacactgaagtacaaattggaaggaatagaaaagacactactggaagctaagttaaaagaaaatcttaagatcataacaatacatgcagctgaaaagaaaataaattaaagcaaatacaacaaagcccacagaatcagaatgtagaaatgatccaacatgaggataattggtgtcctaaatgcaaagtgccccaaaatatggaacagaagaattcagaagatg

SEQ ID NO: 714076 - DNA, 671 bp, Homo sapiens
cccatatctgataattgaaaccctgaagattaacaactggaaaatagcctttcttttttctctcttcatagccatggctctaattcattctagtttccctctgggaaaattacctaaaggttaggcatattccctaaagggatggaccactccttgaaattgtgaaaaagcagaacattggttcagggcatctaacaaagaaaggaaatgaagagggaggcaagaaaggaagaccccctgcaaagattgataaagaaactgacctgggagaatacatgattaaagkaatagtaataaactgtgtatttgtgtatatacgttatatatacattaactaatttaaaataagacctcatagagaagaacataaacagcagcaacagaaacagataaatggagatcatcacacttaaaaatacaaagtgaggatccaaacaacaccattcaacacactgaagtacaaattggaaggaatagaaaagacactactggaagctaagttaaaagaaaatcttaagatcataacaatacatgcagctgaaaagaaaataaattaaagcaaatacaacaaagcccacagaatcagaatgtagaaatgatccaacatgaggataattggtgtcctaaatgcaaagtgccccaaaatatggaacagaagaattcagaagatg

SEQ ID NO: 714077 - DNA, 671 bp, Homo sapiens
cccatatctgataattgaaaccctgaagattaacaactggaaaatagcctttcttttttctctcttcatagccatggctctaattcattctagtttccctctgggaaaattacctaaaggttaggcatattccctaaagggatggaccactccttgaaattgtgaaaaagcagaacattggttcagggcatctaacaaagaaaggaaatgaagagggaggcaagaaaggaagaccccctgcaaagattgataaagaaactgacctgggagaatacatgattaaagtaatagtaataaactgtgtatttgtgtatatacgttatatatacattaactaatttaaaataagacctcatagagaagaayataaacagcagcaacagaaacagataaatggagatcatcacacttaaaaatacaaagtgaggatccaaacaacaccattcaacacactgaagtacaaattggaaggaatagaaaagacactactggaagctaagttaaaagaaaatcttaagatcataacaatacatgcagctgaaaagaaaataaattaaagcaaatacaacaaagcccacagaatcagaatgtagaaatgatccaacatgaggataattggtgtcctaaatgcaaagtgccccaaaatatggaacagaagaattcagaagatg

SEQ ID NO: 714078 - DNA, 3874 bp, Homo sapiens
atccataaattagcatttattagtcttagttattaaatatataatagtttatagggatgttaaagtctgacaagaatggagacaatttataaaaatgtttaaaatagttttatatatttgcaacattataagaaaatatatggaaaatctgatcatttaaggcattgatttgtagctaaaatatgtttacatgtattctatccatatgagcaaaatacagtaattgcataggcttcaaaggtaatagaccagaggattttctataggaaatgaattaatgggtccattgcacatgaaatcccattttgttaaatgaaacaagcccagcggtctttattgatctcattgtttttagattggttatgcctcctagtttcctttaattaaatcaaagctactatgtggatgtgggaaaatagtcttgaaaatgtgtcataatcaactgccataaaattaacctcaaattcatactgcccccaaatattctatcataaacacatcctgaattaatataattctgaaatacttagtttcataataatgaaggataaagaaattaacatggcatttgtttacataaaagaaataaattgtcttgaattgtacagggttaaattttcatgtcagagaatttacatggggaaataatcaagtttcattgcatgaaaattagttacacttgtgtgcatgtgaacacacatgcacaaacttccttaaacatttatttcaggtattaaaagacttaagtaagtagagagggaactgtactgattttcaactttatactcaaaatgcgataaaagacattattgaatgcaaaaattaggcttactcgtgagtatataccttttcataatcctgtaaacctctgggatcttcataaggaaacacttttctggactaattaagctgaatagattgaggaaaaaaacataggttttcttttcaaccttttattttctctaaatacatacatacatacatatgtgcacacatatccaactgtctatttagaaaaatttcatgacatcagagtaacagaaaggtcaccataaagattattcaaacatatatacatatggacttgagagacaatatttaacttatcccagttttcaaaatgaacaatgtggaaacaacacagtaggaaaaggtacaatcatcacagtttgaacgctcattaaagtaaatgtgctttttattagattgtttatttttccttttgaaaccactaacttaacctttcaacaattatcattgctgttgtactaaatcaattgttaaagttttgttataacatggtatcaattttaacaatttaacaaatataaatttcctctgtctccttactcatacttagctaacttttattgaactttaaatcattgaatgttttctacatattatacagaatcataggaattattgactaaaatagacatataaagagccattcaaaagaacgttttataaatcaattatttgaagtactattatttctcccagagtggagttaactaattttaattcccattatcaatttgaattgtcaatatgattttgagtctaagcactgtatatggttttatcaaaatacaacattatatcaacctttattttaattagttctgcttccaagggattttatgttcagatatgattgaatgaaatgtaaaaataatattcatagaaaaataagatattttrtagacagttttacaacttttgaaaaccagtattaattctgacaaataaatattgtcaaaatatttttcttgatttctatgaataccttaatattattagcaagaaaaatctattgtaatatttgatagattttaatatcaattgcaaaatacttgctacataaccatcaagcacactgtgtgaaacctataaaccttattcattttttgaaaaagcatgtgtacattattatttatctgacacatgggaatggaaatgacattaggcaaaattaagtaatcagaaaaaaattattcaaaaagttaacctcttttctcattttattaaaaaaaattgataggcattttctttttcattaccaccctgatattctcattttatcaatggtgtacagatttcttaggacaaaaaaatagaattaatttccactttataaatttaattttctatagaaatatttaatatgtatggtgtaaaagccaaaaatatgcctctatagatcttgacaaaaaaacaaaattttaagtcagaggacctgaaaattattactgaattaagattgttcatttttatgttttctcacaattaaatctgatgtttcttaagttatggacttcatgataattaaaaactgattcttttgtagtactttcctttatgtgcacatattagctaggactacttctgttgcaaggcaaacaatccttatccaaaagcatttatgcataaaatagaacttactgtttcatgtaataagagtccaggggtggatgtggcttcaggtctgggtttattcaggactcaaatgagtcaccaaaattgcaccaagttttgcattttccccccagcagtctcaggttaatattatcacaatattcagatatattacataaagagaatctgatgattcacacacaattcttcctcctaatctctgaacctagcactatggatccaagaacgtaatcatttgattggcttaatataggttaaagattactcttttggctcctagggcgtaatccagtatatacacattacatggatttagagcattggagcaatatttgaatttgacaactagaaggaatatgaaagatgacaagaggtaatgacaatagtcacagtagtgctgatattcacttttatatgactatcaggagatttggtgaaatatcagtttccagtcattaatcagtgtgtataacttaagttctgattatggcactaaattaactttctattgatctccaatgaagacattaaatttgtatggggatgccttgcacatggactaaacacaatatcttgcattattaaaatgttcaagcatttacaaaagtagataaacaaagattctcccattttacctatctctcagtatcaacttttaacaattcatagcagatcatgtttcaactctacctcatagttagtccgtcctctacttcatttctattccatactcattggacagttttaatgaaaagccaataataatataattccatccacaaatgtcatataaactttataattcaacctgtaagatagtgggattttacatttggggtactttaatatgtctaaatatggatactcaatattcccaattaataatggataaaatcagaaatagagaaataaattatactcattctatttcttcctattacactgtagtgttttcataatgaagcatattctgatttctgatcatgaaatatttaaactggagagatacaacaaacaacattaatattcacttgtcttttatttctcttttattgttaatggatttggagtcccaatgtctggaatagctaagcaatgccaaattcttagatgacatttaaatttttaagaggtaataatcacagcttaaatatacatgcatagtggttgcttgagctgaatttttaaacatttgttttgaaaaattaatacaaattaactattatattttataaacacaatggctattttgagtcaaagggacttaaagtgtaatccgagttggttatgtgatcctggcaaagtcatataacacctctgagcccctgaatcttctagtcttagtcttctagttgaggaatattatatttaccttgtaggagtttccgtagacttaagaatatgtgaagaacctagaaaagtatccaattgg

SEQ ID NO: 714079 - DNA, 835 bp, Homo sapiens
catagaggatttaataaatttacatgccaaaaatactgtttttttagcaaatcatgtttgagtattttagataaaatggttataaagtttttcaacaacattggctggtgagataatttacttgataataagagtcctcttgggcaggcatggtggctcacgcatgtaatcccagcactttgggaggccaaagaggtgggtcaccagaggtcaggmatttgaaaccagcttggccaacatggtgaaaccccatctttactaaatacaaaaattagctaggcatgatggcacatggctctaatcccagctactctggaggctgaggcacaagaattgcttgaacccgaagatggaggttgcagtgagctgagattacaccattgcaccactgcacgccagcctaggccatagagtgaaactctgtctgaaaaaaaagaaaaaataaatgagtcctcattccagtcttattgatatggtattatatatttgattttttgggttttggtgggatttagaagggtttcatgaaaataaaggtaaattatataattataaccacaagaaagccacagaataataattataattataatcaccagtgcgaccaatcttcagtggtgtgtttgattgccatttgtaatgcactagaacaagctttttaattaatcctgaagcaatacaatgggaaaaaattacccttgctattagatagcagttgttctgtaagaaaattaccattacaaaaggagtgtttgtgattagactatgtaatttcatttcaatctctataaatgttgagtattttatttcaagtataaatactgcattgttttaa

SEQ ID NO: 714080 - DNA, 835 bp, Homo sapiens
catagaggatttaataaatttacatgccaaaaatactgtttttttagcaaatcatgtttgagtattttagataaaatggttataaagtttttcaacaacattggctggtgagataatttacttgataataagagtcctcttgggcaggcatggtggctcacgcatgtaatcccagcactttgggaggccaaagaggtgggtcaccagaggtcaggcatttgaaaccagcttggccaacatggtgaaaccccatctttactaaatacaaaaattagctaggcatgatggcacatggctctaatcccagctactctggaggctgaggcacaagaattgcttgaacccgaagatggaggttgcagtgagctgagattacaccattgcaccactgcacgccagcctaggccatagagtgaaactctgtctgaaaaaaaagaaaaaataaatgagtcctcattccagtcttattgatatggtattatatatttgattttttgggttttggtgggatttagaagggtttcatgaaaataaaggtaaattatataattataaccacaagaaagccacagaataataattataattataatcaccagtgcgaccaatcttcagtggtgtgtttgattgccatttgtaatgcactagaacaagctttttaattaatcctgaagcaatacaatgggaaaaaattacccttgctattagatagcwgttgttctgtaagaaaattaccattacaaaaggagtgtttgtgattagactatgtaatttcatttcaatctctataaatgttgagtattttatttcaagtataaatactgcattgttttaa

SEQ ID NO: 714081 - DNA, 1528 bp, Homo sapiens
tgcctaatttataagtaaaaaattatcagaggtatgcacatatacaaaaaaaaatagcatatatagggttgggtactatccacagcttcaggcatctgctgtgtawcttcaaacataacccccatggataagggggttactactttactttctaaaactgactcagtaaacaagccatgattcttatgaggatgggaaataccattatacctttaacaaaatggaaactaaggttgagaatttgagtcttcaaaataacaaatggaaaatgaaatataaactgattctcttcatcaattttgtttcattatatgatgaaatttcaatctcttaatattctatttacaacctctataagctctttttagttagtagtattagttgcattaactagattacacatatctcaaagcttgtatactttctgggtatgattcacagcctcacaaaaattttgtgtgagtagtagagccttagatgagtacactttttttttaaattcattttatgccaattaaatcagcaaacatttgttgagtcatagtatgtgtcagacactgtggaaagtgctagagataaaaaaaataaatatggaatacagtttgctctccagggcacacagtcatgggatggagatagtgatgtaagtaaatcattggaatacaagatcataagcgcaattttgcaagtatttccaaaatagaacattgacacaagtcagcaagtcatcaatttgaatgcataaggtacatgcttaaagaaaggttgttttatatatatcataaaagaggagtaggatttttccagatgggggtagagtgaaattgagaggttggtgaggaaagaagagtatttcaggagccagaacagcatgtgctgaactagaaatatattagacagttaagggaactgcagagttttagtcctgattgaaatgtagggtacatttatgtaacacagacaaattaggccaaggagaaattgtagagtatatcttatgatattctaataaacttagattttatttgtaagtagtgagaccactgagaagattaaacaaacaacaacaaaaataggagaaacctggttgtatttaaattttaaaacaatgtctgtggctatattgttgaagacagagtaaaaggatgtaagacctacagacacaggggtcagagtggagcttactttagttcacatgggagattatgagaatctgtcttaagtcattaacgattaagcaggggttgttatttttagatactaaagtaggaaaatcaataggattcagtgacccatgagataaagtaggagaagagagcacggtctcgtggtcttccgaatttttggtttactagattgaataatagcattattggttataaatgtaattatatgaaaatgaggaagttgtgaagaaagattttaagtttaattgtgtacatgttgaccaggaatctatacattaaaaaacattttgataatttgcagttagtgctcgctgtgcatttatagatgaaatatttaaatg

SEQ ID NO: 714082 - DNA, 1528 bp, Homo sapiens
tgcctaatttataagtaaaaaattatcagaggtatgcacatatacaaaaaaaaatagcatatatagggttgggtactatccacagcttcaggcatctgctgtgtaacttcaaacataacccccatggataagggggttactactttactttctaaaactgactcagtaaacaagccatgattcttatgaggatgggaaataccattatacctttaacaaaatggaaactaaggttgagaatttgagtcttcaaaataacaaatggaaaatgaaatataaactgattctcttcatcaattttgtttcattatatgatgaaatttcartctcttaatattctatttacaacctctataagctctttttagttagtagtattagttgcattaactagattacacatatctcaaagcttgtatactttctgggtatgattcacagcctcacaaaaattttgtgtgagtagtagagccttagatgagtacactttttttttaaattcattttatgccaattaaatcagcaaacatttgttgagtcatagtatgtgtcagacactgtggaaagtgctagagataaaaaaaataaatatggaatacagtttgctctccagggcacacagtcatgggatggagatagtgatgtaagtaaatcattggaatacaagatcataagcgcaattttgcaagtatttccaaaatagaacattgacacaagtcagcaagtcatcaatttgaatgcataaggtacatgcttaaagaaaggttgttttatatatatcataaaagaggagtaggatttttccagatgggggtagagtgaaattgagaggttggtgaggaaagaagagtatttcaggagccagaacagcatgtgctgaactagaaatatattagacagttaagggaactgcagagttttagtcctgattgaaatgtagggtacatttatgtaacacagacaaattaggccaaggagaaattgtagagtatatcttatgatattctaataaacttagattttatttgtaagtagtgagaccactgagaagattaaacaaacaacaacaaaaataggagaaacctggttgtatttaaattttaaaacaatgtctgtggctatattgttgaagacagagtaaaaggatgtaagacctacagacacaggggtcagagtggagcttactttagttcacatgggagattatgagaatctgtcttaagtcattaacgattaagcaggggttgttatttttagatactaaagtaggaaaatcaataggattcagtgacccatgagataaagtaggagaagagagcacggtctcgtggtcttccgaatttttggtttactagattgaataatagcattattggttataaatgtaattatatgaaaatgaggaagttgtgaagaaagattttaagtttaattgtgtacatgttgaccaggaatctatacattaaaaaacattttgataatttgcagttagtgctcgctgtgcatttatagatgaaatatttaaatg

SEQ ID NO: 714083 - DNA, 1748 bp, Homo sapiens
ttcacagggcacatcctgtcattgtatcaggtctgaagcagtaatagtcagtgagctctctcggtccttcctcctgcaaagtcttcatcttcctaactctgacctttactgttcttgtttctaattgcacaacaaatgtaatgtgtaggctgtatttctcctccagtgaaaatccacttggtccagtgcctgctgctagtaaacctagctagtaaggttagaaaacctctgctcttcatcatgctgaaagagatggcctttatagccctctttaactgctgatgggaataggacaacttctaggctggctgcctcggctcccccatccccgttattcataaggttttactctaaatcgttcctgcaccccactgttaagtgtcctgccagatgcatcaaggggatttacaatcacccatttgtgcactccatggactttcctgcttagttctgtaattccctctgcttacgtagatgaaacccattgttacacttgtgcgcttacccatgtgcttagtgctagcaattctgagcactcgatattgtcatgagaaaatactacaagattgcaacccagctctctgcacaggcaggcctatcctccccgcagtagcatatgagctccatgaaagctacaatctagaatgctacatcccagtgtcttgaactgtgcctgacatgtagtaggcacccaatagacatgggtggaacagatgattgagttgatgagcagaaaaaarcaagaggcatgttgcatcttctgtgcacaaaatcccaccagcaaaggaacctatgtacaagcttctttttttgttaaaggcctccccttacacctcgccaaccccacaccctttttcaatacacaatctcctggaaaaaaaaaaatccctgtgtgatctttaaatattacccttgtgctggcaccttctttgccaaaggcaggaaaaactcgtctatcaagtttcccttcatttgagcagaggcaactatctacagctttggaactatggctctctcaccagcagctgagcactttgatcttcatgccattccccgaaataaagaggcagaagccaaaccgtagcctggtctcagctctcctagcctcaagctgcatgaggcagaaccatccaaagggccaggcatccatggacatctggcagagagggcgcaaccccctctgggctccagcagctctcagcggtgctcctttgaggttctttgtccccagggagtctagtatgtgtggccaagagtttcactggctctttgactgtagcaagcatcttaacttagttaaacctcagttttcttatctataaaattagaataacaatagtatctgcctcacaggatcattatgagaaataaataagacagtatacacaaagtgcttggcacaaagtaagagctcaataaatgatagctattattattcctgcttggtatgatttgttcatgcacttttgttgtaaacaaataaacaaatgcaacctgcaatctgaaataaatagaaaaagctcacctatcattattaattcattcaacaaagactgtgtcaggccccagatgagacaggcaaggttttcaaagttttggtgttgagtctttaagtcatctgggtcttcacttaagttgatccctggaatcataagtactctctgtttgcgtttctctctctcagtgcccacaactcagctgaatgtaatgtttcaggacactttcctgaactggacacatcttaggct

SEQ ID NO: 714084 - DNA, 1748 bp, Homo sapiens
ttcacagggcacatcctgtcattgtatcaggtctgaagcagtaatagtcagtgagctctctcggtccttcctcctgcaaagtcttcatcttcctaactctgacctttactgttcttgtttctaattgcacaacaaatgtaatgtgtaggctgtatttctcctccagtgaaaatccacttggtccagtgcctgctgctagtaaacctagctagtaaggttagaaaacctctgctcttcatcatgctgaaagagatggcctttatagccctctttaactgctgatgggaataggacaacttctaggctggctgcctcggctcccccatccccgttattcataaggttttactctaaatcgttcctgcaccccactgttaagtgtcctgccagatgcatcaaggggatttacaatcacccatttgtgcactccatggactttcctgcttagttctgtaattccctctgcttacgtagatgaaacccattgttacacttgtgcgcttacccatgtgcttagtgctagcaattctgagcactcgatattgtcatgagaaaatactacaagattgcaacccagctctctgcacaggcaggcctatcctccccgcagtagcatatgagctccatgaaagctacaatctagaatgctacatcccagtgtcttgaactgtgcctgacatgtagtaggcacccaatagacatgggtggaacagatgattgagttgatgagcagaaaaaagcaagaggcatgttgcatcttctgtgcacaaaatcccaccagcaaaggaacctatgtacaagcttctttttttgttaaaggcctccccttacacctcgccaaccccacaccctttttcaatacacaatctcctggaaaaaaaaaaatccctgtgtgatctttaaatattacccttgtgctggcaccttctttgccaaaggcaggaaaaactcgtctatcaagtttcccttcatttgagcagaggcaactatctacagctttggaactatggctctctcaccagcagctgagcactttgatcttcatgccattccccgaaataaagaggcagaagccaaaccgtagcctggtctcagctctcctagcctcaagctgcatgaggcagaaccatccaaagggccaggcatccatggacatctggcagagagggcgcaaccccctctgggctccagcagctctcagcggtgctcctttgaggttctttgtccccagggagtctagtatgtgtggccaagagtttcactggctctttgactrtagcaagcatcttaacttagttaaacctcagttttcttatctataaaattagaataacaatagtatctgcctcacaggatcattatgagaaataaataagacagtatacacaaagtgcttggcacaaagtaagagctcaataaatgatagctattattattcctgcttggtatgatttgttcatgcacttttgttgtaaacaaataaacaaatgcaacctgcaatctgaaataaatagaaaaagctcacctatcattattaattcattcaacaaagactgtgtcaggccccagatgagacaggcaaggttttcaaagttttggtgttgagtctttaagtcatctgggtcttcacttaagttgatccctggaatcataagtactctctgtttgcgtttctctctctcagtgcccacaactcagctgaatgtaatgtttcaggacactttcctgaactggacacatcttaggct

SEQ ID NO: 714085 - DNA, 1149 bp, Homo sapiens
ctaactgcattcttcatggaaaacgacttttacctgaaggactgacagtcattcggacctctgtatttgacacacattttcttgaaaatgaattaagtgagcctctcacttcaaggaaaacaaatgacttatttatttgtcaatatcaaaagttgatctgtcaagaattagaattttggaaagctttcatcaacagctatgtgacttatacaaatatgatagatgaacattgggacctatgagtttgaatgagatccccaagcagatagaaaagaagagggttgtgaaagcgtcctagaggatggagagggaaaagaaaaagcagaaagagattaaagatgagcagtcagggaagtagaagaagaaccaaaatagagtcatggaaggcaagagaggaaagaaatcaataacaccaaaggctgcagagagcaaccaccatttgtctacacagaggacttggccaacagagcctgaaaggcagtaaatgctgggttctgtttttgagaaatgctgagacatctggctggtaggcccaaaagggatgtgagacggtggcctgttgaagaagcaggagcatgggagacccagcttgctcgttggtctttgtggatgatagctcaggcaagatccagaactgagatcagacttcagatcttcttgtttccggcccaggactcgattcttattgcgtttcagagctgtgtctcttgcttctaatatttgaaacagatgttgtgaaatctataatttccagctttgaaatgaattaatatgttaacctcctacttctcagatgcattctgaagaaatagtactaagtgtgacacaaggttagaacatcaaaatatgtaatccaactaacctggacctgcttctgctctaaggttcctccagcaaggggtcacaaatattaatamaatgtaactctgactcccaaaagcctttgtgactaagtacttaggttctcactgaaaacctctactgagttctcttgaaagggtcccaaggaaaggtttcacaggcgcttctcaaaccattggtgctgaaggagcaggatttcgaaatctccaatccatcacggactgatgcttttgtaaaatgcaatcaaagtggataatttgaaaaaaactaaatgaatatataatacaa

SEQ ID NO: 714086 - DNA, 638 bp, Homo sapiens
ataaaaaaaaaaaagagagcctagcatgaggtaattgttcaacaaatgcgatgacatcatcaaggtcaaccttgtgtaactgggtgttataacacaatgggttgttcctgtgttctaaaaatagtggaagctacattttgaaggaccgctatacaaacatttcaaagttcatgagccaaaactcactaacgactcttgaatcccttgttcacmcagaagatggaatatgttttgagaaaatggagcttgaaagaggagctctttggagagagctgtgctggcatttccctctgccaaggagaagggtcagggtcctctccttcacagtatgagaagggcgcttcactgagaccattagagggttcgatttggtctccctacaattgttgggacacagggtactgggtctaattcccacctggaaatctaaaagattgggtgtccagtggtatgagcaaaggacaggtgcctgttgagtactgttctcttggagatgatcggagcaaataatgtgggagtgtttttcataggctgaagagaaggcagactggggagagagccagactgcattgatttgaaatcccacataagaggattccatgagaaagtgactgaccccaactgagagggcccatata

SEQ ID NO: 714087 - DNA, 1052 bp, Homo sapiens
ggggcaattagagcttcaaagcaaataataatggtaacaggtcaaaacccattgagtagaagggaaatccatgtgtccatgctgacaccaataaatggctgaataaaggagcaaatggacaagctgtatcacctaacaggatacaataagaataccccatcacttctgttattttcctgccaaaaattcatcgactgaatctaatcatgaggaaacactgcacaaacccaaactgagggccatgctacctaataatggtctatattcttcaaacatgtcaagatcatgtcacgaaagtcaacaagagaataagaaatacttccaggctgaaggagaccagagatgcgacaactaaatacagcgtgtgattctgaatcagatacttccactctaaggacattattgggacactcaggacaactggtgaaacttgaatgtttggggactgggtggtagcaatatatcaatatgaatgtcctgattctgatggttgctttgtggttatgtatgagaatttttttgtttacaggaaacctgggggagtggcaatgtatcacattggcaacttactctcaagtaagtccgaaaacaaaagaactcttcgtacagggctttaactaccatataagtttgagactgtttcaaagtaaaataattaaaaaaaaaamaaaacacccaaagaattatgttcacttattctggcgaaggcactctaacggaatgtctttaggggcatcttagaaagatgttcttctctagcaacaactgcctaaaggaaaagtgcttcctttccacctgacatagacattcacccatcaaagctgaggcctggacctgtcacaattattttgcaaatagggaaaagccactaaaaactcagagaagccaccccagagatctgccattgttgagctgctaaattagcaagccctcagactggctacctccagatttctcgttatgtgtgatttattaccaaatccaattggtttaagttaaaaaaaatcttaatttgctttcagacggcaccagctccgtttgaagaaagggcc

SEQ ID NO: 714088 - DNA, 1052 bp, Homo sapiens
ggggcaattagagcttcaaagcaaataataatggtaacaggtcaaaacccattgagtagaagggaaatccatgtgtccatgctgacaccaataaatggctgaataaaggagcaaatggacaagctgtatcacctaacaggatacaataagaataccccatcacttctgttattttcctgccaaaaattcatcgactgaatctaatcatgaggaaacactgcacaaacccaaactgagggccatgctacctaataatggtctatattcttcaaacatgtcaagatcatgtcacgaaagtcaacaagagaataagaaatacttccaggctgaaggagaccagagatgcgacaactaaatacagcgtgtgattctgaatcagatacttccactctaaggacattattgggacactcaggacaactggtgaaacttgaatgtttggggactgggtggtagcaatatatcaatatgaatgtcctgattctgatggttgctttgtggttatgtatgagaatttttttgtttacaggaaacctgggggagtggcaatgtatcacattggcaacttactctcaagtaagtccgaaaacaaaagaactcttcgtacagggctttaactaccatataagtttgagactgtttcaaagtaaaataattaaaaaaaaaacaaaacacccaaagaattatgttcacttattctggcgaaggcactctaacggaatgtctttaggggcatcttagaaagatgttcttctctagcaacaactgcctaaaggaaaagtgcttcctttccacctgacatagacattcacccatcaaagctgaggcctggacctgtcacaattattttgcaaatagggaaaagccactaaaaactcagagaagccaccccagagatctgccattgttgagctgctaaattagcaagccctcagactggctacctccagatttctygttatgtgtgatttattaccaaatccaattggtttaagttaaaaaaaatcttaatttgctttcagacggcaccagctccgtttgaagaaagggcc

SEQ ID NO: 714089 - DNA, 637 bp, Homo sapiens
agttaagggatttaccttctrttctaatttgtggagagttatcctgaatctgtattactactgcagtttttaaaaatcacttttttctaaagtcatatcaagtccatactcctgaacagtttgttattaaatataacttcacaaatattcttgtcatatagaaaaaggaaagaaatacttagtggttaagcatcctaatccaaaaatccaaattgtgaagtgctgcagtgagcatttcctttgagcaccatgtgggtgctccaaaagtttcctgttttggagcattttgggttttggatttttgtattaggtatagggattaggaatactcaaggtgtagtggcttcttctattttcatattagaaacagaagcacaaggaatgtcatgtcagaaaccatccacctcactggacatcaagacatagacatgacctcagtatttagtgagatactggcaatatggaaatgtagtgtaaaacggagaggagtgggagatataatttcctattttcatcctctaaatattaaaaatttttatttaggcctatattgatggaagggagctaattatatagaaactgattatatagaaaaggaggaaacaatcaaatttagaaatccagtaattttatgtag

SEQ ID NO: 714090 - DNA, 966 bp, Homo sapiens
gattttgttgactgtcttgtactgtttctgggggcagcagtaaaggtaggagctgagccttcctgtgtatctggcttttctgttctgttctagaagttggtgctcctcccaagcccttcctgccagttacctctcacagttttttaagttatcatatgatgatttaaaaatgtgtccacaaattctttcacattcttcctccaaagggcagaggctaattcccctcctcctgagtgtgggctggacttgatgattctcttctttttaattaattaaattatttatagagatgaggtctcgctatgttggccaggttggtcttgaactcctggcctcaaacaatcctcctgccttggccttccaaaatgctaggattacaggtgtgagccaccatgcctggccttgatgattctcttctaatgaataaaatacagtgtaagtaagggtatgtgactagcagatcaaaarcatcccgattccccccagcttacactcttggatcactgactctgagggaagccaactaccctattgtgaagctacacaccagctctgaagtgagatccacaagatgattctgtgagccgtcacaaggaatgaaagcctccagacaacagctgcatgagacagttagaaagaggaccctctagcacctgtcaagtctctagatggcaaaacctgagccagaaccacccagctaagcttctcccaggttcttggctcacaaaagctgtgaaaagaaatgtttgttcttttaagccattgagttttggggtaatttgttaagtggcagtagataactattaataataaaattgtattagatttttccatctcctagtttggctctttttgataaatttaaggctgactttaaaaaatattttttgctctccttttaaaatgtgtagtttttcaccattgtaaacaagaactttgatactaactctttgcctcgaatatggc

SEQ ID NO: 714091 - DNA, 648 bp, Homo sapiens
tctgctgtggttgtgatttttgtagcctcaactgacagcacatttaagtccagttacttaaattgaaacaaagacatcaagtgggctaaaatattgcagcctgatttaatatgtcactctcatcatcagtgtccacacatttgcctcatccatagtatttgcacaatattcaacaaaaccttaatgtcagaaagcaacttccagctgtggaactgctgtttcttggctaagttatgtatgcatcacaaattctactacttctcaagtcaaaagttttacaaatgaattcaattcaaagcagtatagtacccttccaaatcggtatgagaatcagctaacatgtatttctcttggtgttgccttcagggtcacagaaggtccctacgcctaattctttcycttagggaataagttacagggttcagatccaaaacggtggtacctgaagagtcctctgaattctagttttaaatattctcattataaacaaatatatgcgcactacagaacaaaatcatctctgatcttgatatccagaaacagaatactctgcaaaaacaaacttggatttatcttcatttgatttatggagagatatgccaacagagacacaggcagactttttgttttgtttgaagaaaactggaa

SEQ ID NO: 714092 - DNA, 1099 bp, Homo sapiens
tttccaaaatgacatgaagactcattctgaacagtgtcatgaacagatatttaatcagtccaaccatttatccccaggaaatctgcatctcagaggttttatatcattttacattatttttcattgttaaggaacaataaaaaagcataaatgaaaatgaccgtattaaaaaagcaagatattttacttcccaatgtcattggaaatgggaaactacgctagcagaaaatacaaaaatattatcactcaaaggtaaatctttttatggctaagcatcacgccsatggcagagtaaaaaccactcagtatggccacaatgatgatcagtttggattgacttagctatagagcatctgcagagatttaaaggattggccacaatactcttctgatggctctgccaaagcatggtcaatttattcaggtccacagacctgaaccaaaccaaagtgacgctttcaagtgattataaaatagatccaaataaaatatcctataaatgcagccaaatcactaagaaatagatacttgggttactggttttttgaaagaaaatttttttttaatattttgttataatggctttaatgtagtagaaaagaacaaaactggagagcggatttattatgggtagccagaaaagagtcatgtttctaacggaactgaaacattgctcattcatacattctaagagaagaagctgtttcaaaacatttgaagtaacaggacagaataaagcaaataagtaactggaggcaacaacgggataaaaacgatgagcccgagaactgccttcaagtctgtagaccccatgaaggacctcaggcccttggaagacagttggagagacaatgtaggcctcctagctctcattaagggatacaaggtagtctgtttttaacttgtttctgtaacagagcatttttttttttttacttctcctatgaatttcttaaaaaaattgggctcgattaaagttgtttctatctttaagatctcatgagacacacaaactttataaacaaaaggggaggaatcagattaactccttttacagggcaaaataaatttaacacccacccccccaaaaaaaaaacct

SEQ ID NO: 714093 - DNA, 924 bp, Homo sapiens
tttgtaccctcaatgactaaaacagtgtcttagcacatggcaaaaaaaaaaatgaagtaattgatgtagtagaaaaatttttctcacaatgtccaatgtgattcttcagaaagagcactccattgttgataaaaaaaaaaaatacctcagaagtttctaaggttcagttgtcacaaagcatttgtactttcttttatagactccctcagtgcccatattttttattagagacatttttttcaggtttttttttctcccagacactcatgggtaaagcatacttgtataaaatttgtgtatataatatacagtaaagttcacaccatttccctttctttaggaattttcccaacacataaaggaagctactcaatgtrtatctatcacctcacgcagttgccatcattttatggtgacaacacttaagatctaccatcttagcaaatttcaagtttacaatacggcattattaaccttacttgacatgctgtatattaaatccccagaatgtggtcatcttctaattgattatatgtaacttctgaccaacgtctcctcatttcccccaccgccagctaatggtaaccaccattctattctctgcttttccaagttcacttttttagattctacatatagtgagattatgcagcatttgtctttccttgtcttgctaattttgcctaacataatatcctccagtttcattaatctcatcacaaatgccagaatttcttgcttgttatggccaaataatatttcattgtgtgtaaatacatatacatatatgtaaatgtgtctggtatatacatatatgtgtgtatatgtatgtatgtacatatatgtatttatttcacgtttactttattcattcatcagttgatgggcatttaggttatttcggtgtctttgctatggtgaatg

SEQ ID NO: 714094 - DNA, 675 bp, Homo sapiens
ataacattattaagatcttagagtgagctattttaaaggttcatttaaatatattatttcttcaaatcctcaaatcactctattataaatactcaccgccattttgtaaataaactgaggctggactgggtgcagtggctcatgcctgtaatcccagcactttgggagaccaaggcacgtgaatcacctgaggtcaggagttcaagaccagcctggccaacatagtgaaaccccatctctactaaaaatataaaaattagctgggtgtggtggcatgcrcctaaaatcctagctactcgggaggctgaggcaggagaatcgcttgagcccgggaggcagtagttgcagtgagccaagatggcgccattgcactccagcctgggtgacagagcaagactccgtctcaaaaaaaaaaaaagaagctgaggctgagagtttaagtaatgtgtacaagattctgcagctaataaaataagtgggagcatcagaattcaatctcagttcttctgatttctagtccagttctctttctattttttctctttctattttaccattatactattttgaggtaacattgagtaagggttctttatcatcttggttagttaagtgcatattgatttaacattcatgtaataattgaataatcacctttagcaaataccagagaat

SEQ ID NO: 714095 - DNA, 1897 bp, Homo sapiens
tgaactcagaagcaggacaaattgaacttttttttttttttgtgaagataaattgatgcacaaggggaatcttgaaatgcactattaaaaagctcaactacttaaggataagacaacatgtagctgaactttttcatatatatatatgtatatatatatacacacacatatatgttttttatgtttcataggcttcagttaggaggacagtacagagcctccactgcaatcaaccagctgtggcctgccaattctagttcctgacaggtagcaagctggattcttggctgtaaagaatctcaagcagtttcgatatgctctagggagggcaactgtttagcctaagcaattcaaagaagcataattgtgcttcacagtacacagaaagtcaccacatctgtttcgtatttttggcttttagaactgaactagaacagagaaataaacatacagctttgaatatagagtaaaaacaagttcatggtgcacagatgagcatattgtatgtaactcagtgaaaatttccttaatgagggtttcttttggtaaagtgagaaatatttctggtgttaatcaaggttttttaaaaaaagatttaatagaaaatattgtctatttaaatgtcaagacagcctatcattcctccttaaatctattatagtcaattgttgagatgtcgcagcggtgttcatgtgacctattgcaaatatttggggtgtcatctgctctgcattagcctttctagtgatagttattttaaaaaaataatttggatgtrgtaggctaaaaacattcaaggcaatgaattagaacttcattaaccactttcatcttttattttggttcaaatgtaaatgcagtcatttcatatctaagtgtatataatatgtgatgactgtcttttaaaaatgtaatctagcagaaaatacatcttaatttgaatgtaacactgctttaaatataattttaatattcttcagcatctggcgtctcaaagaatggggtcatttgaggttaagaaacttttccctagaaataataataataataatgatcttcagacaaacagtgaaaaaggcaagttcttatcaaaacagtcagacaccatggaaagatgggaagaaagaaactaacgtatggaggtttttcttttactagggggcatcacatgatgatacttatatatttcctacaattctcatatagataactgtcatgtagataacattttgagattttatggatgaaaaacctggcatgaaataataagtttaaattaggtcagccctgattgtattcaggtttctcttttattcccttttctttcaatttgcaattgttttttaatgtctgtgtccccagcagtctgtaagctccatgaggtcaaagactatgcctgtcctctgttatatacccagtgatcagcacatatatgaatagcagcgaattgatatttattaaacagttaagagatgcctggcactgttctaaacaacttagatatattgactcatttaatactcccaacagtattatgagtggattactattatctccactttatacatgagtaaaaagaagcacagaaaagttaggtaacttgccaaagtcacacagctagtagatagcagaagcaggatttaaacctaggcagtctgactctatctcaatagacgtttttaattattaaattaactcttgtcaaagtaataaattctctgaaatcaatcaagattgaaaaagacctatagagaaaattactcacttagatgttaaggtagccattacctcttgtcgtagtacttattcatttaacaaaaatgcattgaatgcatcttatgtgcaattgtgctaagtaccttcttagattaccttacaggaatcctctgtgtgtgtg

SEQ ID NO: 714096 - DNA, 1897 bp, Homo sapiens
tgaactcagaagcaggacaaattgaacttttttttttttttgtgaagataaattgatgcacaaggggaatcttgaaatgcactattaaaaagctcaactacttaaggataagacaacatgtagctgaactttttcatatatatatatgtatatatatatacacacacatatatgttttttatgtttcataggcttcagttaggaggacagtacagagcctccactgcaatcaaccagctgtggcctgccaattctagttcctgacaggtagcaagctggattcttggctgtaaagaatctcaagcagtttcgatatgctctagggagggcaactgtttagcctaagcaattcaaagaagcataattgtgcttcacagtacacagaaagtcaccacatctgtttcgtatttttggcttttagaactgaactagaacagagaaataaacatacagctttgaatatagagtaaaaacaagttcatggtgcacagatgagcatattgtatgtaactcagtgaaaatttccttaatgagggtttcttttggtaaagtgagaaatatttctggtgttaatcaaggttttttaaaaaaagatttaatagaaaatattgtctatttaaatgtcaagacagcctatcattcctccttaaatctattatagtcaattgttgagatgtcgcagcggtgttcatgtgacctattgcaaatatttggggtgtcatctgctctgcattagcctttctagtgatagttattttaaaaaaataatttggatgtagtaggctaaaaacattcaaggcaatgaattagaacttcattaaccactttcatcttttattttggttcaaatgtaaatgcagtcatttcatatctaagtgtatataatatgtgatgactgtcttttaaaaatgtaatctagcagaaaatacatcttaatttgaatgtaacactgctttaaatataattttaatattcttcagcatctggcgtctcaaagaatggggtcatttgaggttaagaaacttttccctagaaataataataataataatgatcttcagacaaacagtgaaaaaggcaagttcttatcaaaacagtcagacaccatggaaagatgggaagaaagaaactaacgtatggaggtttttcttttactagggggcatcacatgatgatacttatatatttcctacaattctcwtatagataactgtcatgtagataacattttgagattttatggatgaaaaacctggcatgaaataataagtttaaattaggtcagccctgattgtattcaggtttctcttttattcccttttctttcaatttgcaattgttttttaatgtctgtgtccccagcagtctgtaagctccatgaggtcaaagactatgcctgtcctctgttatatacccagtgatcagcacatatatgaatagcagcgaattgatatttattaaacagttaagagatgcctggcactgttctaaacaacttagatatattgactcatttaatactcccaacagtattatgagtggattactattatctccactttatacatgagtaaaaagaagcacagaaaagttaggtaacttgccaaagtcacacagctagtagatagcagaagcaggatttaaacctaggcagtctgactctatctcaatagacgtttttaattattaaattaactcttgtcaaagtaataaattctctgaaatcaatcaagattgaaaaagacctatagagaaaattactcacttagatgttaaggtagccattacctcttgtcgtagtacttattcatttaacaaaaatgcattgaatgcatcttatgtgcaattgtgctaagtaccttcttagattaccttacaggaatcctctgtgtgtgtg

SEQ ID NO: 714097 - DNA, 1897 bp, Homo sapiens
tgaactcagaagcaggacaaattgaacttttttttttttttgtgaagataaattgatgcacaaggggaatcttgaaatgcactattaaaaagctcaactacttaaggataagacaacatgtagctgaactttttcatatatatatatgtatatatatatacacacacatatatgttttttatgtttcataggcttcagttaggaggacagtacagagcctccactgcaatcaaccagctgtggcctgccaattctagttcctgacaggtagcaagctggattcttggctgtaaagaatctcaagcagtttcgatatgctctagggagggcaactgtttagcctaagcaattcaaagaagcataattgtgcttcacagtacacagaaagtcaccacatctgtttcgtatttttggcttttagaactgaactagaacagagaaataaacatacagctttgaatatagagtaaaaacaagttcatggtgcacagatgagcatattgtatgtaactcagtgaaaatttccttaatgagggtttcttttggtaaagtgagaaatatttctggtgttaatcaaggttttttaaaaaaagatttaatagaaaatattgtctatttaaatgtcaagacagcctatcattcctccttaaatctattatagtcaattgttgagatgtcgcagcggtgttcatgtgacctattgcaaatatttggggtgtcatctgctctgcattagcctttctagtgatagttattttaaaaaaataatttggatgtagtaggctaaaaacattcaaggcaatgaattagaacttcattaaccactttcatcttttattttggttcaaatgtaaatgcagtcatttcatatctaagtgtatataatatgtgatgactgtcttttaaaaatgtaatctagcagaaaatacatcttaatttgaatgtaacactgctttaaatataattttaatattcttcagcatctggcgtctcaaagaatggggtcatttgaggttaagaaacttttccctagaaataataataataataatgatcttcagacaaacagtgaaaaaggcaagttcttatcaaaacagtcagacaccatggaaagatgggaagaaagaaactaacgtatggaggtttttcttttactagggggcatcacatgatgatacttatatatttcctacaattctcatatagataactgtcatgtagataacattttgagattttatggaygaaaaacctggcatgaaataataagtttaaattaggtcagccctgattgtattcaggtttctcttttattcccttttctttcaatttgcaattgttttttaatgtctgtgtccccagcagtctgtaagctccatgaggtcaaagactatgcctgtcctctgttatatacccagtgatcagcacatatatgaatagcagcgaattgatatttattaaacagttaagagatgcctggcactgttctaaacaacttagatatattgactcatttaatactcccaacagtattatgagtggattactattatctccactttatacatgagtaaaaagaagcacagaaaagttaggtaacttgccaaagtcacacagctagtagatagcagaagcaggatttaaacctaggcagtctgactctatctcaatagacgtttttaattattaaattaactcttgtcaaagtaataaattctctgaaatcaatcaagattgaaaaagacctatagagaaaattactcacttagatgttaaggtagccattacctcttgtcgtagtacttattcatttaacaaaaatgcattgaatgcatcttatgtgcaattgtgctaagtaccttcttagattaccttacaggaatcctctgtgtgtgtg

SEQ ID NO: 714098 - DNA, 630 bp, Homo sapiens
tggagcccttcataaatgtgaattattattattcattctagccttagaccactaagtaggccaagctaccttccagcactggtgactaaagtataaattaattgggtaagtgagaaattcatctcacacatttcccrctgagagataagagactgctcgttttgattggaaatctatatatacagtggtgcattttactctgcttcacttaatgtatgtgtttgcatccaattccctaataaactggaaaatcattttacagagagagatgtcatgttcaaaataccagtataaaatgcttatgcttctattagaaacgatcatctctctttttctggagatgcactttaggaataatgtcatgtggctggtgaagtggtttgctttattaatcttttacacacatgtttaaaaacactattgaaaataatatttctccaaggaaatattctgtgttatcaagctttgtgtgtatgtttggtgctttttcaacaaacatacttaagggaaattacaaaactggaaatcccagggttattttattgtaagttttttccacttaaccatttgattaggaatgtttttgttagagaggcaaaacccccaaatacttcatttaaaggaaggaag

SEQ ID NO: 714099 - DNA, 569 bp, Homo sapiens
tgtgtgtgtgtgtgtrtgtgtgtgtgtgtgtgtgtgtgtgtatatatatatatatatatatatatatatatatatatatatatggagttttttaagtattattaatgtacatgatcacaaggtcccacaatatgctgtctgcaagcttgaggaggaggagagccagtccgagtctcacaactgaagaacctggcatccgatgttccagggcaggaagcatccagcactggagaaagatgtaggctgggaggctgggacagtctcgccttttcacatttttctgcctgctttatattcactggcagctacttagatggtgcctgccagattaagggtgggtctgccttccccagcccactgactcaaatgttaatctcctttggcaacacccatacagacacacccaggatcaatacttgcatccttcaatccaatcgagttaacagtattaaccagtaaagtattgattatggcgtttttcacaggtcacccagctgttagataattcacttaaattcagctatattttagggatcaatttctgcctaaccaagtcatagtgcatatta

SEQ ID NO: 714100 - DNA, 569 bp, Homo sapiens
tgtgtgtgtgtgtgtatgtgtgtgtgtgtgtgtgtgtgtrtatatatatatatatatatatatatatatatatatatatatatggagttttttaagtattattaatgtacatgatcacaaggtcccacaatatgctgtctgcaagcttgaggaggaggagagccagtccgagtctcacaactgaagaacctggcatccgatgttccagggcaggaagcatccagcactggagaaagatgtaggctgggaggctgggacagtctcgccttttcacatttttctgcctgctttatattcactggcagctacttagatggtgcctgccagattaagggtgggtctgccttccccagcccactgactcaaatgttaatctcctttggcaacacccatacagacacacccaggatcaatacttgcatccttcaatccaatcgagttaacagtattaaccagtaaagtattgattatggcgtttttcacaggtcacccagctgttagataattcacttaaattcagctatattttagggatcaatttctgcctaaccaagtcatagtgcatatta

SEQ ID NO: 714101 - DNA, 633 bp, Homo sapiens
caataagtattaaaaatgccatctttcttggatttagaaacaaaaaggaccattgatagatttatatttagttttaattgacgattttccccaatattatagaaaattgaaaacatcatgaggtatcatacaattgtgattcttaacacagaataaatgcagctagctccttttaaaaaaatcatttgatgaaaataaatgtttctgatacaacagcacagactagtggcaaagcatttgtagcaaacgtttgctttgttatgagatatgttatctgaggwagtcatctttatatattatggaattatatcaaataagctatatatttaaaataggaatgattatcatacagtatggttttgtggatcttaagagtatattagctaaatgtattttattcattccattttacatttactccaaataacctagaaattattctcaaaatgatagctgaaacatatacacctaaaggcagatagtgaatataaaaaatatcttattgtttagatggatacttctgaggtcacatttgttgttttaaagttgcaatataaacaatccttgataatcaaggctatttttcattcagattaagtacagatatagaaaatacggtagccactttataca

SEQ ID NO: 714102 - DNA, 1007 bp, Homo sapiens
tatacatagggraaaaaaacagcaactatactgaacatatatagccttttttcctgtcattatatctaaacatggtatgaccactatttacatagaatttacattgtattaaggattataagtaatctagagatgatttcaaatatatacaaggatatccacaggttacatgcaaatactaccccattttatataatagatttgagtgtctgtgaattttggtatccttgggaggtcctagaaccaatcccacatggttgccgagggaggactgtatatggttaagaattcttggccaggagttaaacatctcagttcaaatcccagttcttctctacatgcctgtgtggtcttgggtagttattccatctttttgaccttgaattttctcattcattgacccctggacaaagaaattgctaatgtactttccagttcaaaactattaagtcttgaaagaataaaagtgaattcaaacgaagccagaaaagttttgatttataagataaggtttggtatcttttttacagaaccacaaatgttctacctcatggcaactgggatcatagtctctaagtgaagagtatattgacttgcctatgccaaaggaaagatcatatcttccaaatatttgaaccatgaaaggaatatagtaggtattttgtccttaaatcatctcatatttagtttcaatgttatttttaaaacatgatttctgtatacaagttagtttcctaaaatgccttctatagaaaagtcacaccaggaccaacctccaataatatgcatgtctttattctctaccaatgcctactctttaccacacaaaagtaacttagagtccacacacttctaagggatctcctatttttttcatttctgttatgttagtgagagaagagtaaaacagggaggttatataattaacctcttcaatctgcaagtcgaacaacctggaacagcacacaaagaagtcagcacacagagtattccaagagcatgtaaca

SEQ ID NO: 714103 - DNA, 3005 bp, Homo sapiens
atatgtgatttttctccctcagttggtaaaaaaaaacaaaactaaaactaaggcataccactgtgaaacaggtgaaaggagtctaggagaaagcccttctgcacacatttataactccatggtaatggtttttaactatgtgcatctatacacaaaaatattacatggaattttagtttccagatcctctgaagaccatatattcatcacatataggtccaggtataaccctgctttatggatacttgaaagtataagaaaattattggtagtattaacttctttacacatttgcagcctggctcagaggcccaactacttttgggccttgccctcttgtcctcttgcctcctttgaagtacttcttaactgtctctcttatttgatagacagttgctctcatatcagtttcagtctaccaagaggcccacacttaatatttggggtaaagtgaaacagtggagaagcaaggctgttagccagctgctgactctaagaggttgctgcttgctaaggcatgtgcttcccatgcagagaaaacgactcattgagaagcctaatacacagggacacctctctaagaaactgtgaaaccaactctgattaagctgaaaagggtccaagagcaaattctaagttttcaccaaaaacaacaacatttcatagaccaaataaaagacaaaacaacatactgagattgctcattaaaagtgttcttgctatgtttatttaatgaagttattcatgtttaaatacaattatcttaaatggcacagcttccctgatcaacaaccacaaaatagaatgtccctgctactatatattattttttagcatacattcttacaaattatatgtgagaagcagatggtgaatgttaacttggcaccgttccaccatctgctctttgcatagctagttaagttcagaaaattaatcaaagattaaagaaagacaatgataatactgaaactaagagtcaccttctttcttgaactcttccaacatttggaatacatataccaagcaccttcaagggttacattctatttgtgatacataaaatctattttaatttcatcgtattaaataaaagctaaataaaaacactcatctccatcacttgggccaattattaaagaatcccaacatcctcatttgttcaataaatatttactaaacattatctgattttctctgtagactttaaattttgtgtttacagattatctgattaaattaacatattttgatagattatgataacgtcatgacttatataagagcttactccatcctctaccccacactcacattattctaggcttaatgaatgatgagttagtctcagaaatgtgtggatatatgaacgaaagaggggaagaggcagcacctctcttttacgatgctccttagaaaagtagaaattgattccagttttctctgtggggatatggcaaaaagtataaccaataaaattatacaatacaggaagtcacttgaactctgtacactctctttgcccctcccacctccattcataatcattagacttaaattctatagtaataaggcattttacagctattgttatactcatgtcaggtaaaatcaaaagcaaaatcatcctatccttcaagacatatatccaaagaggccaagtcagtatgacttaatcctcacaaagtcccagtagagtttgttcttccagttacaatttagaaaactgtactaaatgtattggtttacgtatctgcctgaagtactaatactgggaggatatagctgggtccactaatgatctctgcattcagcaagagaagctaatacatattaagcacttgatgaataatgaaagaattatcagatataattcgtaagttcattttaatggaaatattctgctagttatagaatgtgtatagtttatttgctggtcacaggtgtggacccagtttatgtactgtataaatggtttatattgcattttaaatttttttaaaagcaagagtcattgatttgtgattgctctatcacttttttcaggctctaaaatggtaatcatattacctaatgctaatagttcctgacaatatctctaagaataaaaattaaataatttgtaaataaaacaaaaactatacccacacatcatttcaatactgggaaggtgttcactgatatcattcatacagacatgatccaagagagaacattatctaaatggactctgatcaacttcagtcagtaaatttaataccataaggcagtattaattgactcttccctcattactctaaatgttaaatcttgtgtcttgccctttgaaaaattttgctcctatagtcactatgattgtctataaattgctttattcagccactcaaccaacatttaatgaccttagcttgattctctccctaaactactacattcttgaaagtaaacgctgtgtccaattaatctttttattttccaccatgcataagacaggacctcgtatgtatgtaattaacaggaaatgagtagtatgtgaatgaaggatgccttatcatgacaatacaataaacataagaagcatgagtcccgtctcaaaaaaaaaaaaaaaaaaaagaagcatgagtcccaggacaagatgtaaagttatacaggacaaagttcctcttatttttttctttgaggaaacagaaaacttcaaatgttacagatttaaaaatcactgaaatgagaaagcctatcccttgtgacttccaattttgtttctcctctctgggaattactctgccctaattcactgcaaatccatattcagaagcctatccactaaaacatctcttacaaaatcttcctaatttcttatttcaccagtaagaaagagataygctactgttgtcgttagctttttaaaaaggaaacaacgtaatgtctccatgttatttacatgcgctacttgcaagtgaaaattacagtttcccgttttcagtttttacatttttcagtttaac

SEQ ID NO: 714104 - DNA, 586 bp, Homo sapiens
aaaatggcacaacattcaaaatgtgttatttgtattttaatattttccattatctgatataactgattaaaaagtgcaagaaagttacggtgatattagttgaacagatatcacagggtggaatatgtgttgggtctatcagcttcattcatatagccaatatgaagcagattaatcctccctaagtgtgtggtgctctgtcgcccatcctggagtgcagtggcgcgatcttggctkgctgcaacctccgcgtcctggattcaagtgaatcttgtgcctcagcctcccaagtagctgggactgcagacatgtgccaccacgccgggctaatttttttgtatttttagtagagacggggtttcaccatgttggtcaggctggtcttgaaccccaggcctcaagagattcactggcttggcttcccaaagtactggggttacgggtgtgagccaccatgccgggcctggattttctataaagacaatcatactatcttcaaactcttcaatatttacatctcataaaaatacttagagataattataaaaaataacatgggccacatttgtacattaaaaactacaaa

SEQ ID NO: 714105 - DNA, 621 bp, Homo sapiens
cgagcggcttccgaggctccccagacagccccgacctgcgcagcagcctgctctgtccctgacaccgcatctccacgcccctgtggccagctacccgcagcatggacgggcacgtgggcactatctgtggctgttgtcaacactcgggcaacaaggggggcagcactcgccaagcgggaggaccccccaggactccaggtgggaggacactgcctctggtcccgtgcccagagggtctctggctccagggacttcagagcccaggtctcctggagttggaactcccagggctggtcagctgtgatgaggagctggccaggccccacctgggctcagggcccagcatggaggaccattaagagcagcctcttctgcagactcagggtgcagttcctgccccttctgtcgctgggtttccaagctgctgctgggaaccagatgctggctcctaccaggccaggggtggtgtctgcgcatgacgtggcccartggcctgggcctggtctccctcagcctccaggggcctcttcccagccaggccgggtcctcatctccccaggccttcctctcctgtgccatcctcctggcctctccaaagtgctgcccaacctcctccaggaa

SEQ ID NO: 714106 - DNA, 1141 bp, Homo sapiens
cttgctttaaggataaactataaattaaattcatcccaaagttagcttggcatatacccaggaatgactaaaggacagcttaaagttcagaagcaagatgcagtcaactatgtcagatttctcttactgtcataattttgcaaaggygctttcaaaaagtctaaaattatatatcaatagtctaagcccttcctgaatgtgaactgtggcccaaagggtggctcaacttgctctgggagagtgagtaagaagtaggtatatctatgtgactaaacaaggaagccagtttgggcacagaaatgtgttggtattgaggaaagtatttcaattaggacagatagttagaagtctcttagtaatatccaaccacagaacccacagttaattcagattcaaagtgcacaaattttaactgcacaaaaagaatgtgagtctcctcatccctgcatcacagatttggggagagcatgtatcattacagtgaaaataatcacctgggactggagccgatggttaaggacctttgttttcagatgctcacatccactagagatagtttatattctaatgattttatcaactcttcctaatattttataccatctagaggaaataggaaaagctaattatagcttaccttcattatccttgtcatcatagttaaactactccagtctgtgtttgcagattgacataggcaagcagacttttgagtgtgaatcagaacaactattttaggaaataacgttactattctctgtaccagttatctcccttccttctcagagccctctgagaaaggatgggggtcattctcactcagcctaggtcacacagctgcctagaagatgtgagtttcttgactcccaatctcattatctttccattttgccaacttaagagttaaataataacgactctcctgttgctaaaatgttacacataatccctctccattactgcaatattttaactagaatctaccccttcatggattttcttgctaagtaatgcttgaagagaaatgttcaaagtcagtactccaacactaaggaatcaagacagaaaagcaatggtacagttcagaaagatcaaagtttggggaggtcattatgggaatttatttcattttgaaagaata

SEQ ID NO: 714107 - DNA, 622 bp, Homo sapiens
tccgtagcccacctcggtctgcaactgcctgttgaaggtctgcaggatgtaggtgcctgagtgccggggcaggatgccctggatgtccaggctgccatcggggcgcacagcctcccgccccgtgtgggccgggccaggagtctcatcgcctgtgctcacgatgtagctggccaccaggtatgacacgctgagtgtgggccccgcataccagctgtaggcgagcagttcccccgaaagcccatggacgaccagygtgacgttgtccccttcgctcggctgggcaggctccagggtgatagagatctcggcccccacattcaggaatgtggctgaggaagaggagtcagaggggttggatgaggcaggtttgatcaatcgccccatttgacagaagaagagactcaggctcggggcatgtccccagcccagtgtcctctgtgtaaatgaggacaggcaaaaccaggatttgaacctgcaactctgactctcaacatctcagccacctaatctttctgggagtttatctgcatggcttcgagtacactgtctttctctgtgtttctgttcttccaactctcacatggggatgacaggtctacctgcctggtaaggttgtaaggat

SEQ ID NO: 714108 - DNA, 659 bp, Homo sapiens
tgagtcaaggttcagagctgggacatggaaatggaatgcgtgatgggaatctcagcttggctgggtcccagagaaccacctcacctccctggccagggtccagtgggagcttcagggctgatgcactgggggaaaaaatgtaaatcttatatcacctagtgaccctgatattcagtgagaaggacaatacttccaagacctcctttgctcattcatcaactgcccaggaaatgtttatgagcacttgctgtgtggccagcccacacagctgggaacactctggtgaccaagacagctgcagccctgccttcacaagacttrcagtccagtgtccacagacagtgatcaccagagtgggcagggctgggatgggggagcccagagagctatgagactcagcctaggagttaaggagggcttcctggaagaagggacacctgagctgagaattatgcttagctggccaggtacagtggctcattcctgtaatctcagcactttgggaggttgaggcgggtgggtcacttgaggctaggagtttgagaccacgctggccaacatggtgaagtagatggtgaagaagatggtgaaaccccatctctactaaaaatacaaaatttagctgggaatggtggcatgtgcctgtaatcccagctacc

SEQ ID NO: 714109 - DNA, 626 bp, Homo sapiens
aaggtccacttatacaagtacaggggattttgaaagggaagatcactccacagcattgggaatatctcagaagtaatacactggaaaaatagaaaccgcagagacacaaaaagaagcttaaaagacattaaatatagccacttttgatatttttatgtttatctgtttctttattttttcctatgcatgtgtaatttttaagaaaatgaaaatcatgctgtaaagacagtttttaacctgttttctttaaattcaaaatataacttgaataccttttaatacctgctgtcaagtatttctccgcagcataatttctcatacctgtcaaaatataattctgattatacaactgcaatgaaagaatagggggaggcatcccaagaagctaatgggatcatataaggagctcttgtatatgttcagctttgaaaaagaacacattcaaaaccwtgcaagaccaagattctaagcattgcatcccagtgtcatctgcaaacttgatcattttgtcttttagatatttcttccatgtcattgattgtggccaccatggtaatgtgcattgctgttccaactacagagaacatccttgaccaagggctccagctgccgtactctgctgtttg

SEQ ID NO: 714110 - DNA, 632 bp, Homo sapiens
gatacggagtcccatgggcttgagtttgaattgtgcttccatcccttactgtgtaacctggggaatgtgcccgggtgtctctgagmtgcagttttcttatctcgaaaatgggaatgatatcaacacctcctttgtaaattgagataatgcatttaaagcacctagtaaagtgcctggcacaaatgatacaaaatactagttgccattatttttataatttctactatcatcttactgcgtaccaaatcgctttgacgcccggcattatagcatccacctttacgttctctggagttaaggtaccagagcaaatccctcagcaaaggtgttcaaagagagacacacacgcccgagcactttcttcatgacagatgccacaagagataactggaggagctgaagatgtttagtttagaaaacaggtgatgggggacaggtggtgatggctcttagcgttgccttgttcaacgagaccctgagagcacgatgagcccgcgcgcaagagatgaaatggcagcacccccgcgagcgcatatcagagaaactcgccgagacctaaagcgagtccgcgcgagatgggggtgggagcgcccgcgggggtcgtctcctgcgcagccgcagcggcggcgcca

SEQ ID NO: 714111 - DNA, 632 bp, Homo sapiens
gatacggagtcccatgggcttgagtttgaattgtgcttccatcccttactgtgtaacctggggaatgtgcccgggtgtctctgagctgcagttttcttatctcgaaaatgggaatgatatcaacacctcctttgtaaattgagataatgcatttaaagcacctagtaaagtgcctggcacaaatgatacaaaatactagttgccattatttttataatttctactatcatcttactgcgtaccaaatcgctttgacgcccggcattatagcatccacctttacgttctctggagttaaggtaccagagcaaatccctcagcaaaggtgttcaaagagagacacacacgcccgagcactttcttcatgacagatgccacaagagataactggaggagctgaagatgtttagtttagaaaacaggtgatgggggacaggtggtgatggctcttagcgttgccttgttcaacgagaccctgagagcacgatgagcccgcgcgsaagagatgaaatggcagcacccccgcgagcgcatatcagagaaactcgccgagacctaaagcgagtccgcgcgagatgggggtgggagcgcccgcgggggtcgtctcctgcgcagccgcagcggcggcgcca

SEQ ID NO: 714112 - DNA, 614 bp, Homo sapiens
gctcatcactctttgagtctctaaatccccagaccaatgtcagatctgcacacaggattcttagtagtaaatgtagaaaacataaaaagtggttaagatcaaggactcaggcaccagattatctgtttgaatcctcaccttccattgatggttgcttgaccttgaacaaatgacttagattctctatgtctgtttctccatttataaaactgagataatggtaacaactacctcatggaattgctgggaggatatacataatgtgcttagagcagcggctggcacacagtaagcattcaatagtgttaattaaccaattatgacctttctaaatacagaggagcatgcaattacatcttgcttttaaaacacctawtttttttaaaaaaaaatatggatttacaaggggtcattttttacttaacttttaggaaatgtctcataaatgtggtactgcttcatagcattataaaattaagtaaatcttttccatttcaaaaataaacttaccttgagtaagcatgctaaattctctcaggacacttaccttgagaataaaacatgtttatcacctgtcttaaacttcccccacttcattccactacactcctact

SEQ ID NO: 714113 - DNA, 614 bp, Homo sapiens
gctcatcactctttgagtctctaaatccccagaccaatgtcagatctgcacacaggattcttagtagtaaatgtagaaaacataaaaagtggttaagatcaaggactcaggcaccagattatctgtttgaatcctcaccttccattgatggttgcttgaccttgaacaaatgacttagattctctatgtctgtttctccatttataaaactgagataatggtaacaactacctcatggaattgctgggaggatatacataatgtgcttagagcagcggctggcacacagtaagcattcaatagtgttaattaaccaattatgacctttctaaatacagaggagcatgcaattacatcttgcttttaaaacacctattttttttwaaaaaaaatatggatttacaaggggtcattttttacttaacttttaggaaatgtctcataaatgtggtactgcttcatagcattataaaattaagtaaatcttttccatttcaaaaataaacttaccttgagtaagcatgctaaattctctcaggacacttaccttgagaataaaacatgtttatcacctgtcttaaacttcccccacttcattccactacactcctact

SEQ ID NO: 714114 - DNA, 1382 bp, Homo sapiens
agctggaattgaagcaattatgagaaaatattttcaaactaaatgaacaattcatacagataaaaatcaaaagtctttaaatcctttttttaagttctattctgacattcctcattatcccttgatatgaccttggctgtcagagggattgtcagtctcaaaagcacayttgttctcatagcagttccaaaaatgattcaaacatattcagatatattaatagcttgatattgatatttcaaaaattgtattttttaaatacaatctatctgagtagtttcatttgtggaatttctctgaaatgtttccggatggagtttgttttctcttgtaatatgtttaaaaatcatgagagaaacacattgccacatttcatcatgttggaagagactttattaatataaaacattgttattgttattgcttcatccatacacacacacatatgccatgtgaatatgtatatgcatgtgggagttatgtgtatgtatatgcttaatccatgagcaccaatgtatgcagtgggggtgtacatgtgtgtggatgtattatgcttactccatgcacatatatgtcatgtgtatatgtgtgtgtttgtatacaggatcttagtctaatgacaagcatagtcaaccgaaatatggcagttacaagatacccttcttagtatggcagtagggtggagaaaaatactttttggttctttttccttcaataactcatagatctttgctgctattcagttgcttgagtacgtcaataaatagatgcaaagcttcaataacaacaatagatgaatgaaggctaaagagaactagaaacactggccaacatgaaagcactaataaaaaaaattaccaaaacttattcccaatttaacctacagctattttccagccatagaaagaaaagtgcatataccatacactgaactgtttacctttattccacaatagacttgaaaaaaaagtttaaaaattgtattttgttgttttaagttttacatataaactcattaaagttttcaagccagtagggcttttcagttcactaatagttgcagacatgaaatatcctgaaggggtaagtatcaagtttttgtccttaatattgacattttcaatgatgatgtgaattttacttgctgtgttattgagcagtctggtatcattttcatgactaagtgaagattcttgaaataaagacataggattttaaattctgattttaaaaagctacacatatttatgaaatctatataacttttttcataattacacaatatacattaagtaaaaaatgctgacatttaaattgttctcataaaaacacaaatctattaaagagagactatggaaaatccttaagtgtcataataggct

SEQ ID NO: 714115 - DNA, 916 bp, Homo sapiens
aaaataattatwctgtttctgtctcttgttgggaaatgagagctgtactggaaaatgttaccattcatgcatttttggtattgctgttctctttcatgagtgtctcactagcttcccttcatctacagaaaatcacttggtagactagcaggtgtttattagattatgtcacctactttgtcataaatgtgcatcataattagactttaaatagggctgagtcaaggaggtgacaacaagatatcacaggagtttttgtttttgaaactcttaagtttttgtcagagggagagactttccacaagaaaaagatttatctgccaagtaaagaaaaatccatcttaaaatattttgctatactatggattttagtatatatgtttttcttctagtttctataaccaattatggtcctatatgaataataatggttttcatatttataacaaaatctaaaattagttatatttatcctactggcggtgcactgagaaaattctactacatttgagcttaaaaaataaataagccttaatgcctcaaatgtatataaactgactcataatttgatattcagcctttgaaagtggttttgggggtacacatttaaagatgtatgtaggccgggcatggtggctcacacctgtaatcccagcactttgggaggccgaggcgggtggatcacaaggtcaggagattgagaccatcctggctaacacagtgaaaccccatctctactaaaaatacaaaaaattagccaggtgtggtggcgggcgcctgtagtcccagctacttgggaggctgaggcaggaggatggcatgaacccgggaggtggagcttgaagtgagccaagattgcgccactgcactccagcctgggctacagatcgagactctgtctcaaaaaaaaaaaaaa

SEQ ID NO: 714116 - DNA, 916 bp, Homo sapiens
aaaataattatactgtttctgtctcttgttgggaaatgagagctgtactggaaaatgttaccattcatgcatttttggtattgctgttctctttcatgagtgtctcactagcttcccttcatctacagaaaatcacttggtagactagcaggtgtttattagattatgtcacctactttgtyataaatgtgcatcataattagactttaaatagggctgagtcaaggaggtgacaacaagatatcacaggagtttttgtttttgaaactcttaagtttttgtcagagggagagactttccacaagaaaaagatttatctgccaagtaaagaaaaatccatcttaaaatattttgctatactatggattttagtatatatgtttttcttctagtttctataaccaattatggtcctatatgaataataatggttttcatatttataacaaaatctaaaattagttatatttatcctactggcggtgcactgagaaaattctactacatttgagcttaaaaaataaataagccttaatgcctcaaatgtatataaactgactcataatttgatattcagcctttgaaagtggttttgggggtacacatttaaagatgtatgtaggccgggcatggtggctcacacctgtaatcccagcactttgggaggccgaggcgggtggatcacaaggtcaggagattgagaccatcctggctaacacagtgaaaccccatctctactaaaaatacaaaaaattagccaggtgtggtggcgggcgcctgtagtcccagctacttgggaggctgaggcaggaggatggcatgaacccgggaggtggagcttgaagtgagccaagattgcgccactgcactccagcctgggctacagatcgagactctgtctcaaaaaaaaaaaaaa

SEQ ID NO: 714117 - DNA, 916 bp, Homo sapiens
aaaataattatactgtttctgtctcttgttgggaaatgagagctgtactggaaaatgttaccattcatgcatttttggtattgctgttctctttcatgagtgtctcactagcttcccttcatctacagaaaatcacttggtagactagcaggtgtttattagattatgtcacctactttgtcataaatgtgcatcataattagactttaaatagggctgagtcaaggaggtgacaacaagatatcacaggagtttttgtttttgaaactcttaagtttttgtcagagggagagactttccacaagaaaaagatttatctgccaagtaaagaaaaatccatcttaaaatattttgctatactatggattttagtatatatgtttttcttctagtttctataaccaattatggtcctatatgaataataatggttttcatatttataacaaaatctaaaattagttatatttatcctactggcggtgcactgagaaaattctactacatttgagcttaaaaaataaataagccttaatgcctcaaatgtatataaactgactcataatttgatattcagcctttgaaagtggttttgggggtacacatttaaagatgtatgtaggccgggcatggtggctcacacctgtaatcccagcactttgggaggccgaggcgggtggatcacaaggtcaggagattgagaccatcctggctaacacagtgaaaccccatctctactaaaaatacaaaaaattagccaggygtggtggcgggcgcctgtagtcccagctacttgggaggctgaggcaggaggatggcatgaacccgggaggtggagcttgaagtgagccaagattgcgccactgcactccagcctgggctacagatcgagactctgtctcaaaaaaaaaaaaaa

SEQ ID NO: 714118 - DNA, 626 bp, Homo sapiens
acaaatgtggagaaagattttatttttagttgagcactgcattaaatgaaaattaattctttcaaacagtgtgtattatatattctaacatatatattatatgttatattgtatatattctaacatatattatataaagcatagcaataaatcaacaccaaaccaacttaactagaatattccaatatgttacatcttctctatcctgttgcatgcctgctccaaaggtaattatcctaggttttgtgttgtatattctactgccttttaaataatagttttggccgggtgtggtggctcatgtctgtattcccagcactttgggagacccaggcgggcggatcacctgaagtcaggagttcaggaytagcctggccaacatggtgaaactctgtctctacaaaaatacgaaaattagccaggcatgatggcaggtgcttgtaatcccagctactcagaaggctgaggtgagagaatcgcttaaacccgggaggcagaggttgcaatgagccaagatcatgccactgcactctagcctgggtgacagagcaagactatttctcaaaaaaaaaaaaaaaaaaaaaaaaacagtattagttttatcacagtcacatatttctaaacaa

SEQ ID NO: 714119 - DNA, 760 bp, Homo sapiens
ttagaatagagaaaagagggtctggcctcttaataaaaataaataaattaagcagtgtggaagcaagttatgaaamaaatactcagggccagtctccaggagggaaggctgactggctcacagataagacatgttatccgcaggttctgaaaggtcggggtgagggtgagtgcaataacaaattcttttctgtagcgcccatgatgcagtgctcagtgcctctcacatgcatccaatatacatgtcctagaatacacacctttgattctctgaaaagaggttgttcctatagaaaacataaatccttggaccccaactgctttgtctctgcctgggaggggtgactgtcaatctcttcaccccaggcatcgctggtcctcctacttctgtctgtatggaaaccgagtatgcttgcatgcacatgggtgtgcatgtgtgtgtgtgtgtgtgtgccttttaatgttcataaatggtagcacacacagtgttaggggttaaattgtatcctcccaaaattcatatgttgaagtctagccccagaagctacctcaaaatgaaatcttacttggcaatagggtcattgcagatgtaattagttaaggtgagatcatactggagtagagtgggctcctaacccaataggactagcgtccttataaaagagaatgtcatgtgagacgcctccatgcctgtgctgatccccctcatcctccccctgagcacagcttcactggaggaaatggacaagaggagtcagtgc

SEQ ID NO: 714120 - DNA, 639 bp, Homo sapiens
aactctgtcatatgtgcatctacttttccaactatgaattttatgaaatataaatgaaaattaactcaktccaatgaaaattcagtatccaaattgagatgtccttcaggtgtaaaatacactggatgtgattgactttgtatgaataaaacacattaagaaatgtattatgaacaattttatatcaattccatgccaaaatattttggatatatttggttacataaaatgtattgttaaaattaattttgcttatttttcttctttagtgtagctagaaaaattaaaattgcatatatggcttgcattgtatttccgttggtgagtactggtttacatcatttagaaagagaggtctttttgcatagagcagagttcagaatgatcttaggacttttaacatagaggaagatacatccattgccatacactaaacatatcttaggagataaatggctttggttgacccagttccttaatcagttatgccaataattttcccttggccacttgcttgtgaatattggcttcaagcttcaattttctaggattttgtcagttaagatttgctcttacttctcctatggcatccctctgtatgttgcatgtaattcttccctatgttgcctgtcgcaggta

SEQ ID NO: 714121 - DNA, 639 bp, Homo sapiens
aactctgtcatatgtgcatctacttttccaactatgaattttatgaaatataaatgaaaattaactcagtccaatgaaaattcagtatccaaattgagatgtccttcaggtgtaaaatacactggatgtgatwgactttgtatgaataaaacacattaagaaatgtattatgaacaattttatatcaattccatgccaaaatattttggatatatttggttacataaaatgtattgttaaaattaattttgcttatttttcttctttagtgtagctagaaaaattaaaattgcatatatggcttgcattgtatttccgttggtgagtactggtttacatcatttagaaagagaggtctttttgcatagagcagagttcagaatgatcttaggacttttaacatagaggaagatacatccattgccatacactaaacatatcttaggagataaatggctttggttgacccagttccttaatcagttatgccaataattttcccttggccacttgcttgtgaatattggcttcaagcttcaattttctaggattttgtcagttaagatttgctcttacttctcctatggcatccctctgtatgttgcatgtaattcttccctatgttgcctgtcgcaggta

SEQ ID NO: 714122 - DNA, 639 bp, Homo sapiens
aactctgtcatatgtgcatctacttttccaactatgaattttatgaaatataaatgaaaattaactcagtccaatgaaaattcagtatccaaattgagatgtccttcaggtgtaaaatacactggatgtgattgactttgtatgaataaaacacattaagaaatgtattatgaacaattttatatcaattccatgccaaaatattttggatatatttggttacataaaatgtattgttaaaattaattttgcttatttttcttytttagtgtagctagaaaaattaaaattgcatatatggcttgcattgtatttccgttggtgagtactggtttacatcatttagaaagagaggtctttttgcatagagcagagttcagaatgatcttaggacttttaacatagaggaagatacatccattgccatacactaaacatatcttaggagataaatggctttggttgacccagttccttaatcagttatgccaataattttcccttggccacttgcttgtgaatattggcttcaagcttcaattttctaggattttgtcagttaagatttgctcttacttctcctatggcatccctctgtatgttgcatgtaattcttccctatgttgcctgtcgcaggta

SEQ ID NO: 714123 - DNA, 639 bp, Homo sapiens
gtaatgtttcttaaggtaaataacaatgggttgggtgcggtggttcacgcctgtaatcccagcacttcgggatggtgaggtgggtggatgacttggggtcaggagttcgagaccagcttggccaacatggagaaaacacatctctactaaaaaatacaaaaattagctgggcatggcggcgcgtgcctgtagtcctggctactcgggaggctgaagcaggagaatcgcttgaaccccaggaggcggaggttgtagtgagccgagatcgcgccactgcaccaacctgggtgacagagcgagactcctcaaaaacaaaacaaaaacaaaaacaatgatggtttttaaaactgtatcaaaaatgctcttgcatcaaagcagctgcatcaggctgtcacaaatctagtagaatatggagttccagggagttccatcaggctggaaccaagctggctctgcccatgttgggggagtgtctcttaattgccggccaagcagtctgaaataaacttagcaactcatcttgtttaaggggcgtggaayggggggagtgcgatgcgagtgagaggagcgaccgcgactgcacacctgctgtataccaggcctcgtatctcatttagcctcaaaacaaccctgtgtgtt

SEQ ID NO: 714124 - DNA, 600 bp, Homo sapiens
attcctttttaaaagaaaataacttagaatgctgtaaagcattgtgagatctttcttccacagccttgaggttttatgtgagggaagattgggaagagagagggaatcactgagagagggtggggataaaaaaagaaggaggaagacaaggatgtgtgggcacagagaagactactgttttgaaggagaggcaggtggtctgcatcctgcagtccccaaggtaacttgcacccaaccctgtctctcaccagcatgcaggcctctccctgccctggcagcctccctcagggggcctcacttctccccccarccacaccccagctgcatttcctctctctgcgggtcacacgggataaatgaaacaaatctcccacaacagcgttcccaccacgaggcattttgtaaattactgtgtatataaatggaggctgtttagaaattgtatgtgattttcagctggagtaaatcttttctgtacttaatgccagcgttgctgtaaattgttttcctggggagaaaacagcaagcctgccacaccacaacctcaacaggcgttatttctttatttttttttaacttttagagtgacagctatgcagt

SEQ ID NO: 714125 - DNA, 600 bp, Homo sapiens
attcctttttaaaagaaaataacttagaatgctgtaaagcattgtgagatctttcttccacagccttgaggttttatgtgagggaagattgggaagagagagggaatcactgagagagggtggggataaaaaaagaaggaggaagacaaggatgtgtgggcacagagaagactactgttttgaaggagaggcaggtggtctgcatcctgcagtccccaaggtaacttgcacccaaccctgtctctcaccagcatgcaggcctctccctgccctggcagcctccctcagggggcctcacttctccccccagccacaccccagctgcatttcctctctctgcgggtcacacgggataaatgaaacaaatctcccacaacagcgttcccaccacgaggcattttgtaaattactgtgtatataaatggaggctgtttagaaattgtatgtgattttcagctggagtaaatcttttctgtacttaatgccagcgttgctgtaaattgttttcctggggagaaaacagcaagcctrccacaccacaacctcaacaggcgttatttctttatttttttttaacttttagagtgacagctatgcagt

SEQ ID NO: 714126 - DNA, 600 bp, Homo sapiens
attcctttttaaaagaaaataacttagaatgctgtaaagcattgtgagatctttcttccacagccttgaggttttatgtgagggaagattgggaagagagagggaatcactgagagagggtggggataaaaaaagaaggaggaagacaaggatgtgtgggcacagagaagactactgttttgaaggagaggcaggtggtctgcatcctgcagtccccaaggtaacttgcacccaaccctgtctctcaccagcatgcaggcctctccctgccctggcagcctccctcagggggcctcacttctccccccagccacaccccagctgcatttcctctctctgcgggtcacacgggataaatgaaacaaatctcccacaacagcgttcccaccacgaggcattttgtaaattactgtgtatataaatggaggctgtttagaaattgtatgtgattttcagctggagtaaatcttttctgtacttaatgccagcgttgctgtaaattgttttcctggggagaaaacagcaagcctgccacaccacaacctcaacaggcrttatttctttatttttttttaacttttagagtgacagctatgcagt

SEQ ID NO: 714127 - DNA, 608 bp, Homo sapiens
gggaagccagctgtcatgtcatgagggcactccagcagccctgtggagaggccaggtgacaaggagctaaggcgttggggcaagccaaggccttggaagcagctactctagccctggtgatgccctcacacgaccacagccctggctgacggctccttgtgagacgstaagccagaaccaccaaaccaagccacgcctggactcctgactctcagaaactgtgaaatgatcaacctttgctgcattacgctgctcccttttggagtaatttgttatgccacaataaataactaacacaagattaatttgaagaagttatcccaaatgcagcacagaaagacaaagaaatagacgtgaaatgacattaaatcagcattctagaaaaagtaatgggaaaaagaaacatttcaagtgctaagagctaagaattttctagaattgttgaaagatattgatcatcaagtccatggagccaagtcaatgctaagatgagtaatttttttacgtgcatttggacaccttataggaaaatggaagaataccagaagggaaaaaatgaagcagccagaatggagacagatcagtcataaaggaatagcaattacacc

SEQ ID NO: 714128 - DNA, 1378 bp, Homo sapiens
ctcaactaaaaataaaaaataaaagtttcaagatatatggtttattgagttgttggcaatttgaagtttaggaatgggttaggagtaggtaggaattttatgatcaatagagcaatcagtaacagctaaaatagccagaaggaaaatttaataattaaaagatttgcagtaacatagaacttaggagggtgatctccacagggccagacttagggaatggggtagggtgggtgaaagatggcttcacaggaagtggctaaagtatggagctagggtgtaaatattctagattaattggagtctttcacagagtaccgtcatgtgcatgtaacaatgttttggtcatggactgcattacaatggtgatcccatgagattatatttttactgtacatttcttatgtttagatacacaagtacttaccattgtgttacaattgcctacagtattcagtagagtaacatgctgtacaggtttgtggcctaggagcaatgggctataccatacagcttaggtgggtagtaagctataccatgcaggcttgtgtaagtgtgctctatgatattcacatgacaaaaaacaaacaacaaaacccccattgaaatatttctcagaaagtatccccgtccttaagtgatgcatgaatgtgctgcctccacagtatatattcaaaggtgaccttcattgcatagattcacacacaaaaaaagccatgtgaaaataccttgcccctagattcaggaatcttctggacacactcttgtttacaatttaaattatttccaaaaattgatatatctgtcgattaaatacaagtatttgtgcggcaggagaatagggtctggaagcagggaasctaggactgatttgtgctgatgggatatcagttgaaagactactccccttcaacccctcctttttctgcatggcagttgctgcctggcagttgcaagcccttctttttctgtgtggcagttgaaaaatgaaagtgcctcagattggtccccttcctcaaccaatcagacttgtggaagaccaatgggaaacctctagaaggtatttaaaccccagaaaattctgcaacctgtgcttttgagcagcttgccacagcctgcttccacgcagtggagtagtgtactttcatttaaaataaatctctgctttcgctgccttgctttatttgtgtgttttgtccaattatttgttcaaaacgccaaggacctagccaactaccctcaactgttaacagctgcacacacatatcaaggcacaccagcttcaccctgcctggagcttcttcccatgcctagttttctcttacaattccggtctctgctcaattatcacttctaaaagaggactttatagagaccacca

SEQ ID NO: 714129 - DNA, 2537 bp, Homo sapiens
taaatatcgttattatttctcttgtcatttcctcacagcttctatgatgttaatccttttctttcttaactcaaagccactccttttaatgccttcatctctaaaaattttatagcattctctcgccatttatttctaagcctgtaccatgcctcrtccttcactaatcttaaaaagccattttcataagcctattactttttacaggatctttttagtagataaaattctcaaaagtcttgtcatatgttattgacttaactttctcatcacttccttcattcttacctattataatctgaattctacttccttttgctattgcatctgttctcttgaaggttctagaaaaaggaagggatagttaattgagtaaggtcccaagaatataaaaagtaatagaagaataaataaaaagaatagttttttttttaaatctaggtacaagtaaaccttgaaaaggaaaaagtactgctgaaattatgggacatccctcagaacagagtgaagataagatgttggccaagctgtgcccagatcagaatattgccagtcaatgtgcaatgatgccatattgggcagtagtaccacagtatctgatctctgtggacccagcaaaaagaagcccaaagagccaatgtcttgactggaaattcatgaactttatatcatacaacaaagagaagctattatcactgtaagtgaaaaagtgtttttgttgttgttttttgtttgtttgtttgtttgtttgctttgagacagagtctagctctgtaaccaggctggagtgcaatggtgtgatcttggcttactgcaacctccacctcctgggttcaagcgattctcttgcctcagcttcctgagtaccttggactataggtgcatgccgccaagcccggctagttttttttttatttttttggcctcccaaagtgctggaattacaggcctgagccaccgtaccaggccaggagtggtatcttgtatacacatgatagaggacatgtctttattgtattaatttcaagtattctgattgtgtagagtgtggaagaaggaataaaagaaaggataagaaatgcatgcagtatttaaattgtgaatgagagatattagactgaaggctcccagtgtgtgaaagcctctattacttgctgtcctgaagctaggaatccaagtccaaaatctctttttgccagttttcaccatagtagctaagaacagggatggatatttttttttcttaaggactctaaatttattaaggtttcttgcctttctttccacctgtaccaggccagctttcccgggaggactccataggcattggtcccacaagtacatcaatctttgttctttaaaatatctgtactttaaaatacctgacttgataatcaccattctcagatatgatactccatattggagtggttgcataatctatatgtccaattattacctggtaagaaggagaacagtttcttaccaaatatatgcaaataactaccataaggtaacttgccgccaaaaaataaggagatttacttaaattttccaattctagcaggagagggtgtcatgagaatcagatattatttctaaaatgcttcactggaatttgtaaaatcagtgttgattagatagcttaagaagaaagagaagtagcttccttatatatctaaaaaaaaattgtaaaaacaaaatcaataatactccaaacagataaccataatacattttcccccattagtccatttagtcattaattgtcgtcctgtgggatcatgagttagcagtcacattatatcatctgcttcttgtctggaattgagttctgggtatcctgattcagtccactgatatgtttgaaagttgtctaaacgatatctgctcagaagtctgtcttcaagagtctgttatctggatagtcagtagtttaagtacctagtacagtctcttacttaagtctctaaaactgttttacttgttgaagaaaaaatctctgatttttggttttggcagagacttcaggcaagcatcaggttcaaatgaaaactgtctgtggatgatggttatttaaaatggctgtacttaacttattcctaataacagttaaatttgagaggtcgaatgagggttcaaaataagcataatgcaagtgacaaaaaaattgtttctgaggcatacaaaacaaacaacaacacacttccaaaatcaaagttagacaaaatattcctaaggtcaataattaagcctgttttcaagacattgaatatcacatctgatttacacaaatgtatgaacatgatttttattaagagaaaaactcaagatatgtgataaagtggttctgagacttaattttatagatcaagtatgtaaagcaaaaaagatgcaataagtccagagtagggcctagacatctgtatttctctcaaactccaagggtaagtctgatatgtatgcccaattgagaaaattgagaactagtgtctaacagatgttatatttgaattaaaaaggtattactatcatca

SEQ ID NO: 714130 - DNA, 588 bp, Homo sapiens
tcatgggcactttaacctacatgccttatatacagacctcacatttttcaactctctgttcaaatgtaacttcttcagagaaggcttccatgactatcccacgtaaaacaacttctccctcactstccatcccataactttttaaatttttcatggcactcatcacctactgctacataaattacttatctgttttaggtaagctctaaaagagtagagtccttgttcagtttcaccctctgcatacagaacacacttaataaatatttatgaaagggagacaatactgtgaaaggatatatgtttgaaagataaaagtataaaggggctttttaccaacgagtaatacaaatgatgaaaagatacttacttttcctttttttcttgtttgtgggcctctctcgtaatttgagctgcttttctactatatggatggatgacttttttttcccgtcctgcactttttccctttggtgctttgggctaaaatgtatgaaaacacatgacacatatagtcagatatgtaagtgccttcagtcccaaaaatattctttacaaataaattttaaaaacagtaatatgacagaa

SEQ ID NO: 714131 - DNA, 631 bp, Homo sapiens
tcattcctttgggctattratattttttatacatttatttcacagataatcttattctttctcatcatttcaaaccccctgaatattcataactattgaaaatattatctccaaaccttaaacactatattttatacaaatttcctgttatatgtctacttttgactatcaaagagatgattcatacacaactattctcaaactgcatatagatataaactcaccatcttcaacaactggttcctcttatattttataaccagtcattttacaaatagccaaagcgtcgtacatatatgttagtcctgagatcttattcattttaaacaaaattgcatagataagccattcacccttcctttcacagtcgtatagctggtattactggaggattactttcaatgtatatgtagaaactaaagttattaaagcactctaaactaaaaaatatgcttccaaaaatatattccatttttgtctttttatattttactggtttctcaaaagaatatgtgaataaagtcatctagttacaatgactgattatatctctctttataacatatgatgaatccagatgaatccacagtgactataaacaaacataaacaatgaacaagagacacaaaaa

SEQ ID NO: 714132 - DNA, 631 bp, Homo sapiens
tcattcctttgggctattaatattttttatacatttatttcacagataatcttattctttctcatcatttcaaaccccctgaatattcataactattgaaaatattatctccaaaccttaaacactatattttatacaaatttcctgttatatgtctacttttgactatcaaagagatgattcatacacaactattctcaaactgcatatagatataaactcaccatcttcaacaactggttcctcttatattttataaccagtcattttacaaatagccaaagcgtcgtacatatatgttagtcctgagatcttattcattttaaacaaaattgcatagataagccattcacccttcctttcacagtcgtatagctggtattactggaggattactttcaatgtatatgtagaaactaaagttattaaagcactctaaactaaaaaatatgcttccaaaaatatattccatttttgtctttttatattttactggtttctcaaaagaatatgtgaataaagtcatctagttacaatgactgattatatctctctttataacatatgatgaatccagatgaatccacagtgactataaacaaacataaacaatraacaagagacacaaaaa

SEQ ID NO: 714133 - DNA, 623 bp, Homo sapiens
ttgaggttgcttaaagagattgagacaatttatctgtcattgctatattattctcatccaacttctgtatacatcttatttaagtrataatagtcactggcctaattattatcgtataacataagatcaaatgtttgctatacctttcttgtttttcagttttcctattttttaatttcttttcattataatatgctgttatttaatcattcactggaaatatatactgaaattttccattttttatttttaaattataattcaaaagcaaactcataaattcatatctaacatttgataataaaatattactgaaatgaagcaaagatagaatctatatttattaagtaaactcttttaaagtctttgccaagttaatagctatactctgcacttatcaagtagagtatgtcaaaactcaaataagctacatattaaacatattcatattaactcttgctaagaaaaatataattgtgcatggtttaaaagcatttaatattatgtcaaatatttcaaatcactgtatgaaaaattgttgaagtttactcaattttaaatcacatgcaaatccgagaattaattataattgattttatggaacagtaaatcagaacttttaa

SEQ ID NO: 714134 - DNA, 604 bp, Homo sapiens
gacaaaggagtaataggtattttccttcttttccaggaatttaaaacatcttttaaagctctctgttcttcatagttaaacctaatttctcaagttatctttggtgacaaagagaatgctaaaagttgttctgtctcctaaatctaacaggtgctattctgcaatctgacatgtattttgttctttcataaacaaaaataaaatgcaataaagttcttgaaggtgcctcgtgaatcttataaatacattacattatctagacattctgaaaagcataaaggagtgatacaagtttattccactttcctagttggccattacaggatcatgggcatgtagctttacagttttctgatccctttcctaagataagacttgtgtaccgtgtcttaagtgtctgctaygatcttaatatgtctcccaaaattcatgtgttgggaacttaaaccctagggcaacagtgttgagagatgaggcctaatgggaggtgtttaattgataagggctccacctccatgaatggattaatgccactataaataggacttgtgggagcaggttcaccttttcttccaccatgggatggcacatcaagaaggccctc

SEQ ID NO: 714135 - DNA, 1456 bp, Homo sapiens
atgttgagccctagtgaagggaactcggggattaaatggagataattctttggaggcaaacttaacctgtggctgggtcacttctcaaaggttattatcactctctgaagtcagaaggccacacttgggaccctctgacccatgtcacaggaagtagaggggcaattctagtgcagttcacacacgtgggtatttaaacaaattatctcctctttgcactcccttctgtttttagaaggagtatgcagctaacactagagagtgtgctagactgaaacatgcacactttctctctccatgataggctctggctagtcctgccctaaaagacttcagcatgagagaagagagactgttttccaacagcgtttgtgtttcttggatgccattctgatcagctcttaccccccttacttccacacaagagggaggtgaatgaagccagtagctgggctcactactgagttgatctcatgagggtcgataacagaaagaggctattgctagagttgggcagttcctagttctctaaacttggtttcttgaatagaaattaatgtgaaactctgggccccgatgtaatgagatagtatagagaaccaagaaaaacctaggacaataagatgataacatttggcaaaaatgaaactggatgagagacctatgggaactcccatagaatttgtcataggctgttcttgcgttgctataaagaaatacctaagacttgggtaatttgtaaagaaaagaggtttaactggctcacagttcagcaggctgtacaggaagcatagctctagcatcagcttctggggaggcctcagtctcagaaagcttcgaatcatggtggaaggcgaagcaggggcagacacctcacatggcaaaagcaggggcaacagagagggcaggggtggggggagggtgccacacactttgaaataaccagatttcatgtgaactcggaagaagagctcacttatcaccaaggagatgtcctaagccattcatgagagatccacccmcgtgatccaaacacctcctaccaggccccacctccaacacgggggattacatctcaacatgagatttggaggagatatccaaactatactaaattctttacaacttttctgaaaatctaaaattgttccaaaataaaaaggttatttttaaaaccaaaccaaaacataaaaccacctgggagaacccaggtttgaatatcagatctgacactgatataaccggtgttacctgggccagttacttaaactttctcagcctctgtttcctcatatgtaatatgggagtaatttaagacttattcttcaagatgtttatgagaatcaaatgagataatacatgtaaaatgcttagcatagtgcctggcatataattacatgctcagtaaatatcagtactttgtattaagaagtaaatgctcagaagataaagatta

SEQ ID NO: 714136 - DNA, 965 bp, Homo sapiens
tatgatacaatatgaacctagaaaacataatgctaaacattaaaggcagtcacaaaaacatataaggtatgattccttatatacagaatcataccaatcattccccccattttgggggaaaatggagagttgacyactaacgggaaggggatttcttgttggggtgataaaatgttctaaaattggttgtggttatggctgtacaactctgtgactataattaaaaccagtgaattgtacacattaaaatggtgaattttatggaatataaattatatctcaataaagtcgttatttaaaaaaagaaaaagtgcttcagttgattctaacaagcaaccagggtagagaaccatacaaaacacttatacctcatacagtgtggtatcacttagaaagtagtaaaaaataagagtcagttaactatcaaggtccagattagcggttctccaccttggctacacgctgaaattaattagtaagctctaaacaaactgatgcctaggtcccatcaccaagagattttcatttaattactcatgtatgcaaatagtcattaggatttttaagagctcccccaatagttctaatgtgcattcaaggttgtacagccaagccactagtctagactatgtctaaagtttcttttggtactaaaattctaactatctgatctattgcactgggaactacaacaattctttctggcctcatgagtgctgcccaccaccacgacccccactacaacccccatcacaaccacctgcacatctgtctggtctcaaatgccacttaccatgggaaagccatccctgacctccaaggtaagttaggttgcccccattatacatccccatagcactctatatttcacctttctaacattcagcacacttcaatttacttgttcaatgcctatatttctaggacttccttccaagctcaataaggtaacaccccagaaattt

SEQ ID NO: 714137 - DNA, 1150 bp, Homo sapiens
gtttttaacccttgtcccctttctccttcccccctcagtagtccccagtttctgctattcccatctttatgtccatgagtacagaggaacagctttgaatagcaaagtgttaaactgaacttaaatgctagatggaaacacgagctgcctaggttatgcctgagaatgaagaattgttgttcctccatttgccagtttgaaagcaggaaccaagtcccaaggccaatggcactagagatccatggaatcttaaagaagtcttctgcgtataatcctctctagagtgaccaagtgcagagaatatgtttcagttttgcagcagccaggggagacagacctctcctgcaatccaataggcccccggtgcataatgtagcaaaggttattttgtgttcatccgctctgctatctgatgggcacagggatgcttagagatcagtgccaacagagaaggcacttattgaaggcaggctgctaagtcccaggtgctgaagccacggttgggtgcctggattagagcctcctctatgtgcccacgctgcaatttcagccataattggatgcagcagaaagctacttaccagcagagtgctgggctgcattctgcttcaggtcaaaggttgaagacaaactcctggaagagtagcgagaaatccatttaggagaagacattggcctgggtgaagctttattattcttaagcgctgaaacaaaaatctcatagcatcaacacccattagtttgactggggayagaaagtaagtagtaaaattaagatctagtgaaagatgttctttattattattatttttttaatggggagcagggaattgggatccatttttaaacaagccctctgtaatctttccccgtatttatggtaagagaggaaagaaaaatagccactttaattttttaaaattttctcaatgttaacatctctaaatataccaaacctggtcattttatgaagaaaacaaattatacagagtatatttcaaatgttctccaactaacctaaaaatgtgtctctagactgcaagaggtgctaaaacaacaaaatcaacaagatccattttgcttgtcttcacagctcgctttccccccttttttggttttgttttaaatttctggcttcaaaatccctgac

SEQ ID NO: 714138 - DNA, 1049 bp, Homo sapiens
ataggtgcatgccaccaaacccaactaagttttgtatttttagtagagatggggtttcaccatgttgtacaagctggtcttgaactcctgacctcatgatcagcccgtctcggcctcccaaagtgctaagattacaggtgtgagtcaccgcacttggcctaatttttctttcagaaatggtggtctccctatattgcccaggctggtcttgaacccactgggctcaagctatcctctcacctcaggctcccaaagtgctgggattacaggcgtgaaccactggccctgggcctgttcttgttatttattggaatctgcaayagcctcctcatggatttccttgattctactcttacattctcacagtctatcctgaccctgcagctggaggtgtggagacatacacatatgtattttattgttggtgttagtttggggacctctgatgcacagagttagattatttgcagtgttcagtttaggactgaagctcattgttgagccatgcatgggtaggctttatttatttgttcagttagctagttagttttaataaactttttaaactttaatgaactctcactaatctaccaccaaaaacaccagctaggagctgggcgcagtggcttacacctgtaattccagcactttgggaggctgaggcgagcagattgcttcaggtcagaagttcgagaccagcctggccaacatgttgaaaccttgtctctactaaaaatacaaaaattagccaggcatggtggtggacgcctgtaatcccagctactcaggaggctgaggcagaagaattgtttgaacccaggaggcggaggttgcagtgagccaagattgcgccactgcaccctagcctgggagacagagtgagactcagtctcaaacaaacaaacaaaaaaacaccagctaggaacttgagtacttacatgtaacatatgcttccttatgccattaccttagttttcctgactcaagatcaccatcatcctgtctcctatgttcatcacttccttgcttccctttttaaatcatattta

SEQ ID NO: 714139 - DNA, 1568 bp, Homo sapiens
taaacaactattaagtaagtaatactggacctcctaaatctgcaatatgatgctactttttccgcttagcaacatatacggttatctttccaaccacctccttggtctctatgctgtagttatgtttcccgtttagaagaaataagaaaaggttgacttagtgtcccgttgccaacagaggggtagatataacaaaacctattcacaattctgtattcctcacacattcaacatgaaagctatcaaggttatcttttctaaccccttagagaaaggctgtatgcctgtgcatmtatgtacacttacacacatgtagacattactcagctctgtgccttcaacaaacttcaggggtaaattgcaggctcttctaagaagcatggagatggaaatgtgccattttccatcagaagtgacaattaataaacacaactttgggaggcatacaactgtacaacaatgaagacttcagatccccagagagaaatggcatacattccgtagctcttagttcaaaacttgattttagacactgatatggtttggctgtgtccctaacaaatctcatcatgaattgtagcacccataactcccacatattgttggagggacctggtggcagaaaactgaatcatggtggtggtttccccaatactgttctcatggtagtgaataagtctcacaagatctgatggttttataaggggaaacccctttcacctggtcctcactgtctcttgtctgctgccacgtaagacgtgcctttcgccttccaccatgattgtgaggcctctccagctacatggaactgtgagtccactaaacctctttttctttgtaaattacccagtctcaagtatgtctttatcagcagcatgaaaacggagtaatacaaacactaactaaaaaacttttttaaagtttcaggaatattttcctagaaatacaacttcaatttcatatgcacgtaacacactcctttctagaaaatgtctttcactgaaaactgtgtagccaattttatagtcctcaaccatcaaacagaaatttgctgctacacattatactcttccttctgcatacaccactgacaagacccactctcctttaccaatcacttttgcttcctagcctaatcctagcagctggcataccctgtatcagcctgtaaaagtaagagaacactggagtcttcaatttacagttctctattctgcaaagaggctaagcttccaaggttaagcttatttaatatgctatcatcatcaccagccaataatttacattgaaaaggcacaggaaacaaattccctcagtgtctcatttatgagccaccagggataagcttaaaataaaggtgtgaacactaacagaaaaatcaacatggtccaggccaagagttgacttgggctgtcattaatatttatgagttatttaccaatgtaagtgagaggtacttaactacccccacccaaaggtactgagacggccaacttcaattgctggggaaatgtctaccttttatataaaaagcacactcaggaggaaagggtttgtctcacctaaaa

SEQ ID NO: 714140 - DNA, 1568 bp, Homo sapiens
taaacaactattaagtaagtaatactggacctcctaaatctgcaatatgatgctactttttccgcttagcaacatatacggttatctttccaaccacctccttggtctctatgctgtagttatgtttcccgtttagaagaaataagaaaaggttgacttagtgtcccgttgccaacagaggggtagatataacaaaacctattcacaattctgtattcctcacacattcaacatgaaagctatcaaggttatcttttctaaccccttagagaaaggctgtatgcctgtgcatatatgtacacttacacacatgtagacattactcagctctgtgccttcaacaaacttcaggggtaaattgcaggctcttctaagaagcatggagatggaaatgtgccattttccatcagaagtgacaattaataaacacaactttgggaggcatacaactgtacaacaatgaagacttcagatccccagagagaaatggcatacattcygtagctcttagttcaaaacttgattttagacactgatatggtttggctgtgtccctaacaaatctcatcatgaattgtagcacccataactcccacatattgttggagggacctggtggcagaaaactgaatcatggtggtggtttccccaatactgttctcatggtagtgaataagtctcacaagatctgatggttttataaggggaaacccctttcacctggtcctcactgtctcttgtctgctgccacgtaagacgtgcctttcgccttccaccatgattgtgaggcctctccagctacatggaactgtgagtccactaaacctctttttctttgtaaattacccagtctcaagtatgtctttatcagcagcatgaaaacggagtaatacaaacactaactaaaaaacttttttaaagtttcaggaatattttcctagaaatacaacttcaatttcatatgcacgtaacacactcctttctagaaaatgtctttcactgaaaactgtgtagccaattttatagtcctcaaccatcaaacagaaatttgctgctacacattatactcttccttctgcatacaccactgacaagacccactctcctttaccaatcacttttgcttcctagcctaatcctagcagctggcataccctgtatcagcctgtaaaagtaagagaacactggagtcttcaatttacagttctctattctgcaaagaggctaagcttccaaggttaagcttatttaatatgctatcatcatcaccagccaataatttacattgaaaaggcacaggaaacaaattccctcagtgtctcatttatgagccaccagggataagcttaaaataaaggtgtgaacactaacagaaaaatcaacatggtccaggccaagagttgacttgggctgtcattaatatttatgagttatttaccaatgtaagtgagaggtacttaactacccccacccaaaggtactgagacggccaacttcaattgctggggaaatgtctaccttttatataaaaagcacactcaggaggaaagggtttgtctcacctaaaa

SEQ ID NO: 714141 - DNA, 1668 bp, Homo sapiens
ccaccatcaaatttcataggaaagaacagtttgattgaaccacctagttaaactgtgtatgaaattagtcattctcaccataaacagtgttctgctgccttcccagacaaaagctaacagaatcaaggtagtaattggttaggaaacgacaggtcctaattctgcctgaatggtattcctgctctttttatcatttaactggaaatcctgaagtcatgtgcttcattttcttccagagtggcccaaccaagtgggcaaaaacctagttgttgaacccttttcctattaactagcaatgtgacctgtgaccatgggcaagttaccagacctcttcgaacctatgaaatcaggaatcagacttggtctcactttggtctaaagtaatgttagttgatggactctgcttctaattctgctccgtgaaaaggtttgcggtacaggagcacttgaatgagcctgttctctcagaccaaagataaagaatagagtgggagaaaaacataaagatatgatgatgaartcagctccttcctaataagccagtatcgtgggttagtcagtggaaaaaattaaagtctcaaaaatgagtgatctctaattttgtattaaagaaacactgaaccatttcatatgcctggtatctgcagccctttccatttcaaatagctgttttgatatttattaatttataatcataagggtctcctttctctctcctgctgaatttcagtggtttctctctgtctcacctgaatgttacaaaccctcgcctaccctgctgaccacaaggcatttcctggagagggtcttaggttgtaccaaatcatgcataaaagcctgtaattttgatgtgttaaggatttaggcataatagcttctggctgtgagctttctttattttcctttcagtagtgctgtcagttagtttatgaaaaactcttataaattctgatcatgtgatctttgtgggatattccacgtgctttggtagtgccaggctttttatttctatattgtttaatagtttataaatcatttccatgtggattatctcatcatatattcaaaactatcccatgaggtagatactatgtatcagccccactatacaggtaagaaagtaaaggcccaaggagctgaaatggctttgttgagtccctcagctagacaatggcagtgccagcatgaggacgcaggaaagggtagatgtaaagtgaggcctctggtacgcttgccacaaagcttaaaatagcaaaaatcataataacaataaaaagcaggatataggtcaactgaagctgctctgtgctcatctcagatggctttacctacaggcctaggggctcagctggacctttctgtctctatggtctgtctcggtccatggatctcttgtccttcagatatcctctcatccttcttcagagcatggtggcctcaggttacaggaaggtagagtctgtaaggccccatgatgccttggctctggggcttctgtaacatcacctccaccacattctatgggtcaaagtcacaaggacaacttagattcaaggagtgggaaaatagacattacttcttgatagtaggagctgcagaagacggtggccatggttttcagtctgccacaaatggttacgaagtgatagaatttggacacatttaata

SEQ ID NO: 714142 - DNA, 1668 bp, Homo sapiens
ccaccatcaaatttcataggaaagaacagtttgattgaaccacctagttaaactgtgtatgaaattagtcattctcaccataaacagtgttctgctgccttcccagacaaaagctaacagaatcaaggtagtaattggttaggaaacgacaggtcctaattctgcctgaatggtattcctgctctttttatcatttaactggaaatcctgaagtcatgtgcttcattttcttccagagtggcccaaccaagtgggcaaaaacctagttgttgaacccttttcctattaactagcaatgtgacctgtgaccatgggcaagttaccagacctcttcgaacctatgaaatcaggaatcagacttggtctcactttggtctaaagtaatgttagttgatggactctgcttctaattctgctccgtgaaaaggtttgcggtacaggagcacttgaatgagcctgttctctcagaccaaagataaagaatagagtgggagaaaaacataaagatatgatgatgaaatcagctccttcctaataagccagtatcgtgggttagtcagtggaaaaaattaaagtctcaaaaatgagtgatctctaattttgtattaaagaaacactgaaccatttcatatgcstggtatctgcagccctttccatttcaaatagctgttttgatatttattaatttataatcataagggtctcctttctctctcctgctgaatttcagtggtttctctctgtctcacctgaatgttacaaaccctcgcctaccctgctgaccacaaggcatttcctggagagggtcttaggttgtaccaaatcatgcataaaagcctgtaattttgatgtgttaaggatttaggcataatagcttctggctgtgagctttctttattttcctttcagtagtgctgtcagttagtttatgaaaaactcttataaattctgatcatgtgatctttgtgggatattccacgtgctttggtagtgccaggctttttatttctatattgtttaatagtttataaatcatttccatgtggattatctcatcatatattcaaaactatcccatgaggtagatactatgtatcagccccactatacaggtaagaaagtaaaggcccaaggagctgaaatggctttgttgagtccctcagctagacaatggcagtgccagcatgaggacgcaggaaagggtagatgtaaagtgaggcctctggtacgcttgccacaaagcttaaaatagcaaaaatcataataacaataaaaagcaggatataggtcaactgaagctgctctgtgctcatctcagatggctttacctacaggcctaggggctcagctggacctttctgtctctatggtctgtctcggtccatggatctcttgtccttcagatatcctctcatccttcttcagagcatggtggcctcaggttacaggaaggtagagtctgtaaggccccatgatgccttggctctggggcttctgtaacatcacctccaccacattctatgggtcaaagtcacaaggacaacttagattcaaggagtgggaaaatagacattacttcttgatagtaggagctgcagaagacggtggccatggttttcagtctgccacaaatggttacgaagtgatagaatttggacacatttaata

SEQ ID NO: 714143 - DNA, 2149 bp, Homo sapiens
ttatgaggtacatatgatattttgaattatgcatgcaatgtgtaaggatcacatcagggtaattaggaggctcatcacctcaaacatttgctatttctttgtgttagaacatttcaaatcctctcttctagttattttgaaatacacaataaattattattaactatcgtcaccctactgtgttgtcgaacactaggacttatttcttctattaactatatgtttgtacctccccttcctccatcctttttcttcttttgtcttttgtttctcttgccaagtgtttcctaaacattaggctggttaaataagaatgaccagggattgggttcacatttagattggtggctactgctcccagaggctcagatttggaaggtctatggtattcacacaaatgctgttctcagacacgacacgacagaagtgggcacctgttgtcagctcatttttagaggaggactctctgttttggagtctatatctggagataatttcagccagacgttgcacctagaagatgtccaaattattcacttggaaaaataccaaagtcaaataatgcagccttggtgcaagagcagttacagaaaactgctctccagggaatgaacatctggggctggatttggaatcagttgaggctacacgtgtgcttaaccgggcagaacacaacagtgtcctgatctcacgcacagggctgtttgcttgtgtcagctaccaggtcccccacaatagtgatgtgtcatttagtaagcaacaaagatcagttatagaagtaaattataaatgctagtgattaaaaagtaacagataagatgcatccatcacaaatgtgtctacatgtgggagagatggtgacatggacccacttttaaccagacagaaagatggaagaaggcagcttgcggggaaygaagcttgcccacagcgtgcgattttgccagtggtaactggcttttaaggtactgctgaagagatgagcacagaaaggtagctggagcagttgggagcaattgagactggctcacttgggttggaatcccagactcactctttcctacagccgggaatgtaagcaaatggctccacctttttcataaaatgagaataataatatgaacactctgaggctgccaggtgagcagttgggatgatgcactttggagacttctgacagctctacaaagttgcacatactcagtaaatattagttctgtccacctaccaactgcacttcaccaacaaaaggccaagtaataggagaggaaattaccaaaccagaagagatcaaaattgcctggaaaaatgagaataagggagggtttctgagatccattttgtgcctggcctggaattggacagtgtggtcctaaagtcaagtcaggcagagcctggcattaagtgggggaaacagagcttctctagtctaagcttctgtcttggaaggaaagcttgggaagaattgagcgatgtcttacaaaggtgctttgcagacccagagcacctgaggtcatcgtttttaatttgccagcctgaaacccagtgtgctcaaaggcagagactccctcaggaatcctctctctgcagaagaagatggatcaagaaggccttacgcttatcctagccacagccttccaagaacaaagggatcagtatcagcagcctacattgatcaaaccacaagcacttatggagtttcttctaggtgctttatcttcctagatataaagctgatcatgtcacttccttgcttagaggtgtccattgacttcccgtcacctacaggacacagcctgagtctcatagtcggtaggaaaagcccttccatctgaccacttgccactgcctgcctccaaatccctggtccccagatggccacagaggtgccacatgcccacacaccctacagtactgtcaaaactcctcgcacccaggagacaccctgctttctcaagcctctgtatctttaggtatatttttcctctgcttccattactgtcctttatttgtcacgaggcaggtctatatcaaacattgccacctgtgtcatgcctactctagcaacatccaggagagatgggccaccgtctcaaccagggatgattaattatagatccctcattctttcttatctcttcccctacga

SEQ ID NO: 714144 - DNA, 1352 bp, Homo sapiens
cattttagagcatgctgtgaacttcgaagaccacagcaattctgggaagcgaacttacacaatgtatagaatcacggttgcattaacaagtttaaattgtgttgctgatccaattctgtactgttttgtaaccgaaacaggaagatatgatatgtggaatatattaaaattctgcactgggaggtgtaatacatcacaaagacaaagaaaacgcatactttctgtgtctacaaaagatactatggaattagaggtccttgagtagaaccaaggatgttttgaagggaagggaagtttaagttatgcattattatatcatcaagattacattttgaaaaggaaatctagcatgtgaggggactaagtgttctcagagtgatgttttaatccagtccaataaaaatatcttaaaactgcattgtacagctccctccctgcgttttattaaatgatgtatattaaacaaagatcaatattttcttaatgactcagggtctttattgttaatgccaattgtttttgtatctgtgctataatcccttagagtcagtaaagtatgtaggggactgtttcttcctttgtgtctgggtttatgatttttctcactctttctttggactccagggtgtcagccatcaggtctcctaattttgtgtaccggtctccaacaaccccagctactgaatactgcttctaatctcctcattcattaacaaatctttatttttttatcttgtataaawtaactgctttattgacacaaaatttacataacttaaaattcaactttgtattgtgtacaattcagtgattttttgtatattcacagagctgtgcaaccatcaccacactcaaaaaattttcatcacccaccaaagaaatcttatactcttagcagtcgctccctgctctcccgtccatgccagttattaatttactttctgtctctaaggattttcattactctgaacatttcatataaatagaattatacaatatgtggcctactgtgacgtatttcacttagtataatggtttcaagttttatccatgtgtagaatgtatcagcacttcatttctttttatggcctgatagtattctgttgcatggttatactccattttgtttatctaatcacttggcttcattaacaaatatttattgaatccattccataaactaggttttgagttaagtactggggctatgaaagaaatggtctcatgaagcctcacgaagtttacattagttcaaaagcctagtcaccgagcttgaaagatttctatataaaggaaaaggaaataggctctgagttttattttgatctctttttaatttataactgggtata

SEQ ID NO: 714145 - DNA, 678 bp, Homo sapiens
gggactcaaatcaccttatgtgtccttattacctaatgtcagactccaaagaagaatgtcttcatcagacttaagcagcaygcagggtagtaggaaacaattgcacaggtgcctttgttgggaaacaaatatgaatgcaaatgagagtactaaatattgtggaagaggtggacagagggtgcctggccaagctgggggaagctgcttgatgcggttggtagaggctcccagaagacggggatggggaggagtattaattgtaaaagaatgagtcctggctctcaagaatccaattaaaatcattcaagattgttattgagtctaaagccaaaaagtgaaaattcacactccatcctagaattttgttgtggaaaaggatcatctggtccaacaataccactttacttaataaatgagaaagatgagtttggtaggatgggagccacagtcaaagtagaatgtatttcagctgcttgggaaaaagctggggtaggaggactttgtgtacacgtggtatcatcagcttgagaggatttctgagttggaggatgaagttgacagaacagagaactgggattgaacaaagcccagcatggaaggagtctggatctaggcagaagaaagaatgctggacaccaagcatggcaaaatgcaaatcattgtcaaagctggttgctg

SEQ ID NO: 714146 - DNA, 678 bp, Homo sapiens
gggactcaaatcaccttatgtgtccttattacctaatgtcagactccaaagaagaatgtcttcatcagacttaagcagcacgcagggtagtaggaaacaattgcacaggtgcctttgttgggaaacaaatatgaatgcaaatgagagtactaaatattgtggaagaggtggacagagggtgcctggccaagytgggggaagctgcttgatgcggttggtagaggctcccagaagacggggatggggaggagtattaattgtaaaagaatgagtcctggctctcaagaatccaattaaaatcattcaagattgttattgagtctaaagccaaaaagtgaaaattcacactccatcctagaattttgttgtggaaaaggatcatctggtccaacaataccactttacttaataaatgagaaagatgagtttggtaggatgggagccacagtcaaagtagaatgtatttcagctgcttgggaaaaagctggggtaggaggactttgtgtacacgtggtatcatcagcttgagaggatttctgagttggaggatgaagttgacagaacagagaactgggattgaacaaagcccagcatggaaggagtctggatctaggcagaagaaagaatgctggacaccaagcatggcaaaatgcaaatcattgtcaaagctggttgctg

SEQ ID NO: 714147 - DNA, 678 bp, Homo sapiens
gggactcaaatcaccttatgtgtccttattacctaatgtcagactccaaagaagaatgtcttcatcagacttaagcagcacgcagggtagtaggaaacaattgcacaggtgcctttgttgggaaacaaatatgaatgcaaatgagagtactaaatattgtggaagaggtggacagagggtgcctggccaagctgggggragctgcttgatgcggttggtagaggctcccagaagacggggatggggaggagtattaattgtaaaagaatgagtcctggctctcaagaatccaattaaaatcattcaagattgttattgagtctaaagccaaaaagtgaaaattcacactccatcctagaattttgttgtggaaaaggatcatctggtccaacaataccactttacttaataaatgagaaagatgagtttggtaggatgggagccacagtcaaagtagaatgtatttcagctgcttgggaaaaagctggggtaggaggactttgtgtacacgtggtatcatcagcttgagaggatttctgagttggaggatgaagttgacagaacagagaactgggattgaacaaagcccagcatggaaggagtctggatctaggcagaagaaagaatgctggacaccaagcatggcaaaatgcaaatcattgtcaaagctggttgctg

SEQ ID NO: 714148 - DNA, 678 bp, Homo sapiens
gggactcaaatcaccttatgtgtccttattacctaatgtcagactccaaagaagaatgtcttcatcagacttaagcagcacgcagggtagtaggaaacaattgcacaggtgcctttgttgggaaacaaatatgaatgcaaatgagagtactaaatattgtggaagaggtggacagagggtgcctggccaagctgggggaagctgcttgatgcggttggtagaggctcccagaagacggggatggggaggagtattaattgtaaaagaatgagtcctggctctcaagaatccaattaaaatcattcaagattgttattgagtctaaagccaaaaagtgaaaattcacactccatcctagaattttgttgtggaaaaggatcatctggtccaacaataccactttacttaataaatgagaaagatgagtttggtaggatgggagccacagtcaaagtagaatgtatttcagctgcttgggaaaaagctggggtaggaggactttgtgtacacrtggtatcatcagcttgagaggatttctgagttggaggatgaagttgacagaacagagaactgggattgaacaaagcccagcatggaaggagtctggatctaggcagaagaaagaatgctggacaccaagcatggcaaaatgcaaatcattgtcaaagctggttgctg

SEQ ID NO: 714149 - DNA, 1426 bp, Homo sapiens
tgacctcgttcatcttcgaccacatggtaaggttttttgaataaaatcagtcctccctgctctagaatgttctgtatttttctctatcatatcaccctgtgacacttcattgcatggatattgttctgtgactgcctcccccagtagactgagttcctggagggcagcgaccatgtctgactcattggtgtatatctagagcttatcatcatgctattaggtgctcaataaacatttcttgattgcaggaataaaggcatgaatgggcaatgggtcaataattgggtgaatactcagctattatttgtgaaataaacaacagatgtagaaactcttagaaaatctagggtaggaagatatttaggagggctcatcacccaataaccagtattgcagagattgtagcccacaagtgattaggttcaggagctgaccatttatagtttttctctctaaaaggaaccaccraagcccttgtctcctatggggcatggagcgggcaggggagtagtgcttagctgccacaatcagatagcctcacatttgtacagaattttctaactttcacaatgcgttttactttgcagtccttcatttgatagcctgtgcaattggaaggacattcccaattcttctgatagagccacttcggcaccttgctcacactcatgcaactagcacaaggagatcaagtctcaaagtggctttcaacaagtccttctggaggttcactgtgtaccacacatggtgctaagtccagtgtgtttggtttttgttgttgctgctacaacaattactataaacttagtggcctaaaacagcacagatttattctcttacatttctggagatgggaagtctgaaatcactttcacagggctaaagtgaagaaatcatcagggttccattttatctggaggctctgagggggagaattcatttccttgtcttttacaggtcatagtggctgcctgtgttcctcgacttatgaccccttccttcatcttcaaaactcctcactccaatatctgctgctgtcatcacattgcccattgccttttcctctgactctgactcctctgtgtccctcctatttggattcttgtggttacacggggcccaccaggataatcctggataacatccgcatctcaagatccttcacttagtcacatctgcagaatccccttaccgggcaaagtaacatattcagaggttctggggattctaaaatgaacatatttaggggccattattcagcctaccacatccagtaagcaagtaagtctgcgcatcctgaagcccgtacatgggctcctctatgacccctaaccagataccaagggcttgggtcttcatctcagcagttgacttatttcttctttatgtgccacacgcaggtttgccaaaatcaaaagtagtgatc

SEQ ID NO: 714150 - DNA, 642 bp, Homo sapiens
agcttcttacctggagtaagaagcttcaagagaagagtaggtaagtccactgctttgcagtgaagcagcagagaacttgaacaccagctgaggtggtacttcttgggattcagtctggaattgtggagaacagaaaaggaagtggacagtggccattgaggagagaggttaagagcatgaataggctgggtgtggtggctcacgcctgtaatcccagtaccctaggaggccaaagcaggagggtcacttgagcttgtaagttcgagaccagcgtgggcaacataacaaaacccagtctctacagaaactacaaaaaattagctgggtgtggtggtgtgctcctgtagtaccagctactcaggaggctgaggtgggaggatcacttgagcctgggaggttgaggctgcagtgagtcatgatagygccactgcactccagcctgggtgacagagaaagaccgtagcccaccgccctcccacacacaaattgcatggatgctggaggagccaggttcatggatttaaaatatgtttctgtacttactagctgtgtgaccttggacaagtttttcaacctctttgtgcctcagagtaagatgggaataataagcgccttccacatagaattgttaggaggactaaa

SEQ ID NO: 714151 - DNA, 642 bp, Homo sapiens
agcttcttacctggagtaagaagcttcaagagaagagtaggtaagtccactgctttgcagtgaagcagcagagaacttgaacaccagctgaggtggtacttcttgggattcagtctggaattgtggagaacagaaaaggaagtggacagtggccattgaggagagaggttaagagcatgaataggctgggtgtggtggctcacgcctgtaatcccagtaccctaggaggccaaagcaggagggtcacttgagcttgtaagttcgagaccagcgtgggcaacataacaaaacccagtctctacagaaactacaaaaaattagctgggtgtggtggtgtgctcctgtagtaccagctactcaggaggctgaggtgggaggatcacttgagcctgggaggttgaggctgcagtgagtcatgatagcgccactgcactccagcctgggtgacagagaaagaccgtascccaccgccctcccacacacaaattgcatggatgctggaggagccaggttcatggatttaaaatatgtttctgtacttactagctgtgtgaccttggacaagtttttcaacctctttgtgcctcagagtaagatgggaataataagcgccttccacatagaattgttaggaggactaaa

SEQ ID NO: 714152 - DNA, 578 bp, Homo sapiens
gaattccccccaaggtgttgattatccatcccaacccagcctctggcttccctcccacctccaccccagctcccacaggcccctcgccccsttcatcggctgggcgctcgagacggcgcccccagatctcccaccgggcagtgtccccagctgcagctgaggagagaagcgccggcgtgcgcggtgccacgtcggaattggctctggggacgccgcagctgccgaagcgcagcgcgcggtccccacgcacgccctgcctccgggcggccggcgggctggcccggcgaggagaggagggatgcgcgccctcctcccgctcctatctgcgggtgccaccgcctgcgtcagggacccctggcccgagtaagcccagactgacgagcctgacactttaatggggtgcgggaagtgcaaaggaggggaggcccgggaaaggggggagtggccgagaggggatggtagctgcgaggaggtagagaaggaccctccttctccagggtcccagcttgtcggagctggaagcccagattgcttaaccctttgcattcccagcaagaagcgactttttcacttagaag

SEQ ID NO: 714153 - DNA, 642 bp, Homo sapiens
acagtgacctgaaatattccctgatcttcagtctgttggaaatttttaaacttccaacttttctatcgaaactggcttaaaaattttaaaacaattataaggatgtcttccttctccctggcctgttggaggaccttcatccttcaccaaaacgcgccagtgtaacgtaccttgttcagctcttggtcataaagtcgtcctcagcctgtctgtgtggtcccggagggtcggtggcgggcagtttccaaaattgaggtaataagagatcagatgaatttgagacgaccggccaaaaaaaataagaaatttaaaaacaacatttaaraaggataggggagtcttaaatgtttgattcttccccactttaaaaaataatttcactaatattctctttatgtttccgttgcacttcagtctaattcttaaaaaaattatgctttaaaaataaattaacttttcttttttcttttcttttcttttttttttttttttttttttgtgcttcagtctttctgcccccgataacagaaaatctctttttcgtcttaaaaaaaaaaaaaaaaaaaaaaaaagcctgtggaagactcagcagaacccaggaagcgcagaattgggagaaaagtctttggctggggctgtttc

SEQ ID NO: 714154 - DNA, 640 bp, Homo sapiens
agatttaatttgtcatgtgacccattaacatatatgtatgtaagcgctgaactgtgtatttagaaagcaattttagtaaattgaactattttttagacctggaaactcagcaaaattgagacttttagttcagcatgaaataaacactctaagagcccaggaaaaacatggccttcaacctgctctgcttgtacattgggcaaaatgccttcagaaaatggtgagttttaaagtataagcattttaaaagaacattaccttaattttttaaaatcatgaactttttattgaaagtttttttgttctgaaaacagcagctttgtcatattatgacagatgtgttttttattgctgcaaaatagttaatgtagttaaatataagcacttagaggagcaatgcctggcacacagtgaatgttacatattagctgagctgttactgttattccttaataattaagttctgataattattyagcctgaaaattaaaaaaaaattagcacaaggctttgtaggtaagaccattatagatctttctaaatatttaaggtgtgttttgtgtcaccattaggtgtagatggtcagccttttgaacaaactgacactacagaagaggcaggtttcagctatctaaaaatg

SEQ ID NO: 714155 - DNA, 2974 bp, Homo sapiens
tatatgggtgactagagcatcggcttttaattctatcaccactttcttaattggtggtggaaatgtaatttgatacaacctctttagggttagatatttggcaacagctctaaaaattataaatgcacagatatactttgatactgcaattctttcaggaattcatggcacaagttaatcattgctaaattacttgaagtagcatttaaaaaaaaaagtaaaagcaagctaatgtcctggctttaggaccctggttttaaaaactccaaaactacagtacatccatacaatggaataatatgcaagcatccaaactaatgagaataccctttatatatactgacatggaaacatctccaagatacagttaatggaaataaagtaaatgcaatgttcaaacgttttcctccttcttttaaagacaggggatatatgtgtgtttacttggagatgcataaaacatttcctgaagaacacacaagaaagcaataacattagtttctttgggggtggagaaagtaaataactagggaacagaaaggagtcttcatagcatattcttaagagcctccagaattttaaaccatgtatatataattctttccaaatatgctcatttttcaaaatatatgatttatgaacctaaaagcttctgattttgaattttagaaatattcgtatcgcctatccttttactcacaagttttctaaacatcatgtcaaagtttgtcatctatatgttgaaaagagcacacaaaataagaaacaaaatgttgacatcattctttttgttttcaaactgacctcaattcataaacccggcctcttttacaaaattattcaayagttgaatttgtgaccagttaattagttgtgaatccactcaatcaaatcatctcaattcactatttcctttttttttttttttgagatggagtctcgctctgttgccaggctgcagtgctgcagtgctgcagtggcacgatctcggctcactgcaacctccgcctcctggtttcaagcaattctcctgtctcggcctctcaagtagctgggactacaggcacccgccaccatgcgtggctaatttttctatttttagtagagatggggtttgaccatgttggtcaggatggtctcaaactcctgacctcaagtgatccgcccgcctcagcctcccaaagtgctaagattataggcgtgagccaccacgcctagctatttcctcatcttaactaaaaggtttcaagatactttgtcaactacctagctgcaatgcagatgtacttactagaaccacagtattcctctgattaagagtctgaaaatcttgccataaaagttagccaattcttacatacccaaatgccagcacataacctacattttatgcttataatcatttgatcattaagctttaaaataaactgataaaataaaatacaagcatctaagatgtttctattatatattcattctacagaaatatgtggtagttaataaagactgaggtaggtatctctgtgctgaagtggaacaatgaagaaacatttagaaaagcaaggcatctggcaataggtaaagcacacccacattgaggcacaatattttttaaaagcagagaaagaatgtattgcacatttgcatatgcaaaaaatatttctgaacacccaagaaactcctaacagtagctgtcatctaggaaaggagacctgagtgaatggattaagagggaaactaacttattatgattaaaagttcacagtcaggtgtggtggctcatacctgtaatctcagcactttgggagggcaaggcagaaggatcacttgaagccaggagttcaagaccaaccagcctgggaaacatagcaagaccttgtctttacaaaaaatttaacaatgtagccaggcatggtggcaggcacctgtagtcccagctaccgagctgaggctgaagcaggagaggatcacctgagcccaggagttcgaggatgcagtgagctatgatcatgccactgcactccagccacagcacctcccaaaactacatatcaaaaaattgtaggctgtgcgcagtagctcacacctataatcccagcactctgggaagctcgagcccagttcaatgttacggtgagctacgattacgcaactgcactccagcctgggtgacacagcaagactctaatagacacacagacagataaattttaaagtttccattaaaaataagaactattggcagggcgcggtggctcacgcctgtaatgccagcactttgggaggccaagatcatgaggtcaggagatcgagaccatcctggctaacacggtgaaaccccatctctactgaaaatacaaaaaaattagccaggcgtggtggtgggtgcctgtagtcccagctactcgggaggctgaggcaggagaatggcgtgaacccaggaggcggagcttgcagtgagccgaggtcgtgccactgtgctccagcctgggcgacagagtgagactccgtctcaaaaaaaaaaataaaataaataaaaataagaactatcagttacttgagaatttctataagaaccttttaatgtttgtattacctagtgaacctcactaaatccattaattttcactaatccattccttatgaacacagaagtttctactgagcaaatattagcacttaacatgtgaactgtctatcaacggtgtttttaaaagatttacaggccgggctcaatggctcatgcctgtaatcccagcacttcgagaggccgagtcaggtggatcacgaggtcagaagatcgagaccatcctggctaacatggtgaaaccccatctctattaaaaaatacaaaagattagccaggcatggtggtgtgtgcctgtaatcccagatacgtgacagactgaagcaggagaatcacttgaacccaggagacacaggttgcagtgagctgagattgcgccactgcact

SEQ ID NO: 714156 - DNA, 2974 bp, Homo sapiens
tatatgggtgactagagcatcggcttttaattctatcaccactttcttaattggtggtggaaatgtaatttgatacaacctctttagggttagatatttggcaacagctctaaaaattataaatgcacagatatactttgatactgcaattctttcaggaattcatggcacaagttaatcattgctaaattacttgaagtagcatttaaaaaaaaaagtaaaagcaagctaatgtcctggctttaggaccctggttttaaaaactccaaaactacagtacatccatacaatggaataatatgcaagcatccaaactaatgagaataccctttatatatactgacatggaaacatctccaagatacagttaatggaaataaagtaaatgcaatgttcaaacgttttcctccttcttttaaagacaggggatatatgtgtgtttacttggagatgcataaaacatttcctgaagaacacacaagaaagcaataacattagtttctttgggggtggagaaagtaaataactagggaacagaaaggagtcttcatagcatattcttaagagcctccagaattttaaaccatgtatatataattctttccaaatatgctcatttttcaaaatatatgatttatgaacctaaaagcttctgattttgaattttagaaatattcgtatcgcctatccttttactcacaagttttctaaacatcatgtcaaagtttgtcatctatatgttgaaaagagcacacaaaataagaaacaaaatgttgacatcattctttttgttttcaaactgacctcaattcataaacccggcctcttttacaaaattattcaacagttgaatttgtgaccagttaattagttgtgaatccactcaatcaaatcatctcaattcactatttcctttttttttttttttgagatggagtctcgctctgttgccaggctgcagtgctgcagtgctgcagtggcacgatctcggctcactgcaacctccgcctcctggtttcaagcaattctcctgtctcggcctctcaagtagctgggactacaggcacccgccaccatgcgtggctaatttttctatttttagtagagatggggtttgaccatgttggtcaggatggtctcaaactcctgacctcaagtgatccgcccgcctcagcctcccaaagtgctaagattataggcgtgagccaccaygcctagctatttcctcatcttaactaaaaggtttcaagatactttgtcaactacctagctgcaatgcagatgtacttactagaaccacagtattcctctgattaagagtctgaaaatcttgccataaaagttagccaattcttacatacccaaatgccagcacataacctacattttatgcttataatcatttgatcattaagctttaaaataaactgataaaataaaatacaagcatctaagatgtttctattatatattcattctacagaaatatgtggtagttaataaagactgaggtaggtatctctgtgctgaagtggaacaatgaagaaacatttagaaaagcaaggcatctggcaataggtaaagcacacccacattgaggcacaatattttttaaaagcagagaaagaatgtattgcacatttgcatatgcaaaaaatatttctgaacacccaagaaactcctaacagtagctgtcatctaggaaaggagacctgagtgaatggattaagagggaaactaacttattatgattaaaagttcacagtcaggtgtggtggctcatacctgtaatctcagcactttgggagggcaaggcagaaggatcacttgaagccaggagttcaagaccaaccagcctgggaaacatagcaagaccttgtctttacaaaaaatttaacaatgtagccaggcatggtggcaggcacctgtagtcccagctaccgagctgaggctgaagcaggagaggatcacctgagcccaggagttcgaggatgcagtgagctatgatcatgccactgcactccagccacagcacctcccaaaactacatatcaaaaaattgtaggctgtgcgcagtagctcacacctataatcccagcactctgggaagctcgagcccagttcaatgttacggtgagctacgattacgcaactgcactccagcctgggtgacacagcaagactctaatagacacacagacagataaattttaaagtttccattaaaaataagaactattggcagggcgcggtggctcacgcctgtaatgccagcactttgggaggccaagatcatgaggtcaggagatcgagaccatcctggctaacacggtgaaaccccatctctactgaaaatacaaaaaaattagccaggcgtggtggtgggtgcctgtagtcccagctactcgggaggctgaggcaggagaatggcgtgaacccaggaggcggagcttgcagtgagccgaggtcgtgccactgtgctccagcctgggcgacagagtgagactccgtctcaaaaaaaaaaataaaataaataaaaataagaactatcagttacttgagaatttctataagaaccttttaatgtttgtattacctagtgaacctcactaaatccattaattttcactaatccattccttatgaacacagaagtttctactgagcaaatattagcacttaacatgtgaactgtctatcaacggtgtttttaaaagatttacaggccgggctcaatggctcatgcctgtaatcccagcacttcgagaggccgagtcaggtggatcacgaggtcagaagatcgagaccatcctggctaacatggtgaaaccccatctctattaaaaaatacaaaagattagccaggcatggtggtgtgtgcctgtaatcccagatacgtgacagactgaagcaggagaatcacttgaacccaggagacacaggttgcagtgagctgagattgcgccactgcact

SEQ ID NO: 714157 - DNA, 2974 bp, Homo sapiens
tatatgggtgactagagcatcggcttttaattctatcaccactttcttaattggtggtggaaatgtaatttgatacaacctctttagggttagatatttggcaacagctctaaaaattataaatgcacagatatactttgatactgcaattctttcaggaattcatggcacaagttaatcattgctaaattacttgaagtagcatttaaaaaaaaaagtaaaagcaagctaatgtcctggctttaggaccctggttttaaaaactccaaaactacagtacatccatacaatggaataatatgcaagcatccaaactaatgagaataccctttatatatactgacatggaaacatctccaagatacagttaatggaaataaagtaaatgcaatgttcaaacgttttcctccttcttttaaagacaggggatatatgtgtgtttacttggagatgcataaaacatttcctgaagaacacacaagaaagcaataacattagtttctttgggggtggagaaagtaaataactagggaacagaaaggagtcttcatagcatattcttaagagcctccagaattttaaaccatgtatatataattctttccaaatatgctcatttttcaaaatatatgatttatgaacctaaaagcttctgattttgaattttagaaatattcgtatcgcctatccttttactcacaagttttctaaacatcatgtcaaagtttgtcatctatatgttgaaaagagcacacaaaataagaaacaaaatgttgacatcattctttttgttttcaaactgacctcaattcataaacccggcctcttttacaaaattattcaacagttgaatttgtgaccagttaattagttgtgaatccactcaatcaaatcatctcaattcactatttcctttttttttttttttgagatggagtctcgctctgttgccaggctgcagtgctgcagtgctgcagtggcacgatctcggctcactgcaacctccgcctcctggtttcaagcaattctcctgtctcggcctctcaagtagctgggactacaggcacccgccaccatgcgtggctaatttttctatttttagtagagatggggtttgaccatgttggtcaggatggtctcaaactcctgacctcaagtgatccgcccgcctcagcctcccaaagtgctaagattataggcgtgagccaccacgcctagctatttcctcatcttaactaaaaggtttcaagatactttgtcaactacctagctgcaatgcagatgtacttactagaaccacagtattcctctgattaagagtctgaaaatcttgccataaaagttagccaattcttacatacccaaatgccagcacataacctacattttatgcttataatcatttgatcattaagctttaaaataaactgataaaataaaatacaagcatctaagatgtttctattatatattcattctacagaaatatgtggtagttaataaagactgaggtaggtatctctgtgctgaagtggaacaatgaagaaacatttagaaaagcaaggcatctggcaataggtaaagcacacccacattgaggcacaatattttttaaaagcagagaaagaatgtattgcacatttgcatatgcaaaaaatatttctgaacacccaagaaactcctaacagtagctgtcatctaggaaaggagacctgagtgaatggattaagagggaaactaacttattatgattaaaagttcacagtcaggtgtggtggctcatacctgtaatctcagcactttgggagggcaaggcagaaggatcacttgaagccaggagttcaagaccaaccagcctgggaaacatagcaagaccttgtctttacaaaaaatttaacaatgtagccaggcatggtggcaggcacctgtagtcccagctaccgagctgaggctgaagcaggagaggatcacctgagcccaggagttcgaggatgcagtgagctatgatcatgccactgcactccagccacagcacctcccaaaactacrtatcaaaaaattgtaggctgtgcgcagtagctcacacctataatcccagcactctgggaagctcgagcccagttcaatgttacggtgagctacgattacgcaactgcactccagcctgggtgacacagcaagactctaatagacacacagacagataaattttaaagtttccattaaaaataagaactattggcagggcgcggtggctcacgcctgtaatgccagcactttgggaggccaagatcatgaggtcaggagatcgagaccatcctggctaacacggtgaaaccccatctctactgaaaatacaaaaaaattagccaggcgtggtggtgggtgcctgtagtcccagctactcgggaggctgaggcaggagaatggcgtgaacccaggaggcggagcttgcagtgagccgaggtcgtgccactgtgctccagcctgggcgacagagtgagactccgtctcaaaaaaaaaaataaaataaataaaaataagaactatcagttacttgagaatttctataagaaccttttaatgtttgtattacctagtgaacctcactaaatccattaattttcactaatccattccttatgaacacagaagtttctactgagcaaatattagcacttaacatgtgaactgtctatcaacggtgtttttaaaagatttacaggccgggctcaatggctcatgcctgtaatcccagcacttcgagaggccgagtcaggtggatcacgaggtcagaagatcgagaccatcctggctaacatggtgaaaccccatctctattaaaaaatacaaaagattagccaggcatggtggtgtgtgcctgtaatcccagatacgtgacagactgaagcaggagaatcacttgaacccaggagacacaggttgcagtgagctgagattgcgccactgcact

SEQ ID NO: 714158 - DNA, 618 bp, Homo sapiens
atctatcatttatccatctatttctctatcatctattgttaaaactttaggttcacactgacacatccaagttgaacctaacactagagggttcattttacattttaccttcccaggtattcttgtttcttccttccttctttgacattatcttcagtctattttcattttcttcagtctccctgcatacaacctagctcctgtgactggctgccaccaccacccacccctgccaaatggatgccctcctcatgtggccacccactccgagtgcagtttctcttttccatcaacctcygacattctatgcagaattgcttctgcctttcccactgccaccatcactcttctgggagggcagtcctctgcaagcccacttgggatccaatattctatgttgttctatcatcgggctggcacacatatccacttcatcctgtttatgttccagcagtccacactgggccatgctgggcctttcaagcatgcgtgcctggtggcttatgaacctaattattcagggaggaagaaaggagcacagacaggcagaaagggagaaagggtaataggaagaaagagaattttaaatgatcaggaaagtcagaacctaagaggtcc

SEQ ID NO: 714159 - DNA, 603 bp, Homo sapiens
gtctaagtccttgcatttttaaaagkcactgctgtcatttccaaaatataaaagaggcttaagttggatccaggaagctttcatgctccttgctgtggggaaaacttaggaatagcagtccaggtgatcagaactctttagatacatatcactgctctcactgctttctgcctcctcaaatccctaaactcagtaatgatcctaacttagaatcagaataaacattggtactatgagagctccttctcctgctcctagacctaattactactcctatcatttgcatttgtcctctgtgtgagtatcatacacacgatcatgcatcagcacacatatgcacacagattcccacttaaagtgtaagccccagggacttttgtcacgttggtcatagaaatatccctaatagatagaatggagtgcctcccacttagtgagagcccgataaatagcatgggtcatcatatagttctatatttttgtctcctatataaccactttgtagttaggaagtgattgcttctctctgtggagaagactggcttcccaacaaccacctgctgacccttccataagctttgcatatggatagaagtcaactga

SEQ ID NO: 714160 - DNA, 603 bp, Homo sapiens
gtctaagtccttgcatttttaaaagtcactgctgtcatttccaaaatataaaagaggcttaagttggatccaggaagstttcatgctccttgctgtggggaaaacttaggaatagcagtccaggtgatcagaactctttagatacatatcactgctctcactgctttctgcctcctcaaatccctaaactcagtaatgatcctaacttagaatcagaataaacattggtactatgagagctccttctcctgctcctagacctaattactactcctatcatttgcatttgtcctctgtgtgagtatcatacacacgatcatgcatcagcacacatatgcacacagattcccacttaaagtgtaagccccagggacttttgtcacgttggtcatagaaatatccctaatagatagaatggagtgcctcccacttagtgagagcccgataaatagcatgggtcatcatatagttctatatttttgtctcctatataaccactttgtagttaggaagtgattgcttctctctgtggagaagactggcttcccaacaaccacctgctgacccttccataagctttgcatatggatagaagtcaactga

SEQ ID NO: 714161 - DNA, 603 bp, Homo sapiens
gtctaagtccttgcatttttaaaagtcactgctgtcatttccaaaatataaaagaggcttaagttggatccaggaagctttcatgctccttgctgtggggaaaayttaggaatagcagtccaggtgatcagaactctttagatacatatcactgctctcactgctttctgcctcctcaaatccctaaactcagtaatgatcctaacttagaatcagaataaacattggtactatgagagctccttctcctgctcctagacctaattactactcctatcatttgcatttgtcctctgtgtgagtatcatacacacgatcatgcatcagcacacatatgcacacagattcccacttaaagtgtaagccccagggacttttgtcacgttggtcatagaaatatccctaatagatagaatggagtgcctcccacttagtgagagcccgataaatagcatgggtcatcatatagttctatatttttgtctcctatataaccactttgtagttaggaagtgattgcttctctctgtggagaagactggcttcccaacaaccacctgctgacccttccataagctttgcatatggatagaagtcaactga

SEQ ID NO: 714162 - DNA, 603 bp, Homo sapiens
gtctaagtccttgcatttttaaaagtcactgctgtcatttccaaaatataaaagaggcttaagttggatccaggaagctttcatgctccttgctgtggggaaaacttaggaatagcagtccaggtgatcagaactctttagatacatatcactgctctcactgctttctgcctcctcaaatccctaaactcagtaatgatcctaacttagaatcagaataaacattggtactatgagagctccttctcctgctcctagacctaattactactsctatcatttgcatttgtcctctgtgtgagtatcatacacacgatcatgcatcagcacacatatgcacacagattcccacttaaagtgtaagccccagggacttttgtcacgttggtcatagaaatatccctaatagatagaatggagtgcctcccacttagtgagagcccgataaatagcatgggtcatcatatagttctatatttttgtctcctatataaccactttgtagttaggaagtgattgcttctctctgtggagaagactggcttcccaacaaccacctgctgacccttccataagctttgcatatggatagaagtcaactga

SEQ ID NO: 714163 - DNA, 603 bp, Homo sapiens
gtctaagtccttgcatttttaaaagtcactgctgtcatttccaaaatataaaagaggcttaagttggatccaggaagctttcatgctccttgctgtggggaaaacttaggaatagcagtccaggtgatcagaactctttagatacatatcactgctctcactgctttctgcctcctcaaatccctaaactcagtaatgatcctaacttagaatcagaataaacattggtactatgagagctccttctcctgctcctagacctaattactactcctatcatttgcatttgtcctctgtgtgagtatcatacacacgatcatgcatcagcacacatatgcacacagattcccacttaaagtgtaagccccagggacttttgtcacgttggtcatagaaatatccctaatagatagaatggagtgcctcccacttartgagagcccgataaatagcatgggtcatcatatagttctatatttttgtctcctatataaccactttgtagttaggaagtgattgcttctctctgtggagaagactggcttcccaacaaccacctgctgacccttccataagctttgcatatggatagaagtcaactga

SEQ ID NO: 714164 - DNA, 601 bp, Homo sapiens
tctgctgcgcccatgatgcagtgatggtgagccacacagtacattactgtaagtccctgttgagttgaggaattaaccaaatgctaccacagagtttattaataaagtttaggccaaattgtgaacggaattatattttaagacacagaacacagtttgctatgtaaagttktgtaagctggagcaacaatgcagaaactaatattctgtgaagagttcctagcaagccagaattaattgactaccagcgtctaaccaaacctaaagttctaatctagcttttatatacagatcacctgccagcacttcatcattttgtatatgctgtttgctatgctattatttggtgattgatctgctgtttaacttatagtaatgatgatggcctggcgttaacaataatggcatatgttaaaaatgtaagagagcatctcagcaataaaagagatagatatagttcagaaccttttcacattgcattgcccctgttaatgtttcacaacactttatactctgaaaaaataaaaataaaaaaaggaagtggcataaaaatagcatgtaaagtgttattcccacatgctgttcttggtctttggcatgc

SEQ ID NO: 714165 - DNA, 601 bp, Homo sapiens
tctgctgcgcccatgatgcagtgatggtgagccacacagtacattactgtaagtccctgttgagttgaggaattaaccaaatgctaccacagagtttattaataaagtttaggccaaattgtgaacggaattatattttaagacacagaacacagtttgctatgtaaagttttgtaagctggagcaacaatgcagaaactaatattctgtgaagagttcctagcaagccagaattaattgactaccagcgtctaaccaaacctaaagttctaatctagcttttatatacagatcacctgccagcacttcatcattttgtatatgctgtttgctatgctattatttggtgattgatctgctgtttaacttrtagtaatgatgatggcctggcgttaacaataatggcatatgttaaaaatgtaagagagcatctcagcaataaaagagatagatatagttcagaaccttttcacattgcattgcccctgttaatgtttcacaacactttatactctgaaaaaataaaaataaaaaaaggaagtggcataaaaatagcatgtaaagtgttattcccacatgctgttcttggtctttggcatgc

SEQ ID NO: 714166 - DNA, 2897 bp, Homo sapiens
gggattacaggcatgagctactgcgcctggccgtaaataaaatgtctttctaagaaatattttggggcctggctgaaaaagccatgtacaatctgaactcattcctttggtcctcaagtgtcccactattgggacattgccacaatgaccttctaacctcccattagttaactctagcctttgttcactgctctccagccaccggaccttctttcattgctttaaatcagccaactgctttttcatctcaggaagtttaagcaggtggtttttgctgtctaaaatttccttcccctaggtctttataagactgagtctttctcatccttgagtttcaacttaaatgtttccttctcagtgctgaccaccctgaccaggccttcctgctattctctatcaatcaccccttgctttaatgtatgatgaatagacattatttataaataaagaatgtaagtaacaaggagatcatgcaatttctttatgcttatgggttatcaaaatttgaaaaactgtgcccgtagtaatcgattcatttgttcactagttcacttattcaatcaaatatttatgaagcacctactatgtgtcaggcactgtactgggtgccagtgatacaaatgtgaataggacaaaattctggcccctgtgaagctggcattctagctagggcctggagtacaaatacacaaatagacttagctcattccccctcacccccatcttcaaagagagcaatgttgtatctctctgacctgccttccataattacatctccctttgaatacaaaaggggaaggttctccacattctaggtgcatgtaactagactggccacacccagataacctgagataacctcccatttcaaggccctaattaaatcaaatctgtacaatcccttttgagccataaaataacagttcacggtttctgggaattagaacatggatatctttagagacctttattctgtctagcagagaaagctaaattgattttttctcagcttcctttgcattggctgttgaagtctcaccccctttctgatggcagaagcataaaggtcagcggtgttcaaatcagttcctctttttccagacattttcttactagccctgactcaacttcactagaaccaacaggacctaaatagattccataatcaaacttgttttttaaagaacgtaattattttacccagtctcttttctgctcctacctgatgcttaatagcaagttgctttttggcagtgtgcctcatggacccagttaagatgaactccagactgaatattcattgcgaagtagattcagtgaggttgtctattgctcattaatgaagctttccacctaagctcatccaacactagaagcagttgatacctaagtatacatataattctcattaaaacttgcaaacatgaaaggtgtgaaatttcagctttggaatttggaggaattgagatttcaaaatgggattgaagactttcttcaagagaaatcacacggaagccttcccacccagcagaaatattttttcatgattccataaaatattttagaagatagtggtttcctgtgtagaacattaggactgcttgaacaattggagggtctgcattattcattttactttttctttttcttgttttttttttctctaccttcttctttatcaaaagcaatttcattaggtctccttttttttaattaagccaaattgttctcatattttgcccttttttgatatattaggctcaatatataagtgaaattttccattgaacgagtctaatcagttaaatstatttcctacttgtacctgattttgcttaatcaggtgtaagcaggaaataaagaacatatttttctacatttgcctaaggcaaacaagtttgcaactccacctatgacttaactcaagccattttttattaatgcaaattaaaataataaagatttatctaaaatgaatatatatgcatgaattaataataaaaatcaataaataacatgtacatatgcccttgaactgccacaatgtatttaagtatattctgattaagtacacattaattaggttttaaaaagtataaaagagcaaaacataactatttgttgagttctgcaaatggaaaaaaaaaagatgccctcctcatcaaattttgcaacttcagtaaaataaatattaagcatatgtctcaaaccatctgttgcaaactttcaaaaacacaaaaacaatttagcaattccaaagagatctgggtttgcgaattctctgttctttgtaattgagttccaggttaaaaaaaaaaaaaaaaaaagcagggtatttctcaactacatttttaatgcaacattcaaataccgtagtattggactaatcctacagacattcgtactacaatgtataatagctggaattacacaacaggcttccaaatggatttctcacattcccatacaaagcatggtgagcaccgcgctacctgtctggggctcccctattagctgtctactgctgctctcccagcaagttgccagggaaggctctaaatatatttgattagtttcaggccttcatttttagcgagtcatcaccctcttaacagcagatgatgccccctagtccgaatcaatgtgagtggccctggttacaataggctggattaatgatgaaaaatgtgtcgtcagcctagaggtccttggacatttatcacccaatgggcctgccaattggtgggcagtccctggctcatcagcgcaatacttgcctagccttaaagagatcgtgttcttttcgggataatataatgaggtctggtaggtggggagacggacctgaaagacaggtaacttgacagatttaggttccatacaattcagcacttcta

SEQ ID NO: 714167 - DNA, 617 bp, Homo sapiens
ccaaaacaatacatcagtcgtgtaaatctgccttgggcactgctgayctatataaagctgaatatcatcttcagtgacatcttcggtgtacctgtcctggattgcctgtgcttggcttcgggcactaattttctttcctcatacaatccaatccattaaacgtctgctatagtttttctggcctgaagagaaattttgtttgtttgcttgtttgtttcggcctagttccaggcccaggataagatgaagcaaacactgctttcattcattcatacatcacatatatgcttctcttcaaccttctcttccttgctctctgacatacacaggtacttctaaagctctgggatatcccttaccatatagcaaacttcctggcaggagcagaggcaatagctctctagtagtgcttggggtagtgacagatactttcaagactgacagaaaaaagaaaacacaagctctttttcaggaactgtatatatatatatagtgggtcttagtgagatacaaatctgccactaaggtaccacttattaggccttataattgagatttacttgtggacctgaaaactctgcacagtccataagagaatttcctgtattccctgcata

SEQ ID NO: 714168 - DNA, 887 bp, Homo sapiens
caataaagtgggtagcgtggttttgtattatgatcatagaatttgaaggtggaagccctgggtatgatgacaatttgccttcttctttgctgtttaataagacctgcagtgagtaatgtaaacactctaatcctctctttcttacctgtaaaattataataatattattaataataatatcatcccccaataggctgtatattgtaaagggccaattaaattagaaatatgaagtagggtaacttgtaaggttgcaatacaaatcaaaggtttcactgcctcattaaccgtacctcacttccatgctttgaactttggggtaatgaatatgtgtaattatttagctaagagggctcaagattaacgcttttgtgtcgagtgttgccacacacatcaacatggatgatcttacaggctaatgagggaaagaagccagaagccgaaggccacagacagtattatcccctttatataaagttctacacctagaaaattaatctttgrtgatagaaaagagaatcggttacctttcagggtgtgtggaaggggcatagggtattaatggtagagattgtaggaggcaggtgatgttaccggtcttcttgtgggtataggttacagggctatgttcactttctacgacttcattggccagaacacttatgatttgtacatttcactgtaggtgtaaaatgcttacaagaagaacgaaatattaaaacaaaaaaagagaaaatgaaagaaaacaacaaaagtgttaagtccatccactgatcctgctttcagagccataaaaaaaccgtctgctatacaatctatttacctcgtcctctcacttacaccaatctttctttccacagcaccataaaatctacctacatacatgt

SEQ ID NO: 714169 - DNA, 887 bp, Homo sapiens
caataaagtgggtagcgtggttttgtattatgatcatagaatttgaaggtggaagccctgggtatgatgacaatttgccttcttctttgctgtttaataagacctgcagtgagtaatgtaaacactctaatcctctctttcttacctgtaaaattataataatattattaataataatatcatcccccaataggctgtatattgtaaagggccaattaaattagaaatatgaagtagggtaacttgtaaggttgcaatacaaatcaaaggtttcactgcctcattaaccgtacctcacttccatgctttgaactttggggtaatgaatatgtgtaattatttagctaagagggctcaagattaacgcttttgtgtcgagtgttgccacacacatcaacatggatgatcttacaggctaatgagggaaagaagccagaagccgaaggccacagacagtattatcccctttatataaagttctacacctagaaaattaatctttgatgatagaaaagagaatcrgttacctttcagggtgtgtggaaggggcatagggtattaatggtagagattgtaggaggcaggtgatgttaccggtcttcttgtgggtataggttacagggctatgttcactttctacgacttcattggccagaacacttatgatttgtacatttcactgtaggtgtaaaatgcttacaagaagaacgaaatattaaaacaaaaaaagagaaaatgaaagaaaacaacaaaagtgttaagtccatccactgatcctgctttcagagccataaaaaaaccgtctgctatacaatctatttacctcgtcctctcacttacaccaatctttctttccacagcaccataaaatctacctacatacatgt

SEQ ID NO: 714170 - DNA, 1686 bp, Homo sapiens
acagattagaaatggaggttgccattcgtttgagctctcttagaaaagaaggctctctttgacaaatccctctgcttattagacaaagtgcaaaaagcattacatctggagttcataagccattgttttatggaattgatccatcatacaatcccttacgctcttgaaataaacccatgagaatttaagatgctatatgcacacttactaacacattcactcatacatacacacccctctatgcacacatgctaccattagagacttgtgcccttgcaaaaaaatcttatagcgtagaattgcaacatgctttttaaattgatagttatttttttttaacatcgtttatctttcaaaagacttctgaattcagctacaggaattattcttattcctcgaaacttataaccccctattctttgtactcaaaatgttttgtaatacaacattttttttccattaaaaagagcaaaagtaaagctacaattatttttgaaacacaccatccccagatacttctgaatttattttccttcctcaaatcttgaagcacgtattatttctttcacatctttagaccgttaaaactcaattgttcattctgtgagaagaaaacttaaggaaacattcagcaagtagctttatatgtgggagatggatttttagaggattttaggtgtttgagaagagtttctcatagattctgttgctttcagaattcctcaggatgccattctaaaggatgactgcaattcagatcagcgaagtgctttgatgtcttattttttcttttgcagattgtactccacatgttcagaaagcctttccctagagtataatttaatgtaattgacagtcattgttcctcgaaagtttgaattaaattaacctgagcctgaatgaaactggtaaaataaccacgtacagatttcattttattttcctttaggatcagtgacaatattatgtataaaattggcagttggctattagatcttcattgaatcaccctagatttgattaaaagtagatatttcagtgtacagtaatttaggttcatgaaaaactcttaggtttctcatttagttattgggtttattgaggaacagggtattttatgtgtgtaatgatgaattttgttctttctctttttccactgagatcaaatacagactgcaaaattgaccgagcatgaaattgtttttagaaattgtgggagctagtttcgatggcaagaatcagaggaacsgttgttagtgaaaatgtgtttggaaaggatgatggtagtgggtaggagagaatagaggtagagaggtgttaacataaggcaaaaacattaaactgacaaacacttctctgtagagtagttgatgtgttaagccagcacacttaaaagcatacaagtttttggatagaaaagtcttcattgttctgactgtttttctggacatgtagctggaaaggagactcaaatcttcatatggattttgtgtcttatggtcactgacactgcaaagcaattagccttcatgatggctgtgcttatgcaatactaattaacatgcctgttgtgctgttttccctgtttgaccatgtgacagcccacaggtctgacactctctgtgaaccaacagctgaggaaatttccaacatggcagattttttttacaaaacacacccaaacaa

SEQ ID NO: 714171 - DNA, 645 bp, Homo sapiens
tgagagccatcaccttcattatcttttcagacctgctgtcctcagacagtgccttgggcttcaggtgacataccagagcacagatgctaaagtacaaactcactagtctgattttggtctcatggtttggccttaactaccttcctaatccaggctcccaccactgcatttttcactctatactccagttgattaaagaaaggagcaattattattattattattwtttttttcaagatggtgtcttgctctgtcacccgggctggaatgcagtggcataatctcagctcactgcaacctctgcctcccaggttcaagctattctcctgcctcagcctaccgagtagctgggattacaggcatgcgccaccatacccggcggctattttgtgtatttttagtacagatggggtttcaccatgttggcgaggctggtctccaattcttgacctcatgatctgccctccttggcctcccaaagtgctgggattacaggcgtgagccaccatgcctgaaaggagcaattgctaacaattacttgataacagaatgatcatcatcatcaacaacaaaatgataataaaatcagtaactccaccagactactgcccttaatctgataaatccccagcacctgggctactt

SEQ ID NO: 714172 - DNA, 645 bp, Homo sapiens
tgagagccatcaccttcattatcttttcagacctgctgtcctcagacagtgccttgggcttcaggtgacataccagagcacagatgctaaagtacaaactcactagtctgattttggtctcatggtttggccttaactaccttcctaatccaggctcccaccactgcatttttcactctatactccagttgattaaagaaaggagcaattattattattattattttttttttcaagatggtgtcttgctctgtcacccgggctggaatgcagtggcataatctcagctcactgcaacctctgcctcccaggttcaakctattctcctgcctcagcctaccgagtagctgggattacaggcatgcgccaccatacccggcggctattttgtgtatttttagtacagatggggtttcaccatgttggcgaggctggtctccaattcttgacctcatgatctgccctccttggcctcccaaagtgctgggattacaggcgtgagccaccatgcctgaaaggagcaattgctaacaattacttgataacagaatgatcatcatcatcaacaacaaaatgataataaaatcagtaactccaccagactactgcccttaatctgataaatccccagcacctgggctactt

SEQ ID NO: 714173 - DNA, 603 bp, Homo sapiens
aaaaaaatttataagttttaaactgcatgctgttctgagaaccatgatgaaatcttgccctgtcctgctctttcctattagtaacatgaatcatctattttcttagcctatccacgctgtatatgctacccccacatcagtcacttagtagctctctgggttatctgatcagattggccgatcacaagaagaagggagagtacagtacaataagatattttgagagacagaaaaagaccacattcatgtaacttttattacagcatatttttataattgttctattttattattagttattgttgttaatctcttactgtgcctaatatataaattaaactttatcatatgcatataggaaaaaattgtgtgtgtgtgtgtgtgtrtatatatatatatatacacacaagatggatatatatcttataaagatatctatcatatatatatgtaaagatatatatatctttcagaactatctgtactttcaggcattcactggggatcttggaacatatcccccataaataaagtgagactagtgtaatgtatttaactgaaaagcccagacatataaatggcttcatgtatagctggtatatt

SEQ ID NO: 714174 - DNA, 648 bp, Homo sapiens
acacatacacatttgagaccttgcttctgggtaggtggttggtggaagattcagagaatagattcatagtccatgtttcaatctgtgatgactaaaatgattatattatacaacagaatgacagttgcaagaaacagaaacaaatcaatctgtcttaaaaaacaacaaaaaaacccatttattacttcttttttwattttttatatttatttatttattattattattatttttttttttgagacagtctcactctgtcgcccaggctggagtgcagtggcaccatctcggctcactgcaagctccgcctcccgggttcatgccattctcctgcttcagccttccgagtacctgggactacaggtgctcgccaccacacccggctaattttttgttttgttttggtttttttagtagagacggggtttcaccgtgtcagccagaatggtctagatctcctgacctcgtgatccgcccacctcagcctcccagagtgctgggattacaggcgtgagccactgctcctggccaaccatttattacttctatttacaaaactggtgaattgaaagccaagtctggccaaacctagaggttcgggttacattgctagtctatttcatttcacattccttcactttgctttct

SEQ ID NO: 714175 - DNA, 648 bp, Homo sapiens
acacatacacatttgagaccttgcttctgggtaggtggttggtggaagattcagagaatagattcatagtccatgtttcaatctgtgatgactaaaatgattatattatacaacagaatgacagttgcaagaaacagaaacaaatcaatctgtcttaaaaaacaacaaaaaaacccatttattacttcttttttaattttttatatttatttatttattattattattatttttttttttgagacagtctcactctgtcgcccaggctggagtgcagtggcaccatctcggctcactgcaagctccgcctcccgggttcatgccattctcctgcttcagccttccgagtacctgggactacaggtgctcgccaccacacccggctaattttttgttttgttttgktttttttagtagagacggggtttcaccgtgtcagccagaatggtctagatctcctgacctcgtgatccgcccacctcagcctcccagagtgctgggattacaggcgtgagccactgctcctggccaaccatttattacttctatttacaaaactggtgaattgaaagccaagtctggccaaacctagaggttcgggttacattgctagtctatttcatttcacattccttcactttgctttct

SEQ ID NO: 714176 - DNA, 700 bp, Homo sapiens
gaattttaggtgaagttcacaaatacttaaatttggtaattaactcaaaaattttaaacagtgttagaatcaacactatgccaaacaaaacacatctgtgtgcaggatttagcccaaagactgagtgtgcaacccctaaaaaatgccaaattataaagtctgtaataaatctgaggtataacaagattatttactcttctaccaaaaaaaaaagaaaatacatatatactccatttatcaggttaaataacatcacatacctaataagtggcaaaagtggaactagaaaagccaagccctataaatcttagctccacaggattacagcctctaaaactaggctgcctcccaacattatcatccacggataaacattcrtgtaaaatacaatggtgaggcaccaaacaagtgattgcatacctttctgtctttgtgccactgctgatgctccaaaactatgttcttaatattgtcaaaaaaatcatcctttatcaagctgagggctttatctggcttggacttatcaactgaaattacatgtttcatgttctgataatgatcatgaacattcagcatttcctaaaagcaaaaagatgagtcctttatttcttcactttttgaggagaaactaaaaggcaaaaccaacacaaaatagtcaccttccaaagtgacttccagttgataggtaataacatgctat

SEQ ID NO: 714177 - DNA, 2657 bp, Homo sapiens
ttccaggtgccgtctgtcaccccttttcttgaccaggaaagggaactccctgaccccttgcgcttcccgagtgaggcaatgcctcgccctgcttcggctggcgcacggtgcgctgcacccactgtcctgcgcccactctctggcactccctagtgagatgaacccggtacctcagatggaaatgcagaaatcacccctcttctgcgtcgttctcgctgggagctgtagaccagagctgttcctatttggccatcttggcttctcccctcttccatatgtttttttcctcccatatctggtgccccaaactgcattaatattcacattaaattgtaattattactctgagatttttcttgttacctcaggttcaatcttacgtttctcagcagaggcactgtcagtatagcatagtgaaaagagtgtggcttttgagctaaatagccccagttttgaatcttaacactcccaggtattcttcttccattaacaggtaactttattctgccaaatcccagtttctttatttgtaacataataataataagtgccccactagccagattgtttagggaataaagttagcaatgtacatgcaccaccttgcacatatgaagtgcttaaatgtagaggttattgctcttagggtgattttattatttcttttctttacttaattacttttgaactatcttttatttataattatattgttttaatttttgaagagtctttctaagcaactttggtgaagtttttaagaaaccaatatgaacttgtcgtctttctaataaaataaatttatgatttaaaattactagcatagttgaactaactgacctagctcctgccactgtgtcttattattcatatatcataatttttctattttattatatatgatctaaaagatggaataagatttctttgtttttttgttctctgtgttctaaatcccatttatttaaaattacttttcattattacccagttttcaaaaacactctttaagtaatggatttataaccatagatatagaatatcaccaaataaaatattagtgtatgaaaactagattgtattccaggaaagaaggagaggtctgcttttggaaatcaatatcatatgtcactattttattgttttaaggaaatgaaaaacatagatatcttgatgataaagtaaaagctttgaacaaaactttaacagctatgcttagaagcagaaaatttggtaaatctgaaaaagcaggagaggtcattattctgaataaggcttatcagaaaactataggaaatatcatgcttgatgtgaaacaatccctttaatgtcaggaacaagatgaaaagagccaatagttgatattgttctgaaatgctaactgcatgtaataaagcaagaaaagtagtaaatagtacagatataagaaaggaagaaaacacactgctattatttgcaaattatatatctacgcacctaggaaatcaatgacaactaaatggaagtattttaaagtaagaagaaagttgaaatgacctttgttttttaagaccaatataaaaaatgtcattttctgatatcaggacaacagagataaataattataaaatgtaataagtaacggtcaaatttatacactaagaaataaaagagtaaataccttgaatatttgttagttatgtaaacaattataaaaatcaggccaaatcatacgtgaaaaggggaaatactgtatttctgtttcagaagactcaaatatcagactgatatggtttggctgtgtccccaacccaatctcatcttgaattgtaactcccacaattcccacgtgttatgggagggatccagtggaaggtaattgaattatggtggctagtctttcccatccaactctcatgatagtgaataagtctcgtgagatctgatggttttaaaagtggaaccgctttctcttggttctctcttctcttctctgctgccatgtgagatgtgcctttcaccttctgccatgattgtgaggcctccccagccayatggaaccatgagtccattaaacctctttcttttgtaagttacccagtctgatgtatgtctttatcagcagcatgaaaatggactaatacacagaccaaccccaaatcttattgaaatgtcaaccaaaattttaaatgtgcatactcaacacttataaaactcaacatttgtaagctcaacacttgtaaaactcaaaagaataaaatttgtatacttacataccaggacattcaagtattgtttgtattaccaaaagattgaaaaataactggaaatgacacaaataacatcaacaagaaaatggcaaagattgattttcaccctttaaatcattggttaatgtattgttggtatgtatgcagtaaatgactaactcagtaactgtttgttgtccctgcctatctcaaagaaaggtatgacacttgttcctcactcctgaaaggaaatctctaaatccctggaatatcctgtttctgaagaatgtctttgttttcatagagactttgggccatgacagaaagggcttggaacacttgacatcagcttgacctaccttggagcttccctggtttggaatatagtctcgcaccacataacaacgttttagtcaaagagactgcata

SEQ ID NO: 714178 - DNA, 644 bp, Homo sapiens
cttatgggaaacgaagggatgggccaaattaaaggaatagattgggctagttaactgcagcaggagcatgtccttaaggcacagattgctcatgctattgtttgtggcttaagaatgcctttaagcagttttccgccctgggtgggccaggtgttccttgccctcattcccgtaagcccacaaccttccagcatgggcattagggccattatgaacatattacagtgctgcagagattttgtttatggccagttttggggccagtttatggccagattctggggggcctgctcccaacaamaaataagtttccaaagtcaatgtttagcatggaatcaaaggttatcaggcatgtaaggatgtaaggtgatagagcaacatacacaacaactagcacaagttacagatgttagaaacagatagaaatcaggtaatatatgtatatattatcagattcaaactaggaaagaactaggctttttatgtacataaataaaagaatcaaacctaaaacttttggcaaggaactggaaactgtaaaatgtgacatggcaggtttttttttttttttctcaactagaaattctggaacaggaaaattcaatatctccaatgaaaaattcaatggagaggttcaatagcaa

SEQ ID NO: 714179 - DNA, 600 bp, Homo sapiens
tgtaatctaaggtaactactaaaatagtcatcaagcaaattaaatttctgaagcatcaggaggataaatcaattttttaaaatttaaccctctctaaaggcaaaaaagaaaaacataaactagacaattagaaatcatattgaaatgtggcatgtgtatctgtgtgtatatatacgtatgtgtatatacacagaatttatacttcaatactacattgatgtaaatgaactaaatgctgaagttaaaagacaaagattgtcagataagattttatttacaaacttaactataacccatttactagagatataacraaaataagtttagaaaaatggaaagtaaacatactgaaaatgatatcagacataagtacttcaaaagaaaaaggacaaaaaggagggagaggaaaagaagaaaaaggagggacagaagtaaaagaacgagagaatgaaggacagaagccagaagaatgagaggaagaaagaaaagaaagagaacaggaagaggagaaaaagcagcagtattaacattggaaaaaacagatgttttaggtaacaattttcgataagataaggaagatcacttaataataaagcattc

SEQ ID NO: 714180 - DNA, 600 bp, Homo sapiens
tgtaatctaaggtaactactaaaatagtcatcaagcaaattaaatttctgaagcatcaggaggataaatcaattttttaaaatttaaccctctctaaaggcaaaaaagaaaaacataaactagacaattagaaatcatattgaaatgtggcatgtgtatctgtgtgtatatatacgtatgtgtatatacacagaatttatacttcaatactacattgatgtaaatgaactaaatgctgaagttaaaagacaaagattgtcagataagattttatttacaaacttaactataacccatttactagagatataacaaaaataagtttagaaaaatggaaagtaaacatactgaaaatgatatcagacataagtacttcaaaagaaaaaggacaaaaaggagggagaggaaaagaagaaaaaggagggacagaagtaaaagaacgagrgaatgaaggacagaagccagaagaatgagaggaagaaagaaaagaaagagaacaggaagaggagaaaaagcagcagtattaacattggaaaaaacagatgttttaggtaacaattttcgataagataaggaagatcacttaataataaagcattc

SEQ ID NO: 714181 - DNA, 1519 bp, Homo sapiens
tcagaagcaagatcatgaaaagttcaacattgtagtggaagaaagaagccagaaatcagaggtttaaagccaatggggtgatattaagcattgagtttgggtcaagaagggggctgtaaccaggaaattagtcaagacctaaaaaagagatgaatttgttcaggaacagcaaggaacctaatgtgtctagcttgaagttagcagttctgggctttttctaaaatcacagcaagattgttgtgaatctctacttaaagatattgggccaaatctgatagtaagaaatatttacacagaccatcatcccatcttccatcttcactatgtttttcttcaatgtctcccttaagaagattaaaaaaaaatacaaatctcaagaggcactgttattcttacctattcagcactaaatgaagctttcttccataagtggtgctaacttcatttttctgaacatagtctatgctatcttttctttttgttaattgaattataacttagtggaaaagatgcacaagccatcagaatatatcttttgaataaagttatatttgaatgtttatccaaaaaatatgtttgtcaaatctttgcttaatcaaaaagctattttaattaaacaagtttcttttagccagttgcaatagctatgtagatactttgttccaaaaggcatctaagggaatctgttttgtaaatgagaaacatttttattcatggtaaatgagataggatttaattttcactcaattaaaatattttagtatattgatgaaagccaagttttagaaatcttatcttctttgatattgataggctgatggttcattagcaccatcagttctgtcagtggaatctaaaagatgaagcaacattaattccttatttagagaagtgattaccaaaatgtgaaagtatgtgagtttcaattcattcaacaaatatttattgagatctcaccatatgccagggactttttaacctatatttctctgaagaagctgggtaagtttcactatgaggcaagtgaatttagattataattgcaaataaggtttacaaaaaaggatattataacataaggcagggattttatatgcccataataacaaaatgaattggatctagttacagcatctctcagtgcgatatggaaaaaatattgcattaattttcagtagttcttcaaaagattttatctctgtgtgcagaactggaagccttttgaggtaaaattagtttctgttttgacaagtcattttatagycctatacttaaaatgttggggtacagttgacagttgaagataatttttcaacgtctcacaaatatctggcattattaagcttctgggtgggagagtccaaactggggtttgtgtccaactaaggaatgtaacagctatgaggaataaaacagaaatgtaaatttgcaagtaacacaagcacatacttttactgcagaatatagatatatctataaatccatatctatatctatatatatgaatttatattatata

SEQ ID NO: 714182 - DNA, 1052 bp, Homo sapiens
ttttcttctcctgtccaattgaaatgtgtgttactgattgttttgcagtatgacagcgtgagttactactcctaaacaatatgattccactcaaaatgatggctttgggctatcaatcataggcaaagcacagcatgagagtagtaatggaagatatgaactcyacctatgatccacaaagacatgctttttctatgtatcttagtaatttcccataaaaattggcttcaaaatatagctcatattttaaaactcaaaaaatgttaaaagaaaacttctacaattcttaaagtctcttttgaactgcctaatagctgccattgactaattaacaaaacaaagatggattttcataggttttctttgtgtatatattttagcacaataacatatcttttaatataaggagtggaacaagatggttatgttgctagctgtgcgcttgttttcagatttttgtttgtttgcttgttcgatttttacctggagtgaagctttgtgagtaaactaatctttaataaacactttaatttaaggaacttttgaacttacttccaattcattggtgtcatctaaaatgactctcattataacaaaatattgaaacagtacagcaataaaagtagactgaagagtcagagtataaggccaaagaaatgttcatccccttaacagtatttagtattatttttaagaacaaaataaattgtcatattttatgttttctgtttggcaaaaggcagtctatggttaactgttttaaaatattgcttacccaggccaggtgcagtgcctcacacttgtaatcccagcattttgggaggccaagcgaggaggatggcttgaactcaggagctcaagaccagcctgagcagtacagtgagactccatctctacaaaaattcaaaatattagacaggcacagtggtgctagcctgcagtccgagctactcaggaggctgaggtgggtagatgtcctgagcctaggaggatgaggctgcagtatgaccgagcatgagagaatgggggggctaatgaaaaaggaataaata

SEQ ID NO: 714183 - DNA, 1052 bp, Homo sapiens
ttttcttctcctgtccaattgaaatgtgtgttactgattgttttgcagtatgacagcgtgagttactactcctaaacaatatgattccactcaaaatgatggctttgggctatcaatcataggcaaagcacagcatgagagtagtaatggaagatatgaactctacctatgatccacaaagacatgctttttctatgtatcttagtaatttcccataaaaattggcttcaaaatatagctcatattttaaaactcaaaaaatgttaaaagaaaacttctacaattcttaaagtctcttttgaactgcctaatagctgccattgactaattaacaaaacaaagatggattttcataggttttctttgtgtatatattttagcacaataacatatcttttaatataaggagtggaacaagatggttatgttgctagctgtgygcttgttttcagatttttgtttgtttgcttgttcgatttttacctggagtgaagctttgtgagtaaactaatctttaataaacactttaatttaaggaacttttgaacttacttccaattcattggtgtcatctaaaatgactctcattataacaaaatattgaaacagtacagcaataaaagtagactgaagagtcagagtataaggccaaagaaatgttcatccccttaacagtatttagtattatttttaagaacaaaataaattgtcatattttatgttttctgtttggcaaaaggcagtctatggttaactgttttaaaatattgcttacccaggccaggtgcagtgcctcacacttgtaatcccagcattttgggaggccaagcgaggaggatggcttgaactcaggagctcaagaccagcctgagcagtacagtgagactccatctctacaaaaattcaaaatattagacaggcacagtggtgctagcctgcagtccgagctactcaggaggctgaggtgggtagatgtcctgagcctaggaggatgaggctgcagtatgaccgagcatgagagaatgggggggctaatgaaaaaggaataaata

SEQ ID NO: 714184 - DNA, 1246 bp, Homo sapiens
attttagtgcaatatatagacaaccttaatccagacaacaatataatagttcagcagccaatcctgaaaagattattcaggatgcaatccagtgctactggtaactgtatacctcactggagataaacccagaataaataacatgcttgatgcttctaattccttaaaatcaacataaaaaccttgcgaactatttcatgccaggtttgacaggtggtgatagtgtttgaggaggcataggatatactgcagtgatagcaatgaatggtgcagcatttgaggtgtgcttgggtagagagcaaaacaagcctgaagaagttaaattgaagtgcttcacagcatatcactttgctgagctgcctttaaactaccttaaaatattttccacttttggaaagtttcagagatcagcaatgcatagaatggcattcagatgaaaatatggatgatagttgtacaaaattaagagtttgaagagcataaaaaatgctgctgaaatattttttaagaatctgtgatctcaccagctttgtgaaatctttgtaatgtttcagatttattaattctactaattgcatgcttttgctttgtctstgtgcattatgaaccctctcctgtccatgctcatatcaagtcagataagaagtataagttttagttacaggaaactgttcagtgaatagaattatgataatcagaataaagacatcattttatgaagtattttgtatcatttaagtactattttagctactaagcatagaaacacactaaatgttcagaatatgcttccagaattaaattttaaagttaatagtactgtcaggagattccctcttaaaaaagaacagaaaatgataaattgaaaagataatctggaccaatcacaaaataaggggttatataaaagtttcatgctcttattttcttgagcaagaaaaacattttaaaataatatattcaacttgtttaagagaaaaattaataaatgtgcttctacccttgtgcctagaaataattttaaagccaagtgagatttgtgtctttctttgcttccacttggagtactacctgtgacttttggaagaatttctgtatattttgtgtcttaaaacataaaattaatatacctttattgagtttctattaaaagtcaggaatagtggtcaatgtgaggttttttatcaaagatgtgtaagggatggtctcagtgctcaggttgtcaggttatttatacttcagttga

SEQ ID NO: 714185 - DNA, 1246 bp, Homo sapiens
attttagtgcaatatatagacaaccttaatccagacaacaatataatagttcagcagccaatcctgaaaagattattcaggatgcaatccagtgctactggtaactgtatacctcactggagataaacccagaataaataacatgcttgatgcttctaattccttaaaatcaacataaaaaccttgcgaactatttcatgccaggtttgacaggtggtgatagtgtttgaggaggcataggatatactgcagtgatagcaatgaatggtgcagcatttgaggtgtgcttgggtagagagcaaaacaagcctgaagaagttaaattgaagtgcttcacagcatatcactttgctgagctgcctttaaactaccttaaaatattttccacttttggaaagtttcagagatcagcaatgcatagaatggcattcagatgaaaatatggatgatagttgtacaaaattaagagtttgaagagcataaaaaatgctgctgaaatattttttaagaatctgtgatctcaccagctttgtgaaatctttgtaatgtttcagatttattaattctactaattgcatgcttttgctttgtctgtgtgcattatgaaccctctcctgtccatgctcatatcaagtcagataagaagtataagttttagttacaggaaactgttcagtgaatagaattatgataatcagaataaagacatcattttatgaagtattttgtatcatttaagtactattttagctrctaagcatagaaacacactaaatgttcagaatatgcttccagaattaaattttaaagttaatagtactgtcaggagattccctcttaaaaaagaacagaaaatgataaattgaaaagataatctggaccaatcacaaaataaggggttatataaaagtttcatgctcttattttcttgagcaagaaaaacattttaaaataatatattcaacttgtttaagagaaaaattaataaatgtgcttctacccttgtgcctagaaataattttaaagccaagtgagatttgtgtctttctttgcttccacttggagtactacctgtgacttttggaagaatttctgtatattttgtgtcttaaaacataaaattaatatacctttattgagtttctattaaaagtcaggaatagtggtcaatgtgaggttttttatcaaagatgtgtaagggatggtctcagtgctcaggttgtcaggttatttatacttcagttga

SEQ ID NO: 714186 - DNA, 1246 bp, Homo sapiens
attttagtgcaatatatagacaaccttaatccagacaacaatataatagttcagcagccaatcctgaaaagattattcaggatgcaatccagtgctactggtaactgtatacctcactggagataaacccagaataaataacatgcttgatgcttctaattccttaaaatcaacataaaaaccttgcgaactatttcatgccaggtttgacaggtggtgatagtgtttgaggaggcataggatatactgcagtgatagcaatgaatggtgcagcatttgaggtgtgcttgggtagagagcaaaacaagcctgaagaagttaaattgaagtgcttcacagcatatcactttgctgagctgcctttaaactaccttaaaatattttccacttttggaaagtttcagagatcagcaatgcatagaatggcattcagatgaaaatatggatgatagttgtacaaaattaagagtttgaagagcataaaaaatgctgctgaaatattttttaagaatctgtgatctcaccagctttgtgaaatctttgtaatgtttcagatttattaattctactaattgcatgcttttgctttgtctgtgtgcattatgaaccctctcctgtccatgctcatatcaagtcagataagaagtataagttttagttacaggaaactgttcagtgaatagaattatgataatcagaataaagacatcattttatgaagtattttgtatcatttaagtactattttagctactaagcatagaaacacactaaatgttcagaatatgcttccagaattaaattttaaagttaatagtactktcaggagattccctcttaaaaaagaacagaaaatgataaattgaaaagataatctggaccaatcacaaaataaggggttatataaaagtttcatgctcttattttcttgagcaagaaaaacattttaaaataatatattcaacttgtttaagagaaaaattaataaatgtgcttctacccttgtgcctagaaataattttaaagccaagtgagatttgtgtctttctttgcttccacttggagtactacctgtgacttttggaagaatttctgtatattttgtgtcttaaaacataaaattaatatacctttattgagtttctattaaaagtcaggaatagtggtcaatgtgaggttttttatcaaagatgtgtaagggatggtctcagtgctcaggttgtcaggttatttatacttcagttga

SEQ ID NO: 714187 - DNA, 1246 bp, Homo sapiens
attttagtgcaatatatagacaaccttaatccagacaacaatataatagttcagcagccaatcctgaaaagattattcaggatgcaatccagtgctactggtaactgtatacctcactggagataaacccagaataaataacatgcttgatgcttctaattccttaaaatcaacataaaaaccttgcgaactatttcatgccaggtttgacaggtggtgatagtgtttgaggaggcataggatatactgcagtgatagcaatgaatggtgcagcatttgaggtgtgcttgggtagagagcaaaacaagcctgaagaagttaaattgaagtgcttcacagcatatcactttgctgagctgcctttaaactaccttaaaatattttccacttttggaaagtttcagagatcagcaatgcatagaatggcattcagatgaaaatatggatgatagttgtacaaaattaagagtttgaagagcataaaaaatgctgctgaaatattttttaagaatctgtgatctcaccagctttgtgaaatctttgtaatgtttcagatttattaattctactaattgcatgcttttgctttgtctgtgtgcattatgaaccctctcctgtccatgctcatatcaagtcagataagaagtataagttttagttacaggaaactgttcagtgaatagaattatgataatcagaataaagacatcattttatgaagtattttgtatcatttaagtactattttagctactaagcatagaaacacactaaatgttcagaatatgcttccagaattaaattttaaagttaatagtactgtcaggagattccctcttaaaaaagaacagaaaatgataaattgaaaagataatctggaccaatcacaaaataaggggttatataaaagtttcatgctcttattttcttgagcaagaaaaacattttaaaataatatattcaacttrtttaagagaaaaattaataaatgtgcttctacccttgtgcctagaaataattttaaagccaagtgagatttgtgtctttctttgcttccacttggagtactacctgtgacttttggaagaatttctgtatattttgtgtcttaaaacataaaattaatatacctttattgagtttctattaaaagtcaggaatagtggtcaatgtgaggttttttatcaaagatgtgtaagggatggtctcagtgctcaggttgtcaggttatttatacttcagttga

SEQ ID NO: 714188 - DNA, 1246 bp, Homo sapiens
attttagtgcaatatatagacaaccttaatccagacaacaatataatagttcagcagccaatcctgaaaagattattcaggatgcaatccagtgctactggtaactgtatacctcactggagataaacccagaataaataacatgcttgatgcttctaattccttaaaatcaacataaaaaccttgcgaactatttcatgccaggtttgacaggtggtgatagtgtttgaggaggcataggatatactgcagtgatagcaatgaatggtgcagcatttgaggtgtgcttgggtagagagcaaaacaagcctgaagaagttaaattgaagtgcttcacagcatatcactttgctgagctgcctttaaactaccttaaaatattttccacttttggaaagtttcagagatcagcaatgcatagaatggcattcagatgaaaatatggatgatagttgtacaaaattaagagtttgaagagcataaaaaatgctgctgaaatattttttaagaatctgtgatctcaccagctttgtgaaatctttgtaatgtttcagatttattaattctactaattgcatgcttttgctttgtctgtgtgcattatgaaccctctcctgtccatgctcatatcaagtcagataagaagtataagttttagttacaggaaactgttcagtgaatagaattatgataatcagaataaagacatcattttatgaagtattttgtatcatttaagtactattttagctactaagcatagaaacacactaaatgttcagaatatgcttccagaattaaattttaaagttaatagtactgtcaggagattccctcttaaaaaagaacagaaaatgataaattgaaaagataatctggaccaatcacaaaataaggggttatataaaagtttcatgctcttattttcttgagcaagaaaaacattttaaaataatatattcaacttgtttaagagaaaaattaataaatgtgcttctacccttgtgcctagaaataattttaaagccaagtgagatttgtgtctttctttgcttccacttggagtactacctgtgacttttggaagaatttctgtatattttgtgtcttaaaacataaaattaatatacctttattgagtttctaytaaaagtcaggaatagtggtcaatgtgaggttttttatcaaagatgtgtaagggatggtctcagtgctcaggttgtcaggttatttatacttcagttga

SEQ ID NO: 714189 - DNA, 1246 bp, Homo sapiens
attttagtgcaatatatagacaaccttaatccagacaacaatataatagttcagcagccaatcctgaaaagattattcaggatgcaatccagtgctactggtaactgtatacctcactggagataaacccagaataaataacatgcttgatgcttctaattccttaaaatcaacataaaaaccttgcgaactatttcatgccaggtttgacaggtggtgatagtgtttgaggaggcataggatatactgcagtgatagcaatgaatggtgcagcatttgaggtgtgcttgggtagagagcaaaacaagcctgaagaagttaaattgaagtgcttcacagcatatcactttgctgagctgcctttaaactaccttaaaatattttccacttttggaaagtttcagagatcagcaatgcatagaatggcattcagatgaaaatatggatgatagttgtacaaaattaagagtttgaagagcataaaaaatgctgctgaaatattttttaagaatctgtgatctcaccagctttgtgaaatctttgtaatgtttcagatttattaattctactaattgcatgcttttgctttgtctgtgtgcattatgaaccctctcctgtccatgctcatatcaagtcagataagaagtataagttttagttacaggaaactgttcagtgaatagaattatgataatcagaataaagacatcattttatgaagtattttgtatcatttaagtactattttagctactaagcatagaaacacactaaatgttcagaatatgcttccagaattaaattttaaagttaatagtactgtcaggagattccctcttaaaaaagaacagaaaatgataaattgaaaagataatctggaccaatcacaaaataaggggttatataaaagtttcatgctcttattttcttgagcaagaaaaacattttaaaataatatattcaacttgtttaagagaaaaattaataaatgtgcttctacccttgtgcctagaaataattttaaagccaagtgagatttgtgtctttctttgcttccacttggagtactacctgtgacttttggaagaatttctgtatattttgtgtcttaaaacataaaattaatatacctttattgagtttctattaaaagtcaggaatagtggtcaatgygaggttttttatcaaagatgtgtaagggatggtctcagtgctcaggttgtcaggttatttatacttcagttga

SEQ ID NO: 714190 - DNA, 596 bp, Homo sapiens
tcacaaccaaatgtgtaaaaatgcaccaaaatgtgtagacggtggggaaacaacaacttccaaaataaaacatggaagttgttattttccaactatctacatctgtcgtattaaaaataataaatattaaagtttgggtcttctccaaacatgactattttcttctttttgtctgaatttttgtgattttaatttcttaaactgagacaactttatatggtatataytgaaaatcaagtaccttaatacaatttttataaatctctatataaaagtaaataatattctttacttggatcaattataaaagataaaacctaacattctcaacagataacatcctattattattaaaatataaactaaattttatataataactcattttaatttgtttgctaaattgaacttagcatttcatgctttttggtgatacatgattaggagacttgtgcgtgtgtatggaagcccttgtgttagacagtactaatatggcctcaatgatcctcacctgctggtattcatgatcttttctaattcccttccgttaaacgtgggctaggcttactgacttgtttctaacaaatatgatgtgg

SEQ ID NO: 714191 - DNA, 646 bp, Homo sapiens
aggagggcagagaggttatgaagaaaagtcagagggatttattcccaggattctagctgagaaagttgcatccttgtagatagaagcagccacttttacctcctggcccaaccctcaaaaaagcacttggcagtgtctatggaagggtggcatttaaatgaggccaacgagtctgatggtgaaagggcctaacggttactgagaaatcaacagtattgtgatgggaaaagcagcgccatttttattcagcaaagaaagtttggaagtattttattgtgagaactgaggataagatttaaggaagttgttgatggggtgtgtgggggtagagttaggtgattgctgtagcctcaggctaaagstagttgactttggaaattttgcttacaattatttcaagcatacttgcactttacacgggatactggttcaaggtccttagctagaatgtgctcctgttgtttaatcttcagggatttcatttataatataggattcccccttgtccagacgacttttcctagcagcaagctggaaacctgacattagggtacaggttgccgtgtgctttactgtttaaaataaaataaagtatgtggaaggagtgtaaaataattctgccttctgttgaaatctcatattgctg

SEQ ID NO: 714192 - DNA, 646 bp, Homo sapiens
aggagggcagagaggttatgaagaaaagtcagagggatttattcccaggattctagctgagaaagttgcatccttgtagatagaagcagccacttttacctcctggcccaaccctcaaaaaagcacttggcagtgtctatggaagggtggcatttaaatgaggccaacgagtctgatggtgaaagggcctaacggttactgagaaatcaacagtattgtgatgggaaaagcagcgccatttttattcagcaaagaaagtttggaagtattttattgtgagaactgaggataagatttaaggaagttgttgatggggtgtgtgggggtagagttaggtgattgctgtagcctcaggctaaagctagttgactttggaaattttgcttacaattatttcaagcatacttgcactttacacgggatactggttcaaggtccttagctagaatgtgctcctgttgtttaatcttcagggatttcatttrtaatataggattcccccttgtccagacgacttttcctagcagcaagctggaaacctgacattagggtacaggttgccgtgtgctttactgtttaaaataaaataaagtatgtggaaggagtgtaaaataattctgccttctgttgaaatctcatattgctg

SEQ ID NO: 714193 - DNA, 3563 bp, Homo sapiens
atatacaatattgactgtggctgctgccccttcccaccaatcatcataatcaagaggcagattggtttgggtgctcgtgatcccgaagtggagagacctcaatacaaatcacaaaagcattttacacaggatttatttccaggggttcaaaatactttggtaaagctttattataaatagtgacatgttattttaagttgcattttataatggaattgtaatcaggtctcttaattttacttcttacaaagtattacatgctgcatatttaatatgaagattataacaatgttttacttaacatccttcaaagactggggaaacaagggcaagggctctctctgtctctttcacacatacacacacacacaaacacacacacgaggatgtgtggggggattttaactcttctaggatcctatttgagacttcagtaggagcatgtcatcaagatatagttccctccgtgctacccagtctaggaaagatcctgaatgttcaagaagtaaaaatttacctaggtgagaggtaaagtgtcaagaatagaaaggaagcaaatgaagagcatcaaagtttaattttctattgacctcagggtcaaaagaatttgagacatatatcattcatgtgatcttggaaaatgttattccattaaaaaagggaatagacagtgatatgcgggagataatcaatagattgaaaatagtaaccaaaaacgtaagaaaaaactttaaaatcagtgagaagaaggagaggagagagtaaattgaaaagctgtcagaaagaaaaaaaacaagcaattgaaaaagataaaaaataaacatacatagaagtatcaagtgaaaatctagttttcctgcacactaaaatttgatgattcattcctcagtatatgaaaataatatatataaaatgagaaaaattaagcttttttcatattttatagtttcaacatcactaatttgaaagaaaatgtgattaacttttttagtattaaatgtcaaaaattaatgtaattgcatgtgggcacatgcatgttcataaagtttcccatttgcttttagcagcattgttaaatttattgtttgtttgtttgttttttttttttcagaatctaagtgagaaaactgtactcctgaataaaagaaacaactattaagcatcacacaaagatccttgagatccaattgtcacatgaatctctttgctccggaattcattggatggagtccctgccaaggctgttgaaaacttgaaatgcctgttttacaaattcaatagtttatgttatctttccctacctttgtttgttgactggagttcagtacttgcattcatcccaatttattacacgggatttaaccagccacagcaaagagctgataggatctctgacagtggagtcagttactctcttgtgataaagagcctcgttgattgatgctcttttgttttttcatttagcaatctttctgtctccccaaatgtattctctatcacaaggactgccacagattctaggttttccaagcaatctgtctttcacttgagcacagacctttgctttgttccatacaggacagatttctaagtttctttttcttgttcccttctaagcgataggtacagggacagaaggacatttatttcagtcaactaaatttttaaagatgtttgtgcatttcagatttttttaaaatgcaatatattttttaagttggattcctttttgcttttctcccaggacagttactctctttttttccccttgcaatggaagccctgaccttgacagatcaacgacttagagaagcaaggtcagcaagtgtctacagtaggagcaacagcttccttattagatgcttttttttttaattagatggattttatttgcaagttttttttgttttccttccagacctttgagccatatggaggatgtcattaatggcaactcagtaatgaggatgtttgctctctctcactcagaaccagaaaaccttcctgtgtggcttgaggagacagatttccagctgatccctcaatatcaagtgaaaacttgcatggtgaatgttcggtgtacatgttaagctttactgagatttactaggtaaattgaagtaggcagtttggtgcaacaaccacttatggtacagagtgttcttcactaaatgcatcataattttattgtgaaagactcttagaggaggtaatgttctttctcaaagaagaaagcatttgctactgctgggaagaactagatatgcaaaactacagggaatgcattttaaaatactcctgctggaggagccccatattcaaatgttagttacagtagctcttatataatttattgcatgatttcccagcatttgtaaaaccaaatattttttatatattcataacatatggtaggggccagtttatttcagcacttgtacatgctcacattttgtcagcattcataatatctgcagtacaaaacagaatgttataagatacctttttcctataaaggatctgatgattaaagccactggatttttaaaaacagatttgcaaacaagttttcttcatcctctgtaatctaacactatttgtatttaaatcattgccctttgtgtcattaaagcaagtcacactttccttgttccacttcagaatattttagagacatctactggaaaagagcattattgcaaattttataaaacagatttaagtgtatgttactgctgactttttgaaaagtatcttgaataccatatcacaaaattaggtcctttctaaaggcaaaacccttgtgcaaactgtctttgatgactcactcctcattatgtacaaatatatatgtttgaaaagagaaaatgacataacaaatgtaaaacatatcagaactattactttgatgttggacttagtrctccttttttcccccaataaagttctattcatttagatttttaaaaattggtttccttttgataatatgatgaatatttttataaggtaatctagaactgtggctaccagtattttgattatctgagttgcagctaaagtacgtgcgtagcagattagcatattgtggaataaagagagaatcgccatgtattctgagtcaccacatctctttctaacagtttcgagatggatccacatccccaaagaaatagaaagaagggtataaaagaaagaaatggaaagaagggtacaaaagtgggggagaagaagtaaaaaagtacaattgcaaacagctccaatttattcctgagctggtgatattccctgcatatttagaagatcttcctactgcaatttggttagctattagaaggggaaaatgtgcaaatatcctcccaggagagatataatgaaggttcaagggacaaaggacacagtagttcctaatacaaccagtgcatcaattgcactaatagaaaattcagccattgaaaatacaactgcactaaaaagtgaaaagtagaatggtcaaagtatagcagagagcaacaggaggctattttggaatcaaagctatattagaattggttgtatgacaa

SEQ ID NO: 714194 - DNA, 1178 bp, Homo sapiens
cccaagtataaaatttcccccactgatctatgttgaagagatagtgtagctttctttcactttgcagacatagacggagcacatgtttcagctaggcaactcaatgtggtcatcctccacctgactgttcatcctgtgactcttactgctatagttgccaccagagaatgtgaaaaagctcagaggagaaagaagagaggaagaatgggcaatgtgtctgtgttgagtgtgtgtgtctatgcctgtggatgagagtgtgtgtctattcttttccaaggaattcaaagtggtttgtaaaataacactcaattgaatacagttcaagttacagaaaagagagtcagagtttgggtgtataccccaaggtggaactttaggaacaagtaggtaataagcatcaatttctttattcttttagtatgtgtgtcatttgatggatgaactatacaaatgtttctgagagattagtagcagccctcaagcacttttctctgtcctcagtgttcacagagaccaaatgatcacatgaagtaactctatcaaagactaatctgttctttccattttagggccacaaataggtctctttatacacatcacaggggcatatcaaagtcatattttaaaaatcagaatggattaaaattgacaaacatttttcatgatggtaaaagaaatcacagatccatcaatgattttgattcttaagaatattcttgattattttttaaaagactatgagtttttaaaactgttctctgaaatasaattatgtaggtacagaaacattcatttttaaaaagtcataaatattagggcaaaattaaaaatctggaaaagcaaacagtcgcattttttactattagctcaaatacacacgttcacattcacctacctacacatacctctgactcagtccacctttttgacaagcaatgatgcaaaaatgaatcaagagagagaactaccagcatttagagtattgattatcctaacccatcactcatgaacaagcaccaaactgacatttggggtttacctacctacatagagaacaccctcttttgtctttcctgctgcttctgccacaccctgtttggttttctcagcagcagccacaactccctccttggcctttgaaagtcctttcatgaatacatccatggctaatgaattcc

SEQ ID NO: 714195 - DNA, 549 bp, Homo sapiens
gtgttatgttatygcacaagtttagtaaaaagggaactaaaggaatcctttctcaggcctctatttgccacaactgtaaaccacatatttgaagaaaggggaaggagatcgtgtgacttggtaaagtattggaatcaggagtgaagtgcaagcaatacgttctaaatggaatttccaaagatacattttaaaatatttggtttaataaataactaaattgccgggcgtggtggctcacgcctgtaatcctagcactttgggaggcctaggcgggtggattatctgaggtcaggagttcgataccatcctggccaacatgatgaaaccctgtatctactaaaaatacaaacaattagccgggtgtcgtggtgacgcctgtaattccagctacttggggggctgaggcaggagaattgctcgaacctgggaggcggaggttgcagtgagccaagatcgtgccacggcactctagcctgggcaacagagtgagactccgtctctaaataaataaataaatataaaaaataactaaattaagtctcaggttcg

SEQ ID NO: 714196 - DNA, 549 bp, Homo sapiens
gtgttatgttattgcacaagtttagtaaaaagggaactaaaggaatcctttctcaggcctctatttgccacaactgtaaaccacatatttgaagaaaggggaaggagatcgtgtgacttggtaaagtattggaatcaggagtgaagtgcaagcaatacgttctaaatggaatttccaaagatacattttaaaatatttgktttaataaataactaaattgccgggcgtggtggctcacgcctgtaatcctagcactttgggaggcctaggcgggtggattatctgaggtcaggagttcgataccatcctggccaacatgatgaaaccctgtatctactaaaaatacaaacaattagccgggtgtcgtggtgacgcctgtaattccagctacttggggggctgaggcaggagaattgctcgaacctgggaggcggaggttgcagtgagccaagatcgtgccacggcactctagcctgggcaacagagtgagactccgtctctaaataaataaataaatataaaaaataactaaattaagtctcaggttcg

SEQ ID NO: 714197 - DNA, 595 bp, Homo sapiens
ctaggagactgatttttgaagggcttttgatcatcctccacccagtgtcaaagccagtcatgaatcctcagaaccaaggaggtcctggcaagttctgttgtggttacccgtcggacatccctgtctggtcaccggggctccgaggggtgccctgctctcaggatgctgggatatgagtgtctaaagtgggcctttcactcatcagtgattttcccaggctgttacctgtgtgtgagtctgagatacagtgaccaggcaggtgacttcaaaactgtccacagagactgccaggggcttgtcaggtgaatggaaaatgaaataaatataagaacatcrccaaggtaggcagcaagaaagagtagaatttaaacttagtcagagtccattttttttgctttgtgactttgaaatgaaatacagagcaaaggagagtcttgaggttttttaaacactcttgtgaaaggggaaaagggtgtttccctggcactgctggtgcagacctgtcttgtcgccatgcctctcaaaattaagaaaatcaaggactttctgctcacagacaaaaggatgccaaataactcaggatcaagaaatataa

SEQ ID NO: 714198 - DNA, 595 bp, Homo sapiens
ctaggagactgatttttgaagggcttttgatcatcctccacccagtgtcaaagccagtcatgaatcctcagaaccaaggaggtcctggcaagttctgttgtggttacccgtcggacatccctgtctggtcaccggggctccgaggggtgccctgctctcaggatgctgggatatgagtgtctaaagtgggcctttcactcatcagtgattttcccaggctgttacctgtgtgtgagtctgagatacagtgaccaggcaggtgacttcaaaactgtccacagagactgccaggggcttgtcaggtgaatggaaaatgaaataaatataagaacatcgccaaggtaggcagcaagaaagagtagaatttaaacttagtcagagtccattktttttgctttgtgactttgaaatgaaatacagagcaaaggagagtcttgaggttttttaaacactcttgtgaaaggggaaaagggtgtttccctggcactgctggtgcagacctgtcttgtcgccatgcctctcaaaattaagaaaatcaaggactttctgctcacagacaaaaggatgccaaataactcaggatcaagaaatataa

SEQ ID NO: 714199 - DNA, 1883 bp, Homo sapiens
atacttcgtggatgaacttgacaaaattagattttcttttgccaagtgtattagggttctccagagagacagaactaataaagtataggaagggatttatcataagaaatttgctcatgtgattgtggagtctgagaagtccccagatctgcagtcagaaagctggagacctgggagagctgatggtgtagttgtagtctsagtccaaaggcctgggaaccagaagagccaatgatacagttccagtctaaaagctggctgacccaaggctcaagaagagctgatgttttagtgtgagtctaaaggcaggaaaatccgatgtcccagctcaaaggcagacaggcaggaggaattacctcttacttgagggaggtttgggtcttttattctagccaattgattggatgaagtgcacccacattaggcagggaaatcttttttgctgagaatgttaatctcacccaaaaacacactcacagacacacccagggtaatgtttgaccaaatgactgggcaccctgtggggcagtcaagttgacacagaattacccaacacagcaggtgagattcaatcacatgattcagtaattttaataattatatgattaaatgctaataaatttacatgcaaagaattttgcctatattataagctcaagtatttggccatagaacatttaaagacatgcttagccaatttaaggaaaaattagttagccattgcaacattatcttcaaagctattgttggaataaaaactatcctaaaaaagtagcccccacttaatgtgttgattaattcatctatctagccatgaatgtgttccacaaactttagttgagtatctactatatgctaggcactgtgccaggcatatggcacacagataccaaagaaaataaacctggtttctgccagctaggaactctgtctggcaaggtgggacagccaaataaataaattaggaggaaagtgttaatggtaggctggcctgaccacacatcgtattagcctagagcagtcctcttttctatctcttttctcaatctacgaatagctctctatcatttgcaaacataccctaagttgggcaataaattttgcagccacctgggtgtaggcgatgtgagagaagtttctctaagatacagtaggagtgcccatggagggaacagatgatctagctgttggagggtgggagaaggagagccctcaatcctgggattaatcctgaaaaatgagagtggtgtttaagatgcagagagaaaaggaaaggagctttgtgaaagaagggaactctgtgcataaggaaaaagaggcagggctcagtcgtaggtgcaggacaattgtaaatatgcagatctggctagggcagtggggtctgaggggcttgggaggcaataaggccgtggggggttgcagccaccacatcccagaggcctcactctgttgtgctaaagagcttgaatacatcccgatggcggttatatgacacagtggcagtcatggcagataatggtttggttagatttgtgatttagaacaacaaacacatctggtaaaagttgacttcctgggccggacatggtggctcacgcctgtaatcccagcattttgggaggctgaggttggtggatgacctgaggtcaggagtttgagaccaggctggccaacatggtgaaaccccatctctactaaaaatacaaaacttagccaggtgtggtggtgcttgtctgtaatcccggctactcaggaggctgaggcaagggaatccaggaggcagaggttgcagtgagccaagatcatgccactgcactccagcctgggtgacatagcgagtttccatctcaagaaaaaaaaaagtttaaaattcaattattaca

SEQ ID NO: 714200 - DNA, 1883 bp, Homo sapiens
atacttcgtggatgaacttgacaaaattagattttcttttgccaagtgtattagggttctccagagagacagaactaataaagtataggaagggatttatcataagaaatttgctcatgtgattgtggagtctgagaagtccccagatctgcagtcagaaagctggagacctgggagagctgatggtgtagttgtagtctgagtccaaaggcctgggaaccagaagagccaatgatacagttccagtctaaaagctggctgacccaaggctcaagaagagctgatgttttagtgtgagtctaaaggcaggaaaatccgatgtcccagctcaaaggcagacaggcaggaggaattacctcttacttgagggaggtttgggtcttttattctagccaattgattggatgaagtgcacccacattaggcagggaaatcttttttgctgagaatgttaatctcacccaaaaacacactcacagacacacccagggtaatgtttgaccaaatgactgggcaccctgtggrgcagtcaagttgacacagaattacccaacacagcaggtgagattcaatcacatgattcagtaattttaataattatatgattaaatgctaataaatttacatgcaaagaattttgcctatattataagctcaagtatttggccatagaacatttaaagacatgcttagccaatttaaggaaaaattagttagccattgcaacattatcttcaaagctattgttggaataaaaactatcctaaaaaagtagcccccacttaatgtgttgattaattcatctatctagccatgaatgtgttccacaaactttagttgagtatctactatatgctaggcactgtgccaggcatatggcacacagataccaaagaaaataaacctggtttctgccagctaggaactctgtctggcaaggtgggacagccaaataaataaattaggaggaaagtgttaatggtaggctggcctgaccacacatcgtattagcctagagcagtcctcttttctatctcttttctcaatctacgaatagctctctatcatttgcaaacataccctaagttgggcaataaattttgcagccacctgggtgtaggcgatgtgagagaagtttctctaagatacagtaggagtgcccatggagggaacagatgatctagctgttggagggtgggagaaggagagccctcaatcctgggattaatcctgaaaaatgagagtggtgtttaagatgcagagagaaaaggaaaggagctttgtgaaagaagggaactctgtgcataaggaaaaagaggcagggctcagtcgtaggtgcaggacaattgtaaatatgcagatctggctagggcagtggggtctgaggggcttgggaggcaataaggccgtggggggttgcagccaccacatcccagaggcctcactctgttgtgctaaagagcttgaatacatcccgatggcggttatatgacacagtggcagtcatggcagataatggtttggttagatttgtgatttagaacaacaaacacatctggtaaaagttgacttcctgggccggacatggtggctcacgcctgtaatcccagcattttgggaggctgaggttggtggatgacctgaggtcaggagtttgagaccaggctggccaacatggtgaaaccccatctctactaaaaatacaaaacttagccaggtgtggtggtgcttgtctgtaatcccggctactcaggaggctgaggcaagggaatccaggaggcagaggttgcagtgagccaagatcatgccactgcactccagcctgggtgacatagcgagtttccatctcaagaaaaaaaaaagtttaaaattcaattattaca

SEQ ID NO: 714201 - DNA, 1883 bp, Homo sapiens
atacttcgtggatgaacttgacaaaattagattttcttttgccaagtgtattagggttctccagagagacagaactaataaagtataggaagggatttatcataagaaatttgctcatgtgattgtggagtctgagaagtccccagatctgcagtcagaaagctggagacctgggagagctgatggtgtagttgtagtctgagtccaaaggcctgggaaccagaagagccaatgatacagttccagtctaaaagctggctgacccaaggctcaagaagagctgatgttttagtgtgagtctaaaggcaggaaaatccgatgtcccagctcaaaggcagacaggcaggaggaattacctcttacttgagggaggtttgggtcttttattctagccaattgattggatgaagtgcacccacattaggcagggaaatcttttttgctgagaatgttaatctcacccaaaaacacactcacagacacacccagggtaatgtttgaccaaatgactgggcaccctgtggggcagtcaagttgacacagaattacccaacacagcaggtgagattcaatcacatgattcagtaattttaataattatatgattaaatgctaataaatttacatgcaaagaattttgcctatattataagctcaagtatttggccatagaacatttaaagacatgcttagccaatttaaggaaaaattagttagccattgcaacattatcttcaaagctattgttggaataaaaactatcctaaaaaagtagcccccacttaatgtgttgattaattcatctatctagccatgaatgtgttccacaaactttagttgagtatctactatatgctaggcactgtgccaggcatatggcacacagataccaaagaaaataaacctggtttctgccagctaggaactctgtctggcaaggtgggacagccaaataaataaattaggaggaaagtgttaatggtaggctggcctgaccacacatcgtattagcctagagcagtcctcttttctatctcttttctcaatctacgaatagctctctatcatttgcaaacataccctaagttgggcaataaattttgcagccacctgggtgtaggcgatgtgagagaagtttctctaagatacagtaggagtgcccatggagggaacagatgatctagctgttggagggtgggagaaggagagccctcaatcctgggattaatcctgaaaaatgagagtggtgtttaagatgcagagagaaaaggaaaggagctttgtgaaagaagggaactctgtgcataaggaaaaagaggcagggctcagtcgtaggtgcaggacaattgtaaatatgcagatctggctagggcagtggggtctgaggggcttgggaggcaataaggccgtggggggttgcagccaccacatcccagaggcctcactctgttgtgctaaagagcttgaatacatcccgatggcggttatatgacacagtggcagtcatggcagataatggtttggttagatttgtgatttagaacaacaaacacatctggtaaaagttgacttcctgggccggacatggtggctcacgcctgtaatcccagcattttgggaggctgaggtkggtggatgacctgaggtcaggagtttgagaccaggctggccaacatggtgaaaccccatctctactaaaaatacaaaacttagccaggtgtggtggtgcttgtctgtaatcccggctactcaggaggctgaggcaagggaatccaggaggcagaggttgcagtgagccaagatcatgccactgcactccagcctgggtgacatagcgagtttccatctcaagaaaaaaaaaagtttaaaattcaattattaca

SEQ ID NO: 714202 - DNA, 874 bp, Homo sapiens
cttattagaccttaatatttctctttaagagatatcaatgaaatagtttcatcccttgagtttctctcgatataaccctctgattgtggaaataatagaatgttaaagatatgaaagctaaaaaataccttatcaataaattattcactttatttttcagttgaraaactgaagcctagagcaaggacatagagttagcatgtctaaaacacattctttaagtggtgttcattttgttaggggaaaaaactacctcttggatcttaaatgccacataattggtgaaaaatgtactgatttgaataattgctgtttttgctaacagctggattccaatggggaattactaatccgaaatgcgcagctgaaacatgctggaagatacacatgcactgcccagacaattgtggacaattcttcagcttcagctgaccttgtagtgagaggtaagagtttcaacattttaaaattacaaaaccaaaagtatttgacttgcataaacatgtataatcttctggtaactctggtgcaaattcttacatatttagagtctcaatcccatgcttaagaatggatcttaagcttcttcccatgcctaagaatgatctatgccagacaagtagtaaacaacactgattttgtttgttttactaactacgtatcttctagaaagttacaccacatatctcctactaaatgtttgtgctttgtagacttaccaaaagttctcgtttcctgctaatactttttagtgtgttgtgtatagtgctgtttccttttttatttctatggaaaagatatatactgatgctgtttactataacctcaactgttatatatttatcacttttgtcttagagtgtaaagttaattt

SEQ ID NO: 714203 - DNA, 3346 bp, Homo sapiens
  misc_feature 1137, 1138, 1139, 1140, 1141, 1142, 1143, 1144, 1145, 1146,1147, 1148, 1149, 1150, 1151, 1152, 1153, 1154, 1155, 1156,1157, 1158, 1159, 1160, 1161, 1162, 1163, 1164, 1165, 1166,1167, 1168, 1169, 1170, 1171, 1172, 1173, 1174, 1175: n = A,T,C or G
  misc_feature 1176, 1177, 1178, 1179, 1180, 1181, 1182, 1183, 1184, 1185,1186, 1187, 1188, 1189, 1190, 1191, 1192, 1193, 1194, 1195,1196, 1197, 1198, 1199, 1200, 1201, 1202, 1203, 1204, 1205,1206, 1207, 1208, 1209, 1210, 1211, 1212, 1213, 1214: n = A,T,C or G
  misc_feature 1215, 1216, 1217, 1218, 1219, 1220, 1221, 1222, 1223, 1224,1225, 1226, 1227, 1228, 1229, 1230, 1231, 1232, 1233, 1234,1235, 1236: n = A,T,C or G
tccttatatgtaaaaagaagatacaaatttaggttgaaggctatgggatataggtgatcaataaataggagccattattcctgatgccctggtatagcattagtgagacagtcccacttgagaaatgtgatggagcactcagtgtgtagtaggtactgcctccagacatgggaattcaggaatgtgaggcatgcctcctgccctcagtgagtctctaggctggtgaaggagtacaggtagtaaataagtacatagagagtagaacatagagcgtgccatggtttgagtaagcccagtacactatggaagcctgtaagagagtagtctgggatgaggagggaaggctaccccaaggaggtaacccatgagttacagctttataggttaagtaggaatttgccaggtgaaggaaagatgggaaaggaagaggcctacactaaagcagaaatgccagagagaatggtgaactctaagaattagagtcctggatgaacgtagtattacacagaaactggggtcacattatgaaggagtttgggtcttatgtgcaagtctaacaggattgggtcatgggaagcatgttcagcagaggagtggctcattgcctagtctgactggaagtccactctggctggagtgtgaactgtgactgcactaaggccaacatgccaagtagggagcagagccacttgcaaatacctctctattaacagatgaggaggcggctgcagtattgcagccagacccgatgagggcttgtgaaactgcagagtcccagtatccttgaattatgttgattgccttctagttagtcttctgtctttcctttttaaagaagaaagaagtcaaactagaaaagcagccatcttgaggatatgattaagttgccattcaacaagggtaaggtttctggggagacaggcatatttgttggcactacacctaaaatattcatgaggcacatttagttcagcaggaatattgtgattgtcttccagagaagaaggtctaaaatcagaaatccaaaccctggttcctgccctggggaatcacttactctgggcaagggagacagacttacaagcccagacagatatcccttatctaactgtatgcccgatgatgtactactagagnnnnnnnnnnnnnnnnnnnnnnnnnnnnnnnnnnnnnnnnnnnnnnnnnnnnnnnnnnnnnnnnnnnnnnnnnnnnnnnnnnnnnnnnnnnnnnnnnnnnaaaatattttcataggggctaaaactcccgaagttgaccatataccacgctaggagaaagaaaagtctgataccatgtccttgtacttaactgttgccatcatagcaccagcctgcccttagcatggcatgtaacccatgagttacagcttcataggttaagtatctacatttagtaggtgctgaataaaggttggatgagggcagcaggatggaagaagaggcggaaggagataagcccctctgcctataggggcagactccagaagttacacatatcacttcctctcagattcaactggacagaaaatgagaatatggactcatctggacacaagaggggctgagaatatcacctttttcctgtgtggtcctatgcccagctaaaagtcaggattctattataaacagaagaggaaggtggatattgggagacacataacaatctctagtgcaggtgacaaatgaatcctttaaataaatgaccagaactcaagttctaggattcacatatgctaaacagcaatccagagggagttaataagtcctgaaaacacagtcttaggagaagtttgtcaagatttcatgaaacaaggaagctttgatctggggtttcaaaggcatggcaggtacaaggcactcttcaatcggattacttctttctaggtcagttggagagattacggcccggtaggctgcttctccagtcccacttccatgccttggcacttgcagttcttccatgctgactgggcatcccatgcacttaccctgttgtatgtgttgctgccattcacttaggtaattctgttcatttgcaggtagatctctattaacagatgacaggaccatttctgatcaaacccagagtatcattcacatmttttacagccattggttggggcgtgagttgcatagaataaaccagtaagtttctgcttatgtagatgtgtccatcctcagcctttcccaacccttttagatgcaacagaacccatgatacagccatgggctgtagagagacagaaggagggctgaaccaggaggcagagcactgggtgtagtcttcagaccactcactttgggcatcatggagagggaatgggatttagagccagaccagcgtgggctggaaccctggccctaatagttactaattttgcagtcttgggaagttttcccctctgtaaagtatgtataataatgctactcttcagggtgttgtaactgaaataagaatgtacctaaagcatgtaggtactcaatagatggttgttattgttattattgcctcttctctaaattttgatattgaaaataccttaagttctactgagtctattaatgatatttagctctcttaaagacacagcagttctgctatattgagaatcatctccatccaaaaaatatatggcatttttctgaaattcacttaatttctaagtaaacttcctacatagagcatcatccatttttgtgaaggaataaaagaaaaatccatcaggtctttctaagcttcaaataaaaataactcttagacaaattctctataaggtcactaattttgatgatatcagttgcttcatttggtacaacactgtgccaaaaataaaaaattgtttaaaacagctatttatttgccagtactatggagaaataagccagcaacaatcagtattaattccactaagagatttctttggaagaagtatgaatcaatcttcattcttttttttaaacaaatattagaaaacaaagtttcttcacaagagtgttaagccgggacactgcatgcttctcattcattccaccttctaatttgtgttgtagaatagaaggtctgagcacaaaaattttataattacttcctgatggtattccagcttcagattctttcttgtgcatggaagtaaaataaactcaagagtaccttgaactctttaattctgaatgagcacaacataataccatctgaatgcttcaacttcccttgaaccttctgcttttctgcttgatcctcctacacaattattccaggcaattattgtcattactcaggcatggaatctgaacccatctttactaacttcatatttaagcaaaaccaa

SEQ ID NO: 714204 - DNA, 1302 bp, Homo sapiens
gccaagattattttttctccattgaatggtcttggtacactggtgggattttttgctaaaatctgggctcagcaaggacttgcaggaggcaaggcccaaaggcctcattgaaaagaagcctcagagaagcctgactaaagtgtggtcaaagagagagttcaatcaaattcagtcattacaattattaaattattcaagttattcaagtatttcaattacagagtgactaaacaagtagattctattaggctacaaagcatttaaatttttttttgatttaagtcatacagtagattctacttttgctttgtaatattgtgagagtatttttttctttatgcatgcaaacatatacagagtaagacattttacaggcacatgaagatttcactgagataaatttataaaatttctcttccctattatagccaggaggtttctcaattttcactttcatcttgtcaacttggcctgtaagagttatatcagactttgttattctttatattacacaagtggtcaagtgatgtctttgtcttatttcttacaactggatgtgaaactactattatctcagaaataacttttaaataacagcaacaataattgcacgttgtattcaacacatttaaggtgattaaatgtgattgcaggattatggtactataatgccgataacaattttaatcaaattttggaacctgtggtggagtcaggacactgttttcattttatgtttgttcttcgtggcaagtaacatgtatttttgtctcaagttcatataaaaagcccttctgggtttatttctgtctattttgcatgtttattcttcctatgcctgatccaagaaaagttttaagcagcacaaaataaaaggcaattgcataatgaaaaaaatatggaaacagagaacagatcaatggttggcaagggtaaggggaggrgctccatgaggaattttggtgtgccgcaattgttcttatcctttctttggtgttattgacacaaatctctgcatttgtaacgcttaatagaactgtgtgccaaaaacataatttttcctgcatataaatgacaaaattttcttaaaacattgaaaagatataatagaaatctggaaaaacaatccccaaaaatgagcatattataaatctaggataattctattgagttctgttttaaggaattgtgtacaaggtacatatggaatcgaagtcagcatgttttcacactatagaactctgtgattgaagtcaaggtcaaaaatgctgtcatcggtcatggaaagttttccaaattttc

SEQ ID NO: 714205 - DNA, 1302 bp, Homo sapiens
gccaagattattttttctccattgaatggtcttggtacactggtgggattttttgctaaaatctgggctcagcaaggacttgcaggaggcaaggcccaaaggcctcattgaaaagaagcctcagagaagcctgactaaagtgtggtcaaagagagagttcaatcaaattcagtcattacaattattaaattattcaagttattcaagtatttcaattacagagtgactaaacaagtagattctattaggctacaaagcatttaaatttttttttgatttaagtcatacagtagattctacttttgctttgtaatattgtgagagtatttttttctttatgcatgcaaacatatacagagtaagacattttacaggcacatgaagatttcactgagataaatttataaaatttctcttccctattatagccaggaggtttctcaattttcactttcatcttgtcaacttggcctgtaagagttatatcagactttgttattctttatattacacaagtggtcaagtgatgtctttgtcttatttcttacaactggatgtgaaactactattatctcagaaataacttttaaataacagcaacaataattgcacgttgtattcaacacatttaaggtgattaaatgtgattgcaggattatggtactataatgccgataacaattttaatcaaattttggaacctgtggtggagtcaggacactgttttcattttatgtttgttcttcgtggcaagtaacatgtatttttgtctcaagttcatataaaaagcccttctgggtttatttctgtctattttgcatgtttattcttcctatgcctgatccaagaaaagttttaagcagcacaaaataaaaggcaattgcataatgaaaaaaatatggaaacagagaacagatcaatggttggcaagggtaaggggaggagctccatgaggaattttggtgtgccgcaattgttcttatcctttctttggtgttattgacacaaatctctgcatttgtaacgcttaatagaactgtgtgccaaaaacataatttttcctgcatataaatgacaaaattttcttaaaacattgaaaagatataatagaaatctggaaaaacaatccccaaaaatgagcatattataaatctaggataattctaytgagttctgttttaaggaattgtgtacaaggtacatatggaatcgaagtcagcatgttttcacactatagaactctgtgattgaagtcaaggtcaaaaatgctgtcatcggtcatggaaagttttccaaattttc

SEQ ID NO: 714206 - DNA, 563 bp, Homo sapiens
gttttaaatgctaaaatggctcagcctacctacactctcaaaatcatctgattcactggaggggattaagaaaatgtactggagtgttagaatggatttccaaaggaatcacatgtttacctcaaatcagaggttcttggccatagctacaagctttggctcttawtctcaccttacatgaaatattttgggatgtttctcaccgtttcaaagatttgaaatttaatttcaagtagctgaatagaaatgacatttcctaaattaaaaaattagcactaactgtatgacacccttcatacaaatactttttaatcttaaaataaacaaagctcctctgactacaaatgaaatttaaatcagaaactggaacaccacctctagtaggccagtctttccttgccatccctgagtgagaggggtctctggtaaagggtatcaatcctacatatatgttattagcagcattgctttctgtttcttaagataggatgacaagaaatcttgctttctcaaccctgtttggaggtgagagtattcaattcagcacacatgtgttgagttcc

SEQ ID NO: 714207 - DNA, 563 bp, Homo sapiens
gttttaaatgctaaaatggctcagcctacctacactctcaaaatcatctgattcactggaggggattaagaaaatgtactggagtgttagaatggatttccaaaggaatcacatgtttacctcaaatcagaggttcttggccatagctacaagctttggctcttattctcaccttacatgaaatattttgggatgtttctcaccgtttcaaagatttgaaatttaatttcaagtagctgaatagaaatgacatttcctaaattaaaaaattagcactaactgtatgacacccttcatacaaatactttttaatcttaaaataaacaaagctcctctgactacaaatgaaatttaaatcagaaactggaacaccacytctagtaggccagtctttccttgccatccctgagtgagaggggtctctggtaaagggtatcaatcctacatatatgttattagcagcattgctttctgtttcttaagataggatgacaagaaatcttgctttctcaaccctgtttggaggtgagagtattcaattcagcacacatgtgttgagttcc

SEQ ID NO: 714208 - DNA, 563 bp, Homo sapiens
gttttaaatgctaaaatggctcagcctacctacactctcaaaatcatctgattcactggaggggattaagaaaatgtactggagtgttagaatggatttccaaaggaatcacatgtttacctcaaatcagaggttcttggccatagctacaagctttggctcttattctcaccttacatgaaatattttgggatgtttctcaccgtttcaaagatttgaaatttaatttcaagtagctgaatagaaatgacatttcctaaattaaaaaattagcactaactgtatgacacccttcatacaaatactttttaatcttaaaataaacaaagctcctctgactacaaatgaaatttaaatcagaaactggaacaccacctctagtaggccagtctttccttgccatccctgagtgagaggggtctctggtaaagggtatcaatcctacatatatgttattagcagcattgctttctgtttcttaagataggatgacaagaaatcttgctttctcaascctgtttggaggtgagagtattcaattcagcacacatgtgttgagttcc

SEQ ID NO: 714209 - DNA, 1041 bp, Homo sapiens
ttaaggatttattgtaactataawtataataaagaagttgtagttataatttttttaaagagtcattatctcttagagatacatactgaagtatttgcagatgcaatggattaatgcctacaataataatccagctgacagtgggtgcagggaggtgcaggagcttagagacggagaaggaagaagagagaccatagttcacattgtagaagctggatgatgtgtgtacaccagaattcatgagactatattctcttttgtgtacatttcaaatttctataaagttttttaaaatcagtatttccataaagaggatcatgacttccaagtctgctatctccctcaaaaaactgagccattggactagacagtcatttatttcttataacgtttattaaataattttttaagcctttatgttttaagtccgacaaagagaatgcaagcccccattggtccttatgcttctcgaaatacctgctaataatgtgtctccacatcactggtggttaacagatggcagtacagagaatgacagacaacaggaagtacattgatacctttgtttccttcaggggtcagcttcttcttttcttcctgtactatggactcctctaggtccttaggggttgggtctaaaagttcccactcttcattggtataaaacacagtcctccgactatcattatgtcctctcccaggacggaaagaagacatcgaattcctgttgggaaaaacaatatgtgttattaacaaaaacaaaagtaaaacaaaacgtaatctcatgtatataggattggcaaaaatttaaatatctaatgataccaaatgttggtgaggatacggagaaatggggattccctttttttttttgaaatggagtccccctctgtcacccaggctggagtacagtggtgcaatcttggctcactgcaacctctgcctcctgggttcaagcaattcgcctgcctcagcctccctgagtagctgggattacaggctgcaccaccatgcccagctaattttttttttaattatttt

SEQ ID NO: 714210 - DNA, 609 bp, Homo sapiens
gcaaatcacatccattaagacatcagctaactttcccaattttgtttgtttcttattaaaaagtggaacaaggcctaacagttgtgaaacaatctaagcataaaatcttacagggttttaagttttttttctttgatttttcacgatcatgtcacccacatcctcacagcaattttttcagtgactcacctttatcaaattttccctaagcattcaacttatttttcctagaaacaacaattccttttttatatttcaygggtttagtaaatatctcattgaattacataattacaataataagtacaacgggcattaaccagtgaggaacaaacccagctgattcttggtaggtctgtagctcagctggtgggggcagcagggacacaggtgccctgaagtggcccatttggtctcatgcagtcagtcagtgaggaccatggctctactgaggaaccttaaaatgtcagttcatcaggggagctagttaagagagtttcaactatactgataaatagaataaaagaataaaccttcatttatcttttaagccttgaccataatgttgacagcattttgagtgcattaaaaaatacaatttttgagcca

SEQ ID NO: 714211 - DNA, 1228 bp, Homo sapiens
tctttttttttttccttagagtgaagcacacctggattggatagtgcttgttattacagataagggtgcactttctagattcttctcctgagtggcaaagttttcccaccgtcttgtccaaacatactttgctgatggtatctctgggcactacacagtgcaagggacaaggaaaaagggcttttccagaggagagtgacctgcatcttggaggaactctagaacatgttcgaggaatggtgactggggcttctggagccaagggctgactcagggaacagatctcagctcaaggtgaggtcatttctgtttcctgcatgtccctccagctgctgacattttacctcttcaaggactgattcaaatgccatctccattgtgcaatcttccttgatcaccccccaacttccatctgagacttctgagtttctccctcactagatctggagggtaggagtgggtcttgttcattttttgttctyacagtgcacttgctagagaatggcttgggaagcctttgtaggattggactggccctcagcgaaagttcagcagttaggagaactgccttagtacttaggaagcttcctagtgtgaatgccagcatcatcacttactagctgtacttcagttttctcatagggttgttgtgaagattaaatgaagactggacaaagtcagtcaatgtttatttcacaatcactgagcagcaagtattccttgtgtaccagtctctgttccagaaacaacgtcataagagatcatcaagattatctctggacttaaggcatatcttctctctatctcttttgagacagagtctcgctctgtcacccagactggagtgcagtggcatgatctcggctcactgcaacctctgcctcgtgggttcaagcgattctgatgcctcagtctcctgagtcactgggattataggcatgtgccaacacgcccaactaatttttgtatttttagtagagacagggttttgccatgttggccaggctggtctccaactcctgacttcaagtgatccacctgcgtcggccacccaaagtgttgggattacaggcgtgagtcaccacgcctggcccaaagcttatcttctcaatggcacacagcagaagagaatgtgatgtttcccaggagaggtgggagccaagtgctagagggctctgagtaaggagagggggacacattcgtgggtcttgggggcttttacaacttt

SEQ ID NO: 714212 - DNA, 2055 bp, Homo sapiens
aacacatatttgataacagacttgtatccagaatataaaacgaactcccaaaacccaatcataagaaagcacaaccaccttattttaaaaagtgagctgaagatttgaagaaaaccaccactaaaaatgatatatggatgagatggcaaataagtacatgaaaagattcttgacatattatttattgggaaaatgcaaattaaaccccaaatgatatactgccgcacactcwttaggatttttaagtgcagtgaaaagccactggagcatctaaagcagggaggttacaagagatttatcagcatttgttgaaaagatcacagtgattgttgtgcagagtagggaggtgacaagggaagccgagaccattgaagcagctgctgtgcgttagactaaggtgtggatgggaagaggagtcatctttcgtagttgagctagacttgtcagtggagcacttgcagtggattggatgtgtagggagaaggggaaaaaaaaaaagaactaggagtaaaaggtgaaagatttatatgatattaccttgactgtgggtatcatccgtgtttgtatatatccaaagccatcaaattgaacatattaaatatgtgcaatattttatcaattatacctcaatgaatctgtttttaaaatagaaacgggtgacttctaggttttaagcctcatcagtcagatgttcatggtgctatttactcggatggaaaaacactgggctgaagaaagcttggaggagaaaaatcagtaatttaaaaggattgtaatattgcatccctcatccttattttatttctctttctttctttctttctttctttttttgagacggagtctctctctgttgcccaggctggagtgcagtggtgtgattttggctcaccgcaacctccgcctcccaggttcaagagattctcctgcctcagtctcccttgtagctgggactacaggcatgcgccaccaggcatgactaatttttgtatttttattagaaatggggtttcaccatgttggccagactggtctcaaactcctgacctcaggtgatctgcccaccttggcctcccaaattgctgggattacagatgttagccatcgcacccggatgcatccctcatctttaaacactgaaaacatccctaccagccaaatggatggagttggagcgcaaatattttagctcattatatctaagtttgacttccgtcttgttactctgaataccagaacaaagagatattcacattagttgtcatgaaatcatcaaattgaaaaacctactgagacctactgtgtgctcagtactgggttggcatcacgaaaaacacaaaattataaacttcaattattgttcgtaagtaacttagaaactaattaatagcataagatatttatgagtagtgatccagaacaaaaagtaaagctgataaaaataatttatttagcacaccatcaacaatgtcctataggctatgtgtgcagattgtcaaatatgagggacagacacagagctgatgtgaaaggacagagtgatccctgtgcgctggagtggtcctggaagctctcttgatggaagaatggcttgatcttaatgcaaaataaccgagggagcattccagagggggatacaaatctacaacaaaatgcagttcttcctcctgtctcaggggaaagttaaccattttctttgagaaacagacatgtgaatagaaataactaaaataagctctttggaatcagtaaagagagcctatacaacaactacaaagaattttccagccatagactcatatcatgaaaagtactaaaatgaatattatccagtctaggcattctgccctactggaagcccctttatgggcagagatgagaattcaccatagtctttgattttctgatttgtaaagtctacaaagaatatgtagaatgaatgactaacattttaacaaaccataccttttgtactgagatatattttttttactaaaccttgtcctggataaacaacttttggcccataagccagggtagacaaagatcaaagtt

SEQ ID NO: 714213 - DNA, 2055 bp, Homo sapiens
aacacatatttgataacagacttgtatccagaatataaaacgaactcccaaaacccaatcataagaaagcacaaccaccttattttaaaaagtgagctgaagatttgaagaaaaccaccactaaaaatgatatatggatgagatggcaaataagtacatgaaaagattcttgacatattatttattgggaaaatgcaaattaaaccccaaatgatatactgccgcacactctttaggatttttaagtgcagtgaaaagccactggagcatctaaagcagggaggttacaagagatttatcagcatttgttgaaaagatcacagtgattgttgtgcagagtagggaggtgacaagggaagccgagaccattgaagcagctgctgtgcgttagactaaggtgtggatgggaagaggagtcatctttcgtagttgagctagacttgtcagtggagcacttgcagtggattggatgtgtagggagaaggggraaaaaaaaaagaactaggagtaaaaggtgaaagatttatatgatattaccttgactgtgggtatcatccgtgtttgtatatatccaaagccatcaaattgaacatattaaatatgtgcaatattttatcaattatacctcaatgaatctgtttttaaaatagaaacgggtgacttctaggttttaagcctcatcagtcagatgttcatggtgctatttactcggatggaaaaacactgggctgaagaaagcttggaggagaaaaatcagtaatttaaaaggattgtaatattgcatccctcatccttattttatttctctttctttctttctttctttctttttttgagacggagtctctctctgttgcccaggctggagtgcagtggtgtgattttggctcaccgcaacctccgcctcccaggttcaagagattctcctgcctcagtctcccttgtagctgggactacaggcatgcgccaccaggcatgactaatttttgtatttttattagaaatggggtttcaccatgttggccagactggtctcaaactcctgacctcaggtgatctgcccaccttggcctcccaaattgctgggattacagatgttagccatcgcacccggatgcatccctcatctttaaacactgaaaacatccctaccagccaaatggatggagttggagcgcaaatattttagctcattatatctaagtttgacttccgtcttgttactctgaataccagaacaaagagatattcacattagttgtcatgaaatcatcaaattgaaaaacctactgagacctactgtgtgctcagtactgggttggcatcacgaaaaacacaaaattataaacttcaattattgttcgtaagtaacttagaaactaattaatagcataagatatttatgagtagtgatccagaacaaaaagtaaagctgataaaaataatttatttagcacaccatcaacaatgtcctataggctatgtgtgcagattgtcaaatatgagggacagacacagagctgatgtgaaaggacagagtgatccctgtgcgctggagtggtcctggaagctctcttgatggaagaatggcttgatcttaatgcaaaataaccgagggagcattccagagggggatacaaatctacaacaaaatgcagttcttcctcctgtctcaggggaaagttaaccattttctttgagaaacagacatgtgaatagaaataactaaaataagctctttggaatcagtaaagagagcctatacaacaactacaaagaattttccagccatagactcatatcatgaaaagtactaaaatgaatattatccagtctaggcattctgccctactggaagcccctttatgggcagagatgagaattcaccatagtctttgattttctgatttgtaaagtctacaaagaatatgtagaatgaatgactaacattttaacaaaccataccttttgtactgagatatattttttttactaaaccttgtcctggataaacaacttttggcccataagccagggtagacaaagatcaaagtt

SEQ ID NO: 714214 - DNA, 552 bp, Homo sapiens
aaatacccaaatctcctccaattctttaatttaaattgcatgttctccttacattacaaagtttaatgtaaaactttttaaagtaagagaggagcccatacaaagttcaaacgaagttcatataagttttaaccctctactgctatgctgtgaaatcgccacaggtgagatctgagatcgtcccaagttcaaaaaaggagctacagagatcagtcctgtccatattcccacctcctagaaaaatagaaagtagtgactggttgatgcaggctttctttttttctttcttgattttgttttagaattgattgaattcaggttggtcttagccaaatctaagctgtgctttcttttttcaaaagctctaacagaattccagaacacaaggagagttttggggacagtggggttctttgagaagttggttggtggatgggttcgctcactcattctttytctcattcattcattattcttatttcatattcttaaggcaactatgaagtagatattactatatttatctcattctcaccactaaggaaatgaagc

SEQ ID NO: 714215 - DNA, 552 bp, Homo sapiens
aaatacccaaatctcctccaattctttaatttaaattgcatgttctccttacattacaaagtttaatgtaaaactttttaaagtaagagaggagcccatacaaagttcaaacgaagttcatataagttttaaccctctactgctatgctgtgaaatcgccacaggtgagatctgagatcgtcccaagttcaaaaaaggagctacagagatcagtcctgtccatattcccacctcctagaaaaatagaaagtagtgactggttgatgcaggctttctttttttctttcttgattttgttttagaattgattgaattcaggttggtcttagccaaatctaagctgtgctttcttttttcaaaagctctaacagaattccagaacacaaggagagttttggggacagtggggttctttgagaagttggttggtggatgggttcgctcactcattctttctctcattcattcattattcttatttcatattcttaaggmaactatgaagtagatattactatatttatctcattctcaccactaaggaaatgaagc

SEQ ID NO: 714216 - DNA, 812 bp, Homo sapiens
actagcttgcagtagcatctgttgattggatttgtaggtggactggctgacggagaaaatgagggaagccaacttcactgtatcctcaatgcatggagacatgccccagaaagagcgggagtccatcatgaaggagttccggtcgggcgccaggtgggtctgctatgctgtggctctgcaggtcagggtttgctagactgtgtctaagcacttcatatgtaccgcctaagtgcaggccccacacccggggggatgccaagcttctgctctgaaagctgaggccctgggtgagcagaaaaccttccagttaaggaggggtccgctgtgctcctgtaatacttaggttgaggtgataactagccttaactagccaggttggtcaccttggttacaagcgtgtgtcttcttttccagtaagtaggggggttttctgttcatygtttcgattagtttaattccacagtggtcagaaagcgtggattgggtggtttcattcatttgaacttgattcagacttccttctttgcccaccttgtggtcagcttaacatatgtgctgtgtgtgtctttttttgtttgtttgtttttgagacagtctcacttcgttacccaggccggagtgcagtggcacaatcttggctcactgcaacctctgcctcctgatttcaagtgactcctgtgtctcagcctcccgagtagctggaatggctaatttttttttttttttttcatttttagtagagatggggtttcaccatgttggccaggctggtctcgaactcctgacctcaggtgatccatctgcctcagcct

SEQ ID NO: 714217 - DNA, 1400 bp, Homo sapiens
gctcatgtgtattttctttacaatgtaagacaacagaatctgaatcaaatgctttaaatttcaacccatattattagagtggtaatagggattgatgagtgacagtcagtaagtgacagctcagtaagataggggcagtgttttgtacaaaacagttgttctaaagtaaatagaatttaatctatccaagtgactactaactcttagcactttaaaaagcaaaccttatagattctcaacacctttatcrttcatttactaaaacataagcatcattactactgtaaacagtagattctaagtgcctccagggtacaaaaatctgttaatcaccagtatgaaagtgaattcatacactgtgaactttttggaatgaattttgcagctgaaaattttgaaacacaaattccaggttatagatgaaatttgtagacattcaaattttatggtttattggtaaataaggcttgtaaaaaactaatggaggtcatatggagtttgttttcaatcattcccttagccagaaatgagtaattttttttaaaggatagcccttagacccatctgtactatgcaaaggaatgaactgcacaattagccaatgtgcaactaaacagaacatttcatttaatgaggccagataagaggcatgattcctatgtgtgaaagcagagtttgcaggggcttcccaggcatcagcctatctgggtgtatatagctatatctacagtgtgagtgcttatgcacacattactgtatctattagatatctattacctcataatagattattatattgaacggattcacatatattccaatcattagtatgaacagcggacttaacatgggtataaaaatttgaagtatttgctaaagaatttgtgtataaattctatatgcttacatctttattttatattctgctttgttttataaggctgcctttaatatgtatgaattaaaaataaaagattgaaactttaacaacaagaagctgcattccattttggtatcaaagataatgaacgtgcaagctgaaagttaatttccctctcctaggatgaattttttctccataaacgtttaatcataaaggaatcattagaactgcaatgcttcagtccaatgtctttaccgcccattgctccagtagcttagtcagacctccctagattactgtaatttacaaaatgaataaaaagtatgaaggctttgttcagattttcaatgcaccattaatacactgttagaaattggttccaaaaatgaaattgctaaattctggaagatttgatgtcttctcctaatgagaagcaacatccctcacttgctaaaggatccagacttttctgatagagacttgggctgtttattaataatgaatttgaatgttcgca

SEQ ID NO: 714218 - DNA, 1400 bp, Homo sapiens
gctcatgtgtattttctttacaatgtaagacaacagaatctgaatcaaatgctttaaatttcaacccatattattagagtggtaatagggattgatgagtgacagtcagtaagtgacagctcagtaagataggggcagtgttttgtacaaaacagttgttctaaagtaaatagaatttaatctatccaagtgactactaactcttagcactttaaaaagcaaaccttatagattctcaacacctttatcgttcatttactaaaacataagcatcattactactgtaaacagtagattctaagtgcctccagggtacaaaaatctgttaatcaccagtatgaaagtgaattcatacactgtgaactttttggaatgaattttgcagctgaaaattttgaaacacaaattccaggttatagatgaaatttgtagacattcaaattttatggtttattggtaaataaggcttgtaaaaaactaatggaggtcatatggagtttgttttcaatcattcccttagccagaaatgagtaattttttttaaaggatagcccttagacccatctgtactatgcaaaggaatgaactgcacaattagccaatgtgcaactaaacagaacatttcatttaatgaggccagataagaggcatgattcctatgtgtgaaagcagagtttgcaggggcttcccaggcatcagcctatctgggtgtatatagctatatctacagtgtgagtgcttatgcacacattactgtatctattagatatctattacctcataatagattattatattgaacggattcacatatattccaatcattagtatgaacagcggacttaacatgggtataaaaatttgaagtatttgctaaagaatttgtgtataaattctatatgcttacatctttattttatattctgctttgttttataaggctgcctttaatatgtatgaattaaaaataaaagaytgaaactttaacaacaagaagctgcattccattttggtatcaaagataatgaacgtgcaagctgaaagttaatttccctctcctaggatgaattttttctccataaacgtttaatcataaaggaatcattagaactgcaatgcttcagtccaatgtctttaccgcccattgctccagtagcttagtcagacctccctagattactgtaatttacaaaatgaataaaaagtatgaaggctttgttcagattttcaatgcaccattaatacactgttagaaattggttccaaaaatgaaattgctaaattctggaagatttgatgtcttctcctaatgagaagcaacatccctcacttgctaaaggatccagacttttctgatagagacttgggctgtttattaataatgaatttgaatgttcgca

SEQ ID NO: 714219 - DNA, 690 bp, Homo sapiens
aaagcagaggctcaaatataggaaaagagttatggtcaaaatgtagtcaagtatggattccaactctccatctccccagcaaagatacccaattgggaatccatccaccatcttaaaggtcctttcattgagatccttccttagagtaaccagaagagtgaagatgagtgagagtgggtgccagtgggagatgagaaaggaagcaaaattcaggtgtcttcccagtctcattcatatatatttacgaatgtgtacttggcaatgtgaaactgcagaactttaaaaagataaaaatacattaggtttgttgataagatgtaaaagttgctgaatgtttatctaagttttaaataaaaccaatattgcaatgtcccttagaagtgataaataaatttgttaggtatagaaatagaataatatgactcatattctcttcagcaggattctatccaagccacagttgaatacttccctcaagcctcattgtctctctctcccttcggctccaaacagtactacaggaggagggagcarcatggagcaatcagaagatgggctttagaatcccatgtgctgggtttgaatcctagctctgcctctcccaagctgtatgattgggcattttatttaacctgttgctcatgataaaagaagggtaaaaacattgcctacctcacagtaggaggttgg

SEQ ID NO: 714220 - DNA, 609 bp, Homo sapiens
cagtgttcaccaaaggaaggaaatgtaattttccttcctttttgtggctaaaaaggcagtaacagaagcatataatgtgttctcccagaaagagtcatgctcagttctcatagacatgtatattatttgaacatttcagaattttatgtgataggcatgccaacatgaatgatttaaaacttattacagtgagtggttgctgactatcattttgaagattatacctctgtgtagacttcatttttaatttaattgtttactaagaaatttatctttcctgggtgctgttacaaaatgtgcagctttttgacaaaaaaaaaatgagacttgattgttactaaattttagacaaggtatataagtaagtacgatcggtaaaaaaaaaaaaaaaaaaaagcatgctatttgaaaaaatagaagtagaaatatgaaaaaaaatatatttaagttcttccctggcacaaattttcctcttccaatctctcgttcacttctctcccttagttgttctgtgaaatmgtagctagaataaaataaataataaatctaggactaacaggcaaggtttcattccaagtaaagcgtttcagcaatttccccctgtgttaa

SEQ ID NO: 714221 - DNA, 3378 bp, Homo sapiens
ggattaagtgctggccccggagccagatgaccatcatctgagtcctcattcagcctcatactagttgggtaagtccctcagcctctcccttctgcgatgctctcatgggtaaagtaggcgacatttcccaccctatcttacagagtgagggtatagcatccaaggagggagcagctgtgagcaatggttcctgcaaactacaaatgtagaaggaaactattctgattcctctgccctctggagatcaggagggaatctccatcagcggcaggaatggactggccctggagatggtccatatcatggctgagagtgcctggaccccgcaggctgtgtgctgtcagaagggtgacactggaggaagaggctaacagggcctctgccaagttccctccccagcatggaaccacctatctgcccaccccatcaggaagcagaaagaagaaggctcacaaaagggagcaaaacaggatttactctcagccatgcggtgagatcagagcaaatctcgaggagcggtgccaggctcaagggaatggaggtagccattccagccagccacaaatggtgagccctagagggagggctcaagggtcctcagtggggagagctaagagggctgcctttctggggacccctggttgcaggtactcattctcatctctgcaaacatctttgcacttgccacaccagatgagccagtgcagagtagggaaaacacacccaaaccaagttctcacatcacaggtcaagataaatgtgactaggggtcagtgaatgagtacacgggcctcaaaataaagcctaaaattaaagccacaatgacacagcacctaacacccactcscatggctataatcaaaacgacagacaatagcaagtgttggcaaggatgcgaagaaaccggggccctcccacactgctggtgggagtgtaaaatagcacaaccactttgggaaacagtctgactgttgctcagaaagttaaatatatttgccagtaacatggccaaaaaaaaaattaaacatagaatgaccacatgaccccacaattccactcctcggtatatacccaagagaacagaaaacacacgcccacgcaaatgcttgcccacaaatgtacattattcatgcacaatagccaaaacagtggacacaacccaaatgccatccatcgatgaatgggcaaacaaaatgtggtctactcataaatgtaatattattcgaccataaaaagtcatgaagtattgatacatattacaacttggataaaccttgaaaacattatgctaagggaaagaagccagctataaaaggccacatattgtattattccatttatatgaaatgtccagaacaggcaacgctatagaaatgtagtggttgccatgggctaggggtgcaaggggagaggtggggaatggggagcagctgataattggtagggtttctttttggggtggtaagaatgttctgatattagatggtagtgatgcttccacaattctgtgaatatactaaaaagcactgagttatacactttcagagagtgaatctgagggtatacaaatcatatctaaatttttttaagattttttatttttatttatttatttttttgagacagggtcttgctctattacccatgctggagtgcagtagtagaatcaaaaatttttagagtcagtatactcatgtaagctaacataaatgagaaagagagagagcgagagaaagaaaggaaaggaggaagtgggaaggggaaaagaggggagaggagtggagggaggggaggggaggggagggagatactcttactcagaaattttctttctttgaaaatcccttatgacatttctaagaagaagcaagaatagtgtgacctttgcaaattaccttaaagacaaagaggagaagaaagagccaagctaatacatgaagagggaaaacaaccagaaaaaatgacatttcagacacaatcatggacagaaatcctacaagtcagtaggggccacctttacctgccagggggaccacaaaaataggggatttctgtcaagaaggcaggaatgttcagcagaacacagcttctgaatcatctgactctctcagaaccaagacaaaacagttcaaatgcctacaagccacaggacccaggaaataccgcagagtggacactttccccctctacataaaagaacctatttcttttctatgcatcagcttctccagtccatctttcattaaaaggacttgccatggaatgaaaactcatatttcaggactaagatggacaacaggccttctccagctcttctctgaaaagtgagcttttcggtagagaacgagcttccttcacaagaagggcactcccgctgggtgtgagccaaacgcacatgcacgacacttgcgcagctaagaatacgcacagtggggaaaaggcacagaagcagcccccgtcctgcccgagtgccacatccctttctgggctttcattcccccacccccaccgcctgcaaaatgaaagaaagattgcaataaacaaggtgtaagtctcaaacctgctcttcacctggagcttgtaatcaggtgtcaggctcccatccacccacaaggaacagagagattttggtgttgaagcttcaacctgccctgcgagccaatctttatttcaaagtactttgtgctgtaagctaacgggaaaaaatgatcaaatgcctcaaatctcccgtaagcagggactgtgcctggggggaaaggtgctcaccaaggtgggggcacatcgggtgtctcctggtgctttctgctggcactaacattctaaaacatgaagcattaagtacagcaacatggatcttccttttttaacatggaaaatacgttttcatagagcaggagggaaaagaactctctaaaaaacagagctgaataggcttagcaagaaaagaaattcaggagatggagaggaggagctctaaaacatccacaaaaaaataaaccatttcatagcaatgctgaccattttaattgattctcgacgacagaagaacacaagaaaaggtagatgatgtaatgcgatggctgctgaaggcaaaagtcacaaaacaaatttagcccttcgaataccacagtagccatgggtcaatataaaaagcttcaacggtcaggagcaaaactggggtgaaggggctactcccccatacatgtaatttgtccaagccctgccatagccaccacctccctggatcctcaaagcaaccctattatgcaagacatgctgatccaggtgcatctgacgattcagaaaaccaggaccaagccgtggggcaccgagcctgagctaataagcagcagagtcgaccctggcacgaaggtctcc

SEQ ID NO: 714222 - DNA, 1592 bp, Homo sapiens
tcctgtattttaggtattcttgagaatgacagagagaaaaatatgtaaataaatgcaatatttcataaaatgagaaaaaagcacagaccacaaatgaacatgggtacaacgttcaggggtttcaaacatattaatttacattggtcttttttcagatgagtaagctgtactctttgagttcaaatgatttgtccaaaatcatcagccagcagttaagaaaactagatgttctaatgcttttttttttttaatggagtctcactctgtcacccaggctggagtgcagtggcgcgatcttggcacactgcaacctctgcctcccaggttcaagcgattctcctgcctcagcctcctgagtagctgggattacaggcacatgccatcatgcccggctaatttttgcatttttagtagagacagggtttctccatgttggccaggctggtcttgaactcctgccctcaggtgatctgcccgtctcgcctcccaaagtgctgagtttacaggcgtgagccactgtgcccagcctaggtcttgtaattctaaatccaccctccatttaatattccttatcttagcaagaaaatgtgaagaaataacattacactattgtgattgttgagaagtaaagaattagaattaaggatttaatttttttgtttattctcagtgtcggctgctttacatacgtttcttattgtcactcaagccctcacaataaccatgtgaaggaagtcttattagcctcactctgttttttattttccttcataaacacatttaatgactggtcatgtactgcatattgcatattaagagaatttctagtaagacatgcagagactaatgctagaccaagtcttgctcagcccaattctagtttattatattattatttttgttggatcccaggtgcacagaattgggttaatcataatctagaatcatattcttttttttttttttttgagacctggtcttactctgctgcccagactggagtgcagtgtcatgatattggctctctgcagtctcgacctcccaggttcaagccatcctaccaccccagcctcctgaatagctgggactacaggcatgcaccaccattcccggctaatttttaatttttttttagagatgggatttcgcatgttgcccaggctggtcttgaactcctgggctcaagtgatccagtcacctcagcctcccaaagtgttgggattacaggcataagccaccacacccagcctagaatcataatgcttataactggaccatacgtggtctacttttatttacatggttggctatgtgatcttaatgtgataaacaccctgaacccaccaccgaaaacaaaagctaagatcttgataataactgcatctagtgagaaggtttctacttccatctccctaattcctccccactgaggtagcccccgtgctggatcctgtgtccatcatttgcttgtgttcctttttatatcatctcactktttataatgaatgttattttgctaagattcatccatattgtaggttgctatagttcattgattttatcttctgttatattccattgtgcaactatgt

SEQ ID NO: 714223 - DNA, 971 bp, Homo sapiens
ttttttggagttgtggtctcgctctgttgcccaggctggagtgcagtggcatgaccatggctcactacagcttccaacttctgggctcaarcaattatcccaactgagccacctgaatagctgggactacaggtgtaggccaccatgcccggttacttttttttttttaaactttgtagagttggcgtctcactatgttgcccaggctggtctcgaactcttgccttcaagtgatattcctgccttggcctctcaaagtgctgagattacaggcatgagccatcatgctcagcctaatatgatcttaaataaatacactaaaatgtatagattttctattatcttgttaagaagcaacatgagggaagagttatggtagaaggacagacagtttggctctccttttataatgattctggaaatactactttcacagacagtttctcaattctccctcaaccttgattctacctcactaagtacactattaggacaaaaaaagttatcatggtgtttgcaaattctgcaaattctggaatgaacaatattacaactctgaaactcaacagtgttaccaaggaatgtcataagagctttttcttagaagagttttaaaataacatttgattggcaaagttacatatgacttcatttagaaacctggaagcaaggaaatcaatatgtgctattatcaattatgaagaacaaattctattccttttttgtcacgtatgtgctacaacatttttgcaaaactagtattggtatctttcatcagttttaagatattttcagccatcagttcttcaaatattgcctataatccttttataaacgctctcctcttgatactctgattacattttggttagatgctctctcattctaccctccatgtctcttcaacttctttgtcttacattccattttctctttctctctgggttgcagtctgaatatttttttctgac

SEQ ID NO: 714224 - DNA, 1575 bp, Homo sapiens
  misc_feature 1574: n = A,T,C or G
aaaggtggaccaaccaagtcttttgcaggctccttttgcagtaacagggtagatatttttgactgatatatttcaattaataatatataaaagcgttccagacacatgtatgactagcttctttcagaaaaggaaagacctcagaaaatgattatgtcttcaatgttcgcctcttaacatttttatttagaactcaatctttgctatatggttccataaattgaaaaaaaaaattcatagatgaagctcaactctaatcagtgataaagggttagtaccaaaatctgtaccatttttatggggtagaattttaatagactttgtacagaactgtttgaactaatgtatggcctttattctgccatttcatttaacttgtgtttgtgacacagtatttatgattcagccatgtcaacactagaaatattttgttcctcacatcaagtgcagcctcgaataaagtacaccttttgatggatgccagtcagaaattgtgtatttcaaaaaaaaaaatagtgtgaaaggtcactgaatgtagaaacaaatgaaaaggtggttttgagccacggcactgaacccttcggggacttttctttcccacctgcacctgtcttaaaagtcaatgcatgccttttaaatatcatgattcataacatattccttatataatcatgaaaatgtagtcttgtggttggaacaacaaaaagtatctaatgaaatttagatacacagaataaaaatttagatgcacagaataaaaaataaaataataataatatggtattttgtgaaygaacatttttaacgccaagcacagtactaaatattttatatatacattctaattaaagccaacctttaaatctatgagataaatactctcattatagtcatgttatagatgagggaactagggcttagaaagagataaaacaacttacccaaaggtaaataaatagctaaataaatgttttaaggccaaaagcaacagcagtgcaacaacaaaaaaaagcaaacactgactccatagtccatttttataggaattatgctagactggcagaaaatttaagttccccagaaatgtcttagctaatccaaggattaatgtctttgcctgtcttgctagatttgtcatttgtcattggtaaggtattgatgagatttgacccaagtatagaaatccaaaaggatcacctttatattttgttgtgttttttataactaccacagcacttcatttcaaaaataaggtaagaggaatttaacacctgacagactcaggcgcaatactttgatggacataaactttttataattgtggtttattttccttcatacagaacccagtgctgctcccacagatgtcaaggcgacaagtgtgtctgtgtcagagattcttgttgcatggaaacacattaaagagagtctaggaagaccacagggatttgaggtatgaacagaatgattgaaaataagccttattgtttcttctgacatcacattctcctaaagagaggttttggtgacactcagaatttcacagaatttcttaagaaattttgctctatgtna

SEQ ID NO: 714225 - DNA, 1423 bp, Homo sapiens
caaacaccagatcttatttcttctatcttatagtatatttgtacccatggattaagctctctttgttcctcactctcctttccccttcctggcctctgataaccaccagtctctatctttatgagatccagtttctagtgcactttttcagaatgtctatcctgtatatagcagcttaactatacaaaagaatcatttattacattatttatgcactgaatatatggggaaaatatctactttttcctctgcatttattatgtttcaataactttcacaacctagaagtctcccagataaatacttttctgaattcttcaatcttaaactggacttaatgtaaaaggtggaatatatattccctgcattttaaacctcaggcattaatcccaagttctcagcctcaaacctccacacaatatgcatttccagtgatcctttctgcttgcaaaagtgaagtagtttgcaaagacaaagagtgaaaattaagtgacctccctttttaatattccaattaagtatggaaactctccctttccccgatgagcaagaagttttctgcttcaaatgttccaagaatcctaggggcaagttcagttttaatgggtcaagcccrcctcaaactaccttgtgggaagagaaatgattagtgtcctgtgtccctattttattaatttttgtaagtgacacacattgtgcttaagaagaggtggcccgctattatagtggtgccactcttggttggcagtaatttttgggatgtagtaggaatcaaaaggattctccttctgagtatcatgcccagccctggtcattctatattagtgtgcaccttcagatggtacagttctttcactgctgtgtggggatccttgccaagggtgcagtagctgtcttcaacgtcatactcagaagacgggctccaagcttgtgttctctgggttatagctctttagtttatattctcagctattatttctaaatatatattcctgtcccattgtgtcaggaggagctttcatccttggctgccctgtgaaaacccgcgttctgaggagaatccaaactctgggttaagcccagtccagtctgaagtcccctttccctcaggaagcctttcctgtcagcagttctctcagtggggatcatcccactcatcagaaaggttccgataaggtttagttgcaaaggagaaggttttgaggtctcactccatttgttatcagcagactccttttatacgaatcaattcttccttctcagggatataaggaagtgcaaccatttcaagaaaataaaagaaaaaaaatatctttgcaattgtgtgcctacttgtcattaatttacacaactaaaatggactatgctagtgattcttccttcagcaacaaggtattccaacatgacttgtgatatctttatt

SEQ ID NO: 714226 - DNA, 2005 bp, Homo sapiens
tgtgctgttgactttgagcctcaaacccagagcttgacctgaggtctggaagaatggaaagcagaaaaatttagtgttgccaaagagcaaagtctctgatttctagccacaattgtgcagaaagtccaggagtgtctcagaaggaacctgacaggaaaaaccctgtgaaggtacaaacaaaagggattctcgagaagacagcagaaaatgatcggagagaactagattctctgaagggctcaggcagtgcagaaactacagacagcagagctgcctcgatggctagcactgattaaaatgcaacgtcgttacctagctgtgccggagcagggggcatgcatatgtatgcatgtgagacagaaagagagacagggagagagagagagagtcagggagagagggagagagagagagagacagggagagagagagtgtgcatgcacgcacaagagggtgggggaaagactctgtaacccaaatccagtgattaacaaatcactggaaatcagagcttcgggttcaggggaggtctatcctaatccttcctctytcaaccatctcatttctaaaattatctttatttcccaaaaggactttaggttctgaaacacgatgcagattcttctgaaatgacagcactccgggcctacagctctcacacggcaattactcaggctccatttagggacagctccacctcctttgatcctcatgggttattttcatgagcccgtgcagccccacaaggttttacatcattgccttgagagttctttatgagagggaacagtgtctggtattttctacaacttgtacagatgttggcaatgagccttggccaccaacctagatgctccataaatattagttgatgagttactcaataattcccccaaactatgatagggttttgcaaaccaagagtcttgcttattgtagggaggcatttatggtgaggaatttaagaacaggggtcagagtaggatggcctgggttcaaaggccaggtccccttactaactaaaggaccctaaacaaattacttcatctctcagagtctaaacgcccttatccaggaagcaggaaggatgacaacaatactgtatccatgtggttatgaacggctcactgtaatagctggcattcacttggtgcttttgatatagcaggtactactggaagcactttctaagtcctatcttacttaattgtcaaagcaaccataggagacaggactgcttttattccaattttacggatgaggaaactgaggcaaaattaagttaataagtgctgaagctggaatgcaaacccagacagccgtaacccagagcctatgttcttaatgagaactgcttcccacataacatggttagcacaatacaaaacagaaagaacttaaacatggggtacagtttgaaggcttcaaaaatggtgcaaggactcaacaacaacagaacccacagcagaggccctaactgctccagcgtagccttgctatttcattcctccgacgaaggccatctgcagacacactaccccacagcaacttcattccctgaccacatctatccgcctttcagcctcttttagaagctgcttcagagctgaagcctagtcaagaatgtatctgaaggaggcacccgatagtctttattttcttcaagaatgcccactgaaatctagtcctcagccaatgctggcccatcgaggtccctcataggagccttgaggatcctaatctctgcactttggcccacatggccccatccatccactaagacgtccttccttcaattcaatgccacccaaactgtgacaccagattcactcctgactttccatcagaatgctttctcctgctgacaatttgttatcgattaacatgatgcatttaaaaccttgtcttctttcccagaacataagctcagcaaagagagaggctgtgttttaccatccctgcaactctcaaagcatctagcaaagcagtcccctgacctgcatgc

SEQ ID NO: 714227 - DNA, 2005 bp, Homo sapiens
tgtgctgttgactttgagcctcaaacccagagcttgacctgaggtctggaagaatggaaagcagaaaaatttagtgttgccaaagagcaaagtctctgatttctagccacaattgtgcagaaagtccaggagtgtctcagaaggaacctgacaggaaaaaccctgtgaaggtacaaacaaaagggattctcgagaagacagcagaaaatgatcggagagaactagattctctgaagggctcaggcagtgcagaaactacagacagcagagctgcctcgatggctagcactgattaaaatgcaacgtcgttacctagctgtgccggagcagggggcatgcatatgtatgcatgtgagacagaaagagagacagggagagagagagagagtcagggagagagggagagagagagagagacagggagagagagagtgtgcatgcacgcacaagagggtgggggaaagactctgtaacccaaatccagtgattaacaaatcactggaaatcagagcttcgggttcaggggaggtctatcctaatccttcctctttcaaccatctcatttctaaaattatctttatttcccaaaaggactttaggttctgaaacacgatgcagattcttctgaaatgacagcactccgggcctacagctctcacacggcaattactcaggctccatttagggacagctccacctcctttgatcctcatgggttattttcatgagcccgtgcagccccacaaggttttacatcattgccttgagagttctttatgagagggaacagtgtctggtattttctacaacttgtacagatgttggcaatgagccttggccaccaacctagatgctccataaatattagttgatgagttactcaataattcccccaaactatgatagkgttttgcaaaccaagagtcttgcttattgtagggaggcatttatggtgaggaatttaagaacaggggtcagagtaggatggcctgggttcaaaggccaggtccccttactaactaaaggaccctaaacaaattacttcatctctcagagtctaaacgcccttatccaggaagcaggaaggatgacaacaatactgtatccatgtggttatgaacggctcactgtaatagctggcattcacttggtgcttttgatatagcaggtactactggaagcactttctaagtcctatcttacttaattgtcaaagcaaccataggagacaggactgcttttattccaattttacggatgaggaaactgaggcaaaattaagttaataagtgctgaagctggaatgcaaacccagacagccgtaacccagagcctatgttcttaatgagaactgcttcccacataacatggttagcacaatacaaaacagaaagaacttaaacatggggtacagtttgaaggcttcaaaaatggtgcaaggactcaacaacaacagaacccacagcagaggccctaactgctccagcgtagccttgctatttcattcctccgacgaaggccatctgcagacacactaccccacagcaacttcattccctgaccacatctatccgcctttcagcctcttttagaagctgcttcagagctgaagcctagtcaagaatgtatctgaaggaggcacccgatagtctttattttcttcaagaatgcccactgaaatctagtcctcagccaatgctggcccatcgaggtccctcataggagccttgaggatcctaatctctgcactttggcccacatggccccatccatccactaagacgtccttccttcaattcaatgccacccaaactgtgacaccagattcactcctgactttccatcagaatgctttctcctgctgacaatttgttatcgattaacatgatgcatttaaaaccttgtcttctttcccagaacataagctcagcaaagagagaggctgtgttttaccatccctgcaactctcaaagcatctagcaaagcagtcccctgacctgcatgc

SEQ ID NO: 714228 - DNA, 582 bp, Homo sapiens
ccagacacagaaagacaaatacttacatgtggaaactaaaatagtcaactcacggaagcagagagtaaattgtggttgctgggggctgacagagaaggaattgggaggtgatggttaaacgttttagtcaggcaagagaaataagttctgaggatcttctataaagatcttctataaagcatagtgccagaagtaacaatactgtattgcatactcaaaatttgctaagaggatagatcttatgttaagcgttttaacaacaacaaaaccctaataataataataatgataataataataaaataggtgagagaatattgtggaaggagatggacatgtttatggccttgatagyggtgatggtttcacacatgtaaacttaacccagactcattaacatgtagctatgaaatatacacaccttttttatatgtcaatcatatctcaaatggcaaataaataaatttttcaatctacaaacctggaataaaattttggctactaattctctcacaattattcaacaaatcacattcattaatatcaacacacaacccaaattaaaacagtttattatcttca

SEQ ID NO: 714229 - DNA, 650 bp, Homo sapiens
cgtatttgattaccaggtatcacagagcaagatgtcacaatgtccgctatcaagttctctgcctcagagctgaaagcaggatagaaaggaagctacagaaatctgtgcgccacagatagttttcccttagatccactcagctttcagcaaactggagaatcacagacccaaagactactccaaggagtgagggatttcccctcagacagttttcacattaccctttacaggggtgcatatggagctcagtagatctgcatgagtttcaaaatacaacctccactctctggacaacccactcttagagcttaggcatcactatatgcctgaaacmtgcagaactgatgccattatatcctttgtcctattttaaatctgcccacttcagagatcctaggaccaacgactatccatttattctggaattctctcaacatctaattattttttccttttctcacttctcttctcaagttcccaaaacttcaattatggctcagaaacccatagtcagtcatcagcaaaatgtcctatatttctaccccttctctaactttactttccttttattgaagcctaattccctaaggaccacttccctgcactgctggaagtagcatcggtcttctctcccatggccttcataactg

SEQ ID NO: 714230 - DNA, 1731 bp, Homo sapiens
aatatttaaaaggtaaaaatgtaaaggagtacttttcacttctggaggggcacatgaaatttaatttgcactagcccacttgagatggaacacccggaacaatgacttgttggttttagcagattatttgttccctcctgattttctggctaaagaacagaaactttctaaaaataagctcatattagttttggtattacagcttgactgtgattcacacattcttaaatgactttgtttttatttaagtcactgaataattaatttttaaagcttcctgtttctctttgtgcacaactttttgaccagcatgttcactgagcattagatgagactctcactggattttgaaagatgtagggacagcaatcgggattaatccctgttagatgcttttaggagatttgaaatattttaaaatcttttttatactaacacccagacgtttcatattgtggtagcagcctagagagtttcacccagtttgaatctggatgatttttatccaaaatgtaagacaaaacaacacttctcttttacaatagtgcactaagtagattaggcaaaaataattttgaagtgctaagatcatccattttcttgtcttgcatgtaagctcatgatagatttcatagagaaaatatgtaactatttcatgaaatcagccttttattagtatatggtttttcaaagaatatctgagctatagtttattctttctgttttactatagaagcaaaggctcctaaaagatattacttcatgcatatgaaatgggttgsaaatgtcaaggcaacatttaaaatggcttgcttcttttcatttaaaatgcaaggtctgtttgtccttgttgacaagaattggtaattaaagtcaattaagaagaaatagaatttaaaaattgattaggctttaaatgcatgatgagttaactttgtcaagacaagtctagattttaatatttttattctaaagtcacagcattcttattgtttttctcatttataaagagaaataacagagtctatgttccctatatccctggccttcattattaatttaatgagctaggctccaaactgatcaatttttcgtccttacctaggcatttggaccaaataaaccacaaggatcacaactcttgtgtggtatcgctgcggcatctatctccctattaacataaactgtgtaaatctatgatatttgttaagttccctcatatgcaaaacgctctgctatgtgctgtgatgagatgtagaggaattagaaaatgcaggttttatactttcagggaattgtaatccatgcttatacaaaactgctttcacaatgccaataataatgctgaattctgcatgttttggtttttctctttttgaatgaaagtgatgtatgcggttgtttaaaataaaacgaaacacacttagagtgaatgaaattacccatcgtctttctactgactagtcctcagaaaaaattatcttcaaccacttatgtttttaattctcctaatggttatttttatacctaaatattatgattatattgctgttttgatttaccagctataagcattattcatttataaactgtaatggaatattcgcatataaattatttatttaacttttattctctattatttaaccattgttatcaattctactttttctgattattatttttatgatttgaaatgaaatacttaagtttattgtcttagtctgctca

SEQ ID NO: 714231 - DNA, 1731 bp, Homo sapiens
aatatttaaaaggtaaaaatgtaaaggagtacttttcacttctggaggggcacatgaaatttaatttgcactagcccacttgagatggaacacccggaacaatgacttgttggttttagcagattatttgttccctcctgattttctggctaaagaacagaaactttctaaaaataagctcatattagttttggtattacagcttgactgtgattcacacattcttaaatgactttgtttttatttaagtcactgaataattaatttttaaagcttcctgtttctctttgtgcacaactttttgaccagcatgttcactgagcattagatgagactctcactggattttgaaagatgtagggacagcaatcgggattaatccctgttagatgcttttaggagatttgaaatattttaaaatcttttttatactaacacccagacgtttcatattgtggtagcagcctagagagtttcacccagtttgaatctggatgatttttatccaaaatgtaagacaaaacaacacttctcttttacaatagtgcactaagtagattaggcaaaaataattttgaagtgctaagatcatccattttcttgtcttgcatgtaagctcatgatagatttcatagagaaaatatgtaactatttcatgaaatcagccttttattagtatatggtttttcaaagaatatctgagctatagtttattctttctgttttactatagaagcaaaggctcctaaaagatattacttcatgcatatgaaatgggttggaaatgtcaaggcaacatttaaaatggcttgcttcttttcatttaaaatgcaaggtctgtttgtccttgttgacaagaattggtaattaaagtcaattaagaagaaatagaatttaaaaattgattaggctttaaatgcatgatgagttaactttgtcaagacaagtctagattttaatatttttattctaaagtcacagcattcttattgtttttctcatttataaagagaaataacagagtctatgttccctatatccctggccttcattattaatttaatgagctaggctccaaactgatcaatttttcgtccttacctaggcatttggaccaaataaaccacaaggatcacaactcttgtgtggtatcgctgcggcatctatctccctattaacataaactgtgtaaatctatgatatttgttaagttccctcatatgcaaaacgctctgctatgtgctgtgatgagatgtagaggaattagaaaatgcaggttttatactttcagggaattgtaatccatgcttatacaaaactgctttcacaatgccaataataatgctgaattctgcatgttttggtttttctctttttgaatgaaagtgatgtatgcgrttgtttaaaataaaacgaaacacacttagagtgaatgaaattacccatcgtctttctactgactagtcctcagaaaaaattatcttcaaccacttatgtttttaattctcctaatggttatttttatacctaaatattatgattatattgctgttttgatttaccagctataagcattattcatttataaactgtaatggaatattcgcatataaattatttatttaacttttattctctattatttaaccattgttatcaattctactttttctgattattatttttatgatttgaaatgaaatacttaagtttattgtcttagtctgctca

SEQ ID NO: 714232 - DNA, 1584 bp, Homo sapiens
gtttggcttgttcaaggagtgaacatggaaaagagtagtggtagatgaggtcagaagagcagtggggaagcagatcaggaaggacttgtaggtcattattagggtttggcttctactctgagtgatgtggaagccactggcagtttgaagcaaagtatttcataatctcgcttacattttaaaaatatcaattggccgctataaggagaagagaccacagagattaagggggaattgagaagtccagtgaggagactactgcagtaataccgacagaagatggtggcaagggctcaggtggtagcagtggaggtggtgacaagtgatgagatactggatttattttgaaggtgacaggatttgttgatagactgagcatggggtatgaaagagaggaatcaaaagattcaaaactttttggtttgggactgaaaagatgaagttttcatttatagaaatggggaagccaatctctagagtaaaccaccagagtttggcttagttaagtttgaatatgctgaatagacacgtggttaatgtaagtgtaagctttagacttcagccttttaaagttaggtcgaaggctaaaggtctgtgattgggcatcatcagtacacagacggcactaaatccacaagatcagatgctatccagtgagcctgtttattcccagcactcagcacaatgtctgatgtagtggatgctcaataaatatttttttgagtaaattaaagaaagagtaatatatttcagataaaaaacaagcttatacagaatatcaggactaggttcactagtagtgattgaatcagagactaaaatacttcatctctttgattaattattaaagtgtttgtaaatgttgcaaataccttctactcttttcacccacatctgcttcttattcttctgagtgtgtttatagaattttgtatgtctactatgtgacttattcaatggattttcaatagttttaaaataacacaaaattatgtgtagttcctgacttctgttatttcctctttttctctccacgccaccctccgtaccttaaaaaaacctcaaacatacctgaaatagcctgttacttcaatatccatgattctatagaatgtggccctcatggaaagggtttctggtgatatttttcactgttaacattttctagattatttgaagagatactttttcttagcctgtgcttcagatgcaaaaacaagaatttaccaattgcaagaagccaacaaaaaatgtgtttagtataaagagatgcctaggagtacttggaataactcagaatatttgtcgtgttacagaaattaaatgtgcagttcaaaagtaatttcttacacaaaccactttacttgaaatctctgtttacaaaatctccattttggccaaaatatccgcacatgggaaattttggaattattggacagttcactgcactaktctagtctggattgagagaaaaacacttgcatatgctgggctcttaattattgtgtaccattgttggtctatactgtaataatgcacaaaggaggattatcctttaacaatgatgaaaatgaggacaaagat

SEQ ID NO: 714233 - DNA, 1584 bp, Homo sapiens
gtttggcttgttcaaggagtgaacatggaaaagagtagtggtagatgaggtcagaagagcagtggggaagcagatcaggaaggacttgtaggtcattattagggtttggcttctactctgagtgatgtggaagccactggcagtttgaagcaaagtatttcataatctcgcttacattttaaaaatatcaattggccgctataaggagaagagaccacagagattaagggggaattgagaagtccagtgaggagactactgcagtaataccgacagaagatggtggcaagggctcaggtggtagcagtggaggtggtgacaagtgatgagatactggatttattttgaaggtgacaggatttgttgatagactgagcatggggtatgaaagagaggaatcaaaagattcaaaactttttggtttgggactgaaaagatgaagttttcatttatagaaatggggaagccaatctctagagtaaaccaccagagtttggcttagttaagtttgaatatgctgaatagacacgtggttaatgtaagtgtaagctttagacttcagccttttaaagttaggtcgaaggctaaaggtctgtgattgggcatcatcagtacacagacggcactaaatccacaagatcagatgctatccagtgagcctgtttattcccagcactcagcacaatgtctgatgtagtggatgctcaataaatatttttttgagtaaattaaagaaagagtaatatatttcagataaaaaacaagcttatacagaatatcaggactaggttcactagtagtgattgaatcagagactaaaatacttcatctctttgattaattattaaagtgtttgtaaatgttgcaaataccttctactcttttcacccacatctgcttcttattcttctgagtgtgtttatagaattttgtatgtctactatgtgacttattcaatggattttcaatagttttaaaataacacaaaattatgtgtagttcctgacttctgttatttcctctttttctctccacgccaccctccgtaccttaaaaaaacctcaaacatacctgaaatagcctgttacttcaatatccatgattctatagaatgtggccctcatggaaagggtttctggtgatatttttcactgttaacattttctagattatttgaagagatactttttcttagcctgtgcttcagatgcaaaaacaagaatttaccaattgcaagaagccaacaaaaaatgtgtttagtataaagagatgcctaggagtacttggaataactcagaatatttgtcgtgttacagaaattaaatgtgcagttcaaaagtaatttcttacacaaaccactttacttgaaatctctgtttacaaaatctccattttggccaaaatatccgcacatgggaaattttggaattattggacagttcactgcactagtytagtctggattgagagaaaaacacttgcatatgctgggctcttaattattgtgtaccattgttggtctatactgtaataatgcacaaaggaggattatcctttaacaatgatgaaaatgaggacaaagat

SEQ ID NO: 714234 - DNA, 1014 bp, Homo sapiens
catcattcaggtattaagcccagcacccaatagttaccttttctgcttctctccctcttcccatcctccaccctcaagtagaccctggtgtctgttgtttccttcttcgtgtccagtgttcccaacatttagttcccacttataagcaagaacctctggtatttggtgttctgttcctgtgttagtttgctgaggagaatagcctccagctccatccatgttcccgcaaaagacatgatctcattcttttttatggctgcatagtattccatggcgtatttgtacaacattttctttatccaatctgtcattgatgggcatttaggttgattccatgtctttgctattgtgaatagtgctgcaatgaacattcgtgtgcatgtgtctttatggtagaatgatttatattcttctgagtatataccaagcgatgggattgctgaattaaatggtatttttgcttttagctttttgaggaatcaagatactattttccacaatggtcgagctaatttacattcccatcaatcttggagtaagtaaaattaacatgtactgggacaactctcmaaagcttcctagaggaagaaaaacctgggattttatggaaagtgtaactaattcagtaatcattttctggttacctactatgtactaggaactgttctagacataagtgatacataagtcggaattcctgatatcatggaccttacattctggtagtggaaaaggaaaaggtgtacacaataatgtaattggctaatctcaagtcctgataagaaagaaaatagaatgatgtttttatgagaataaaagataggatcctctcagaacacacgaatggcttccctgggctgataaatgtgggagaataatacagtcacttccttctggttctgtaactagagacacagggcgtgatgtctgctctttgtaactcgggacccttgagaaggtaggctgctcacaggcaccgcctgctcctcctcattccctctgctgaagcaaaaa

SEQ ID NO: 714235 - DNA, 1029 bp, Homo sapiens
ctttgcagggctgcaccaggcattggtgcttcagcaaggagccctatagaattcctgggcttgttttgaaaaggagcaggcagaacatttcactgatgatactggctggctcatgcacaagttcttcccactgggacccctgcccacggaaaagtatgaatagtggccttatctaaatgacagcctcaagagatttgacttcagcctggatgtggtagccrgctgccccagattcccactttctgatattcacacattatacaggcccctcctacattataccagggtcggtttgtatagctaataaaataggtgatagcatgtcacttcctgggttaagttataaaaagtcgttgcagctttcatcctggcagctttctctctcagatcacttgctctcgggggaggtagctgccatgtcatgagcatcactatggagaggcccacgtggtaaggagctgaggccaacagccaacagtcatgtgagtgagcctggaggcctaggctccagtcccagtttagcctgataactgcagccctggctgacatcttgacttcaacttcatgagagagactgagccagaactacccagctaagccactctcagattcacaaccctcagaaattgtatgagataataaatatgtgttgttttaagctgctgaatttaagctaatttgttatgcaacaatagataactaatacactagcgagagatctccctggcatggggaactcttggggactgctctttctcagcactctatctaagcagccagaggtgtcttgacatcccggaatcttaaatctagaagaggccctggagtttagctagtccagttccctcagtttatggtggaaaaagagaggccagaggagaagaggctttgtgtgtagccaagatgaaaataaaagttggatctcctgatttggggttctgcctttcctcctctatttccactcccacaattagttggcttcccaattcatcatttttattatttgagacatggtcttgctctgtcacc

SEQ ID NO: 714236 - DNA, 642 bp, Homo sapiens
taattttagtataaccaattatcgcattgatcttcttactcttccattctttggcacttctgaaaagacagccacccaggtgctatcttaaacttctttccacaggtatgaatttggcatattttaacagtgttggaaggtacagatatatacgttccttcttaggactcatgactcttacccatgctaatttcttgtttttaaaaaactgataaaagtcataagtgtgtcacttagcrtatgtattatttctattcccaatgtttgttcaagtgatatggtggagctgggcctctcaactttatcacatcatgcatacatggaaaatgatgccagcaccatgtgccagggggaaatggagaaggcctttggtggctggagcaaacaggcctggggcataggcgacagctctagggactgactgaagagaaaaatatttcagcatacttctaatgtatcaaagtcaccagttctgagttgtgttttgtttttaagtgtgtgaggtttaaaattttttgagtagatgctcacatccaggcacagacacctactaactctattatattgggtaagtaacttcatttctttgacactcagtttttacatctgtaaaatggagctgatgaggatgactacttcaga

SEQ ID NO: 714237 - DNA, 1522 bp, Homo sapiens
aaacacctatttttaataataaaaggaaattcttctagttatagctcaagaaattacaaacagaattacagtaatatgttactagctttaaaaataattctgtggggggttataaaagtatgagactatatatggtgccataatatttaaaattcgggtagaaatatatttgcatttctaattttaaaaaacaaaattaattgaatttggtaatttgaagagacgttacttgaattttcgttatgctttgaagatcagatgaacgcacttgcttttgagtcttaaaatgtaaaattctctcttagtcattcttatgataaatggacatttagagagagcaactaattcttccaagtcttagagggggaaaaaaagtgttttattaccacaataagattcaaaaaactgggctgggtgcggtggctcacacctgtaatcccagcactttgggaggccgaaccgggcagatcacctgaggtcgggagttcgagaccagcctgaccaacatggagaaatcccatctctagtaaaaatacaaaattagctgggcgtggtggcgcatgcctgtaatcccagctactctggaggctgaggcaggagaattgcttaaactcgggaggcggaggttgtggtgagctgagattgcaccattgcactccagcctgggcaacaagagtgaaactccgtctcaaaaaaaaaaaagattcaaaaaactaccatcggttactgagtaatattgcttgaaagttatttcaaggatattgctttttaagcaggagtcactgagtttcaggaagctgttgctaatgaaatattttagtcatgatctagttttctatgatcttttatcactgctttatctttgctcaagcaaactcatcattgcaaaatgctgtcacttgctcccttccactaataatgcctgatgcacatatacttcatttgcaaagggagagttttatgaagcagtttattgaccgccagcaacaggacacatgttgcctcctgagaagcctcccgaccacctcttcctcctcctgcgaccactccaaacgctcagcaattgaggacaacaaatacatcgaccaaaaagtaagatccgctgtttcgaataaccaggcttctaaaaagcatctatgtttgagaaaagaaccgcagagttctttagggtcctggaatccaattttctcaagagaataatgaaaakaaaatgatttcatttgtaaaagatatcatgaaacctaacattttttactctatgcattgaaattttgcatttgcccgtgtaagcttttgagctgcgccacgtggcagccatgcgactttgtaaacatcaagagcctcccaaatctgcattttctcatgtgcggaataaagggctgggatctccaaggctcagtccaggtgtaatgacctgccatctcctgcaagtacaactgcttatgtctacttattacatcagagaggatacgagagcatgtttctctaaaatcggtcgaaagaattgccatttattcaatgc

SEQ ID NO: 714238 - DNA, 1522 bp, Homo sapiens
aaacacctatttttaataataaaaggaaattcttctagttatagctcaagaaattacaaacagaattacagtaatatgttactagctttaaaaataattctgtggggggttataaaagtatgagactatatatggtgccataatatttaaaattcgggtagaaatatatttgcatttctaattttaaaaaacaaaattaattgaatttggtaatttgaagagacgttacttgaattttcgttatgctttgaagatcagatgaacgcacttgcttttgagtcttaaaatgtaaaattctctcttagtcattcttatgataaatggacatttagagagagcaactaattcttccaagtcttagagggggaaaaaaagtgttttattaccacaataagattcaaaaaactgggctgggtgcggtggctcacacctgtaatcccagcactttgggaggccgaaccgggcagatcacctgaggtcgggagttcgagaccagcctgaccaacatggagaaatcccatctctagtaaaaatacaaaattagctgggcgtggtggcgcatgcctgtaatcccagctactctggaggctgaggcaggagaattgcttaaactcgggaggcggaggttgtggtgagctgagattgcaccattgcactccagcctgggcaacaagagtgaaactccgtctcaaaaaaaaaaaagattcaaaaaactaccatcggttactgagtaatattgcttgaaagttatttcaaggatattgctttttaagcaggagtcactgagtttcaggaagctgttgctaatgaaatattttagtcatgatctagttttctatgatcttttatcactgctttatctttgctcaagcaaactcatcattgcaaaatgctgtcacttgctcccttccactaataatgcctgatgcacatatacttcatttgcaaagggagagttttatgaagcagtttattgaccgccagcaacaggacacatgttgcctcctgagaagcctcccgaccacctcttcctcctcctgcgaccactccaaacgctcagcaattgaggacaacaaatacatcgaccaaaaagtaagatccgctgtttcgaataaccaggcttctaaaaagcatctatgtttgagaaaagaaccgcagagttctttagggtcctggaatccaattttctcaagagaataatgaaaagaaaatgatttcatttgtaaaagatatcatgaaacctaacattttttactctatgcattgaaattttgcatttgcccgtgtaagcttttgagctgcgccacgtggcagccatgcgactttgtaaacatcaagagcctcccaaatctgcattttctcakgtgcggaataaagggctgggatctccaaggctcagtccaggtgtaatgacctgccatctcctgcaagtacaactgcttatgtctacttattacatcagagaggatacgagagcatgtttctctaaaatcggtcgaaagaattgccatttattcaatgc

SEQ ID NO: 714239 - DNA, 1051 bp, Homo sapiens
atggtataagatctactgtctgttgtatttatattcctcaagcatattgttccttcaacttcacagtgtgttaaactatttcaaagggaaaaaaatcctttccctcttgtttctggttgtcctatcaagtgtaaccttggacccttatagagcaattagaccagcctctatcccctcctttgtaatgaggtttcttgcatttctgagtctataaccctttagtcttccctaatgggacatcattattctgaaagaaacaatgtaaatgtaaatgaatattctcattaacgagtcacagagaaacctttagcggtagcactgtggtaattccgcttgttatttctctggtattccatgcaggattttttttttttttataattcattattagtattcaaaattacttgttctttaattttgcatgtctttcataatccagtgttccaactagttcaaccatgtccttgttttattctcgaggaaccacctgtgaaacgttcaaggtctttgtccccaaagagctctttcacagactcagaagagctacagaagctgagaaaagctgaaagaaagattgaaaacttagagaaggcactacaactaaaggtgaacattaaatcatttctttagtagtaaccttgcaaagataaaaatataccaaagtaaacatacagttcatagattactagttgtcctttttctttcctgaatttaattgcctgtataaaagtgtataatcagttcatcttgttattaagatttctgaggatgataaaataatataaaatatttgctacttgaaaagtaaatgtttatttactactttcaagttatttggtaatattttgtcttaaaattgggaataaatttcttaaccctttcycaaaggcaaaaaatagaattgtagcaagtgaaaagagaatttcttcttctttatatatgataaacatatgtaaatgaaagtgagtttaaaagcatattaacctagctcagatcacttacaattatcctttatagaaaaattacatttagtcaaaatgaaatatatata

SEQ ID NO: 714240 - DNA, 623 bp, Homo sapiens
gacaccctttactccaactccctgggactcctttcccacactcctcagaagttgctcccccaccatgcaaacacagcccctacaagctgccctgttcccagtaggaacctatttaattaaatggtttgaatcacctggatttcatcaaaagcatatctctttaatgtttttttgtgtgttgttgacaaaactctgagatactctggtgaccaaagtaaaaacactcttaatccacttaacaataaacagattccagtgaaaatttttttttctctcttctttgggtttccttgaataataccttgaagaaaaatatataaatatttgaactgttcccctcctgtatttcytctacctagggtaatgcaaagaaaacaaagtttgggcaaaccagatcagaaagatttgaatgaaaacctagctgccactcaagggctggcccatatgatcgccgagtgcaagaagcttttccaggtaaggaattgagaagtttggctcctttattaaggataatgtgaataggtacaaaatcttaggcttgacccttgttcatgtcttacctgaagaccttttccacagctggagacggtataaatagcctgagaatgtcttatttacatata

SEQ ID NO: 714241 - DNA, 653 bp, Homo sapiens
aatagcagattgcagaacagaaaaaatcgggtgcaactgcaggaaatgagactgaaaaataattcagagttagtttatgaagggcctgaatgccatccaaaggagtctgcatttattctgtaagacatattattttctgaaatatatcccacagaacacgtgcgctataggatgttaatacgtctagggyaagctagattaagtccaagctttagggtactccttaaatatgctaatatgcatcatgattctctaagggagggttgtttgttgttttcctcaaactaaacaatataacttggtaacaggcacacagggaatacgaagaatgtttcagcttggcacctgtgggtcagttaattctaatattctgggtaccttcaagatgccagatagtcattaccttgtatcatatgtatccagcacacagcagactgtgtatccagcacacagcagggcttagtaaacaaatggagtgaatgaaatatctgaatagtcctcagttgccttacttataaaatgggaaaacaataatgtaattgttgaaaggttgaagagttggagaaaagtggtcccagaatattttgcaaccaagaactattttttaattcaaatcaaatcgaaacagatttacaaatgaaaaaaagataaaa

SEQ ID NO: 714242 - DNA, 653 bp, Homo sapiens
aatagcagattgcagaacagaaaaaatcgggtgcaactgcaggaaatgagactgaaaaataattcagagttagtttatgaagggcctgaatgccatccaaaggagtctgcatttattctgtaagacatattattttctgaaatatatcccacagaacacgtgcgctataggatgttaatacgtctagggcaagctagattaagtccaagctttagggtactccttaaatatgctaatatgcatcatgattctctaagggagggttgtttgttgttttcctcaaactaaacaatataacttggtaayaggcacacagggaatacgaagaatgtttcagcttggcacctgtgggtcagttaattctaatattctgggtaccttcaagatgccagatagtcattaccttgtatcatatgtatccagcacacagcagactgtgtatccagcacacagcagggcttagtaaacaaatggagtgaatgaaatatctgaatagtcctcagttgccttacttataaaatgggaaaacaataatgtaattgttgaaaggttgaagagttggagaaaagtggtcccagaatattttgcaaccaagaactattttttaattcaaatcaaatcgaaacagatttacaaatgaaaaaaagataaaa

SEQ ID NO: 714243 - DNA, 653 bp, Homo sapiens
aatagcagattgcagaacagaaaaaatcgggtgcaactgcaggaaatgagactgaaaaataattcagagttagtttatgaagggcctgaatgccatccaaaggagtctgcatttattctgtaagacatattattttctgaaatatatcccacagaacacgtgcgctataggatgttaatacgtctagggcaagctagattaagtccaagctttagggtactccttaaatatgctaatatgcatcatgattctctaagggagggttgtttgttgttttcctcaaactaaacaatataacttggtaacaggcacacagggaatacgaagaatgtttcagcttggcacctgtgggtcagttaattctaatattctgggtaccttcaagatgccagatagtcattaccttgtatcatatgtatccagcacacagcagactgtgtatccagcacacagcagggcttagtaaacaaatggagtgaatgaaatatctgaatagtcctcagttgccttacttataaaatgggaaaacaataatrtaattgttgaaaggttgaagagttggagaaaagtggtcccagaatattttgcaaccaagaactattttttaattcaaatcaaatcgaaacagatttacaaatgaaaaaaagataaaa

SEQ ID NO: 714244 - DNA, 2645 bp, Homo sapiens
ttccattacttgctctactaaactaacagtagataattcttgcaagtaatttgaaaatgttttaccttttctcaataggaatgaactaatagaaattggcttaaaaggatatatgtgttcatatgtccgttaaattttaaaatatgaattagaccatcagttttacatacaagcttattattctacattttctataaatcactacaggtatatgctaactgaattataaattaaggtctgttatatacattttcagtaacctgttgtcatgacacataccagtactttgtcatatttgctgaagaattcatttctgtgtttctaaagcaaaaataatactcatcaattataaaacactaacacaaatacatttcaatctcagagtaaaatatagtcataggactcattaaggatcattaatcatcatgattccttcaatgtcgtgttgaaaagcattaactagagggggtacaaaatattaggaactaaagatgcttaactatgatgaaaggacggaagcaaagtgattccttattcattcaaaagcatggggtaaggagaatgaagagaggttggttaatagtttcaaatatacggttagaaggataagtgctagtgttctttagcacagtagagtgactacagttaacaataatttattgtatatttcaaaacagctaaaagagaagacttggaatgttcccaatacaaagaaatgataaatgcttgtgttgatgaataccctaaacagccagacttgatcaccacatattctatgtatgtatcaaaataccacatgtatcacatatgtacaattattatgtaccaattttaaaactttttttaagaatctgagggttaagtgattttgttatcagctctgctcatacctgaggacaggttcccagagcagagggtggccaagaccaggtgcccttragtggaatagtacagttacagttcagagaaagtacaacagcaatgttcctaaataacctagatcaaagaaacagcaacattctaactatcttgttctttcaaagaactgaatgaccacaatttagtgagacacactgactgtgaggcagtcaactggagaaggaattaagacaagaaaaagaactatatgtatttatagttatacggtagtaagaacatattacatttttctagatttaaatcagtacatgctactgcccagagatattagtcttacaatatattatgtcatttaaaagtttaacatatgtcaaaagaaaatctttggtttagaggctgcagagatataactttttaaaaaaactgattttaagtatgtcatttagttttcctactctaataagcagtttacaaggttgcaaccttaccattccagttttcaaagaaataagtatatttgaaacatctgaattccttagatgtgcagatggttatggaagatttaaaattatttatgaacgataaaagcactggctttttcattgaagcattaagtttgatctccagagactctcaaattccaaagctgtttctcacaacctcacctcgagactgaatcccaaactaatcctttctcaactacccaaaaaaaaaaaaaaagaaaagaaaagaaaagaaaaagaaagaaaaaccaccaccacactactagcttttccttacatgatactcctttcaaatgctagatcctgctaggcttctactggtcctttgtcacagaagtccaaattccatcccagctgcccaaatccgctcagactgccctacttactaacagtactttgccacactaagctagggaagaaatggaaatgaggccattatctgtaagctggtgattttaccctcacagatggagaacaaatgatataaaacacagactgagaacaaggcacggtaacttagaataattttcttacattccaggtacacaaaggcaatgataaaagctctaagagttagcttgaatatttcaaaaccataacagaaattgaattttaaaatttattaaggttgcagaatccaacaagaaaatacattgatagggctttggtgagaattaaattgtcagcttagtaaaataggttatcgtatgctgactgttgtattggctttaacataggaaaaaggagaaaaacaaatgattacttaagaaacaatttagtgggcaaggtttcaaaacattgggtcaggggaataaaaataagagagtttggcatagcttttaagaaccgcaaaagccaaaagtctagataagattatatgtacataagcaaaatacaaggcttaccttagtatataaacacaatatgactttattttccttggaattaagaaaatatttaatttataaaatgcttcaaaaattatttactagattatatcaaatattattcctaaataaaatctacaaaggctattacagataatggtaacagaccactagcaaacttttattttattctgctttagtcaacatttatatgttatagtactcatttatagattattgaatattaagacaaaaataagcagatgactaagacctcacagtttcagaaacaaaatatttggaggcaaattaatgcagttctgtaacttttctctttaatgttcagaggctcagaagaaaataaagaaatacacca

SEQ ID NO: 714245 - DNA, 3237 bp, Homo sapiens
ctttgaatgtcattgctctgtttatttattcattcagcattttaaaaatatgtactaatgtcctaggtgttactttaatctatatttcatctcagtttttagggtcaaaatatcctaattttataagaaccatgcattcttttgaaaaacttttagaacagcaaaataaacctaagataaagatatgtgtgtgtgtgttaccttctagtatcacggcaaataaaacaaaactacatgagcttgccagtaatttatcaaacaggatgagattgtagatattaataagccagaaataatggagataggaaataagtggggaggatgagccaggtataatcagagatgtaattgagtacattagcctagtggctccttaacacataaattaggtactttgggaaataaactgattttgataatctgtagccacataatagaatgttgtcaagctctttgcgtcatttgtggattttaattagttcttcttctgacctccattatcttaggtgatcacatactttctaaataaagaaattagctagggacaatgatgtaggtgaattatatttactgtcttgcaattcaaatgtctattaccacataacaaactatcccaaagcacagtggcttaaacaacaatgcattatcatctctcatggctctgtggggttcttgtctcttgtgtgtgtgcagccatctaaagtccccactgctctgcacgtccaagatgtcttctctactcccaagtctggtgcctcggtgttccccttgtggctccctctcttggcagagtagcttggactgtttcatatggtggctcagggtaccaagaggcaggaagcagggcccgccagtcctcttaaaggctaggttcaaagtggctacagcacatggtgggtacgtgttctgttggccagacaagatgccaaagggtaaaggaacagacttcacctctcaagcggggtattggtgtgtgtgtgcacagggaagaaggaattgaagtcacgcgtacttctcatttcccctgcttcaccttgttctcctcaaactagatcttccttcttagttctcaactttcatttactaaccatttaattgattattttctctcaggaaaactcctttaagtttcctgtatctatcagatctctacccatttttgtttgttttctataaagttctagcattcatgcctcctcaattccaccagttttttttttttttttttaaagccactataatctcatgcactgttgcggagggtttcttgtgttggttggtgtaaagttaggaagatcccaagaccatgttcatttctgacaccaactgtaagtttytgagttcctaaggcgaccctcaggtttaataacttgctagaaagattcctagcactctgaaagctattatattcacagttccagtttataagagcaaaagaatacagattcaaatcgagcaagggaagactggggaacacagatcagggtctagaagagctccaagcttccagttgttctttcccagtgtagttgtgtggatgatgccacttcttccagcaacagtgtgtgacaacatacatgggtagtgccaaccagggaagcacacccaagccttggtgtgcagagtttttttaaaaatactttgtactttatcgactgtattaaatatatcacctacatccccattagctttgattgcagtgatgagtagtttttatttatttatttttatttttattttttacttttaatttaggttgaggggtacatgtgcaagtttgttatgtaggtaaattgtatcatggaggtttggtgtacagagtatttcaccatccaggtaacaagcatagcactcaaaaggtagtttttccatccttgctcttctccctccctctaccctcaagtaggcctcagtgtctgttcccttctttgtgtccatgtgtactcagtgtttagctcccactcataagtgagaacatacagagttatgtgactgagactcagtcacacaggcgtgtttggtcacagagatattgttgattgctcctgataccatgtagccacaggcaccctaccatatataaatcacattgtttgcatagactctgagaggtggcctatagccccaaagagaacaaaggcactcttttcctgcaggatatcccaagggcttagagattactgcctgagtgctaagagtgaagaccagacctctctttgggcaaggttaattccttactgctgaggtccttcatctacttccctctccagtccatttaatatccttgccaggtaaatttctctaatgaatagtcttagtcattgtcactttcctgctcaacaacctatgatatcttattaatgcatttttgtccctatgttccatacttttcaggtggcttttattataaatattttcttttttggccccataaactaacaaaatgtcaaagtggtcccaggttacttaatcaccctatgttttcctacctggcctttccccttgctatctatctgctgtgtccttgcccattcaaactccaacccatccttgtggtatcatgcgtatgatagtgccctcactgtcaaaaaagcttaattgcttaaaatagatttatttgattcctttttggatccctttctttgtacatctctgtggcacttgctacggttggctttgcattacagttatttttgtacctgccttatgctctttctaagacagtaagtgcctccagagtaaagatcgtaccttattcctcttcatatttcctgtaaaagccaagatcatgcctgaatctggaagggatggaatatggggagaatctaaatcctaccttctgggggaagacccaatacatgtttactgtcacaagtacagactccttaaaatggtggcttctctgttgtattaaagccaaatgaatagtttctgtaataagccctcttaagttctgtatgggctgaggtggttaggggaaattcttttgaggagttttaaataactgaattcacttgagcacgtaaacactagcattgcgttctttggtcagtatgcagcatttgacactacatatagatcagggattttgtagaatctaacctaaaggatttgactgggttccgttggtcccatgtgaaaaataacttgataggattcacttaacttcagatctatgctctctcctctctctcattttaaaagcccattttcttccctgccaggattctagtatgc

SEQ ID NO: 714246 - DNA, 1261 bp, Homo sapiens
ttttcatttttttgtgtcctcttcaattcgttcatcagtgtttcacagttttcattgtagagatcattcatttctttggttaagtttatttctaggtattttattttatttgtagctatactgtaaatgggattacttccttgatttctttttcagattgtttactgttggcatatagaaatgctactgatttttgtgttgattttgtattctgcaactttactgaatttatcagttctaatagttttttgttggagtctttagttttttccaaatttaagatcatgtcaagtataagaataatttgacttcttcttttccaatttggatgacctttatttctttctcttgtctgattgctatagctaggacttcctaaaggattcttgatagagttttttcctggtttgagttttctgatgaattcctgaagatggtttttctactctgactttaggattagtatcgccctgctgtgagaactgtaatactgactgaggaatgagtgatcactgggcccgtccctcattggttacactgaaattattctataccatgtgaatccttgcatgtcctacaagagttgctgtrtgaataaagggtttcctatgtttatttcacttccttctccagcataaattatctgatattcccctattccattttaactacactaggggtatatggatattcaattctgacactatccagagttagcatcagacttcacatgtttaaagcctcattcccattgagcttctcttaagatttcaaataccaggcacactttggggggccccaagccacttgcacttctacacaactggctataaaatcagaggttttcatttcccctcagattcaataattcactaaaatgactcacagagctcaaaagtaagcaataattatgattacaggtttattataaaacatacaacttggtaacaactaaatgaagggatgtatagggtgaggtctggagggaatgtagagctgtgtgccctctccccatggagtcgctgctggttaccctcctgatcagcaaggtgttcaccaacctagaagctcccctgagcctcagtgtctagagatcttactgcagtttcattatgtaggcttggttgattaaatttttgaagctctgtgctaagaactaaagacaatgtcagatgtattctttactataccacgtcctccagtactcccctaaaacacacaggaagcttcctcttcctgattcagaatttctatccaattt

SEQ ID NO: 714247 - DNA, 1039 bp, Homo sapiens
tttaaaaattactttatagaaaaaacgattagcaaaatgcagagatttggtgaactaccaagaaaaaaaaacttaatatttaagttagattcaaaaactgcaggaaaaacaaatatcttttaaattgtttatgagaacaaattaataagcaatacatgctgtttgyagactaaagccctaaacgcctaagtccactgtgtggttaatttctgaatggtgatgtgaacccagtgtggtatacactcccagccacagagcacgatgaggcagctgtgaggggtcttgacggtaactcagtaataacaaaacctagacccctgcaaaggtgaaaagtcaactgcgcttgaaaaatacttttaagttgaacacaggtattttattcaaattaaatggtgtaactggaggaggataaagggaatttcatctgggggaaggttataggcggtgggagtgaaaagaataggctcagaaaacagacgtgccatgcacaactcaattctctagcctgctgtatcctgttctccactctgccttctcttcaccaaaattctcattcatttcacccttctgtttcaaacggaaagtattaataggaagacagcaatcctttctacctaaaataaaaggtatacaaactcctaggtctatggttttaaaacatgtaattctccatgaaactcctgtttaaaataaatgaaatctcacacacgatgaagtattcaccacggtgagagagtaaagccacctggatttgagtggagtggtagctcatgcctgtaatcccagcactttgggaggccgagacaggtggatcacttgagatcaggagttcaagaccagtcgggccaacatggtgaaaccctgtctctactaaaaatacaaaaaattagctgggcgtggtggcacactcctgtaatcccagctagttgggaggctaaggcagaagactcacttgaacccaggaggcggaagttgcagtggatcgtaccactgcactccagcctgggtgacagagaagactccatctcaaaaaaaaaaa

SEQ ID NO: 714248 - DNA, 758 bp, Homo sapiens
tggagtcatcctcagtcaccaaagctcttaagatagaaggaaaccctctgctaccaccagagctgagttaggcagagtgagagaagcaggatgctcttacccccggcgctgggcaggcatgggaggctgcgcctggggcacaagcaggcgttttcggaatggatccatcatggtgggtggcatgccaggtcgaagcggagctgctgcaccaaatggggagccagcagggggtcccacctgcaagccagccatgggcatccggttccctggtgacatgccaggtcgctgggggaagtgagccaacgggggtgcataggtcaggggcaaggccctccgggacccatagcccatgccctccatccctctcgtcagccaggtagggcctgagcagcacaccagagccctgctggagccccaggaacaaaggggagtgggcgcctgagcacagagtgtaaaccacacctgccctgccccctgcaaccgccctggcagccatgccagcgaatgaggcctgccagaacctgggctgggaggagggtcctgcctgcagagggaagggccttggggagcttttcagggcccattgctaccttccagccccagcatgctgtgccctattccctggrcaagctggtccctattctctcagacagtcctgccaagccctgccctccttctctttctcccatcatgaagaagaagcatggctgagaggcacagggggcagtgtcactgccaggcagaggagtgtgctatag

SEQ ID NO: 714249 - DNA, 590 bp, Homo sapiens
ggaggccctgctagcgctagcgcggcggtgataaccgagggaggtgggtgagaggtgcggctgtcgaggcaaacgcagagcacccgcccagtcctccaagggccgagagccgggagtcccgaacgccgcttaagcagctccttgcttcccgcagcccgtccacatccctgcgggatttctggacgccccgcccggggacctagggaggagggagagaggagggagggagtgggcagcctgggcgcacgccaccggtccccgtacgcccggcaccccccgtggcgcggcgagtcaatgggatttgcacactcgaggtgtaacagcattactgcattaattaccatttccatttcacgtccagattgtttacttatctgcgggaaacatatgtcgggagaagttcacattccggattctgctccgctgcccaaggtgcaattccggggaggcggcgaggggggaggggagggcttcagattttttattacaccctctagcyttatctgccgctgtaaattatgaggatcctccattgagcggcatatggagattatatacttttttgaatatcgtttcccaaagcctgcaga

SEQ ID NO: 714250 - DNA, 1549 bp, Homo sapiens
ttactggtaaaaacatgtaacataaaatttactgtcttaaccatttttaactgtatagttcagtaatggttaagtatattcatgttgttgtgtaaccaatatccagaactcttttcatcttccaaaactaaaactttgtatccattaaacaacagctcctcatcccctatttctctatctccctggccatcggtattctattttctgtttctatgaatttgaacactctagatatttcacataattggaatcatacaatatttgctttttttgagactggcttatttcacttgccataatgtcctcaaggttcatccatgttgtagcatgtgtcagaatttccttcttttttaaggccaaataaaattccattttatgtatataccacattttatttaaccactgataagataaatggataattaactctttattagatacacatcaactccttatcagatgtatgattttcaggtattctctcccatttcatgggttgcattttcactctgtttgtgctcatacattttaaaagttcttttaatgtgcaagttttttgagaggggratccagaagccgttcattctttagttgatattcatgccaaatatttagaaactcagtaacatgtctcaaaattcacatcatttgataatgttgtacccacttcagaaaagtatacaaaatcacgattacccaatcaccctgatgtgattattatgcattgcattcctatataaaaatgtagcatgtaccccataaatataaatacctattatatacccacaaaagttagaaattaaaatttttttaagtgtaaaaaatcatgaagagtttataaacctattcttcttgtatcttccccttctagccagtgtgaccaccttcctgttatgttcaaaccttagcacttattgtcatcacttaggcacatgtttctccaaatatatctgtggccttgaaggcattaaatagctcccttgatattgccctgacttcttgctaagcctgagaaaaggaaggtggctttaaaaaattatatttactccaagaaaaagaaagcaatcggattactcaagaaactattccagtcaacaaagtatttggctaattgcaatgttgatagactacatcaaaacgaaataatatagaactcaccctctatagtgatgaagtaggactccatcccttcataaaagcaaggagaatactgacaaaactgtcaaaattagctttttcagaaaggctcgtaacaatcaaaggagagttaattcaagaacaacaacttcatttctctaagaacagcaaccttatgtccttttgacttgtgctactcccgtgcccttctccccagctctgcggtagctttgaaagctagcaacctcacaaacacagtagttgtgaaaaccagaagcccattagccactggagaatgggaaacaaggcacaaattggtttcaagctccccagaattcccatccccagatacttgtcactatttaagctgtctgggaacttgtttgaaacttccattctcagggcttgtctt

SEQ ID NO: 714251 - DNA, 1549 bp, Homo sapiens
ttactggtaaaaacatgtaacataaaatttactgtcttaaccatttttaactgtatagttcagtaatggttaagtatattcatgttgttgtgtaaccaatatccagaactcttttcatcttccaaaactaaaactttgtatccattaaacaacagctcctcatcccctatttctctatctccctggccatcggtattctattttctgtttctatgaatttgaacactctagatatttcacataattggaatcatacaatatttgctttttttgagactggcttatttcacttgccataatgtcctcaaggttcatccatgttgtagcatgtgtcagaatttccttcttttttaaggccaaataaaattccattttatgtatataccacattttatttaaccactgataagataaatggataattaactctttattagatacacatcaactccttatcagatgtatgattttcaggtattctctcccatttcatgggttgcattttcactctgtttgtgctcatacattttaaaagttcttttaatgtgcaagttttttgagaggggaatccagaagccgttcattctttagttgatattcatgccaaatatttagaaactcagtaacatgtctcaaaattcacatcatttgataatgttgtacccacttcagaaaagtatacaaaatcacgattacccaatcaccctgatgtgattattatgcattgcattcctatataaaaatgtagcatgtaccccataaatataaatacctattatatacccacaaaagttagaaattaaaatttttttaagtgtaaaaaatcatgaagagtttataaacctattcttcttgtatcttccccttctagccagtgtgaccaccttcctgttatgttcaaaccttagcacttattgtcatcacttaggcacatgtttctccaaatatatctgyggccttgaaggcattaaatagctcccttgatattgccctgacttcttgctaagcctgagaaaaggaaggtggctttaaaaaattatatttactccaagaaaaagaaagcaatcggattactcaagaaactattccagtcaacaaagtatttggctaattgcaatgttgatagactacatcaaaacgaaataatatagaactcaccctctatagtgatgaagtaggactccatcccttcataaaagcaaggagaatactgacaaaactgtcaaaattagctttttcagaaaggctcgtaacaatcaaaggagagttaattcaagaacaacaacttcatttctctaagaacagcaaccttatgtccttttgacttgtgctactcccgtgcccttctccccagctctgcggtagctttgaaagctagcaacctcacaaacacagtagttgtgaaaaccagaagcccattagccactggagaatgggaaacaaggcacaaattggtttcaagctccccagaattcccatccccagatacttgtcactatttaagctgtctgggaacttgtttgaaacttccattctcagggcttgtctt

SEQ ID NO: 714252 - DNA, 630 bp, Homo sapiens
ttttgaaattatgtatataggtagattatgaagtttattacaggattttagaaaaaagcctttttgttttaaagaaaaacattgagtcaaatagggattagatgtattagatgtgtattagatactgtctttcttttaataataataattacagtggaactttataggcttttctgagataaatggcaaaggaaataaaatcttatttttatcctaagatcttattttcttcttcttattgccaaaatgctccttttcacatacatggggacacttttaatactttgtgcaccccaaaatwttgttggttcaacgtaaaaagtacattacagaacttcagagcaaaacttctacagagcagcccaaagtgaggtttatgcagctgtaatgacctacaaggtctggctggtgtttgagaaggatgtgtttgctggacttgaatcccggctccactccttagtaactgcattatttcagactagttgtttaactcactggtcctcagttttctcaactaaagaatggggtcaatgacagctgtctctagggtgctgtgtcatgaaatgtaatcaggtatataccaggcccagcacaatgcagtcacatggtaggtacctagtgttaattttc

SEQ ID NO: 714253 - DNA, 912 bp, Homo sapiens
tgtctgagcatcctgctttgttgctgtgtaacctcatcttcccaacatccatctgctgagccagactctgtgttgctgttggcatctagtcttgaaccaagagtaggcatggaatgttacccacagatgcagtccctcaagctggcaacaccagataactcttcctcccttaatgcactgattcaaaagagctcttgggaacctcttccattggtggggggaaaaacatgggagaattaatcgcttttttgtgtgcatgtctctgttttgccaaggcctaagcattggttgcccccgctgtgagactgacagtcttgtatattcagttacgcagctccttcaagcaagctttcgggaagaagaagtccccaaaatctgcgtcctctcattcagatattgaggagatgacggattcttctttgccttcctcaccaaagttaccrcacaatgggtccacaggttccaccccactgctgaggaattctcactccaactctctgtaagtctgtctgtctagtcagataacatctttggcccctgagaaccttctccagtaggaatggctaggagtcctgttatgacacatctgctccttgggatcctttatgctttgctttaataggactgtgcatgttctttcaatgctttaggactgggaaagttgaaagagaaaagaaacttaggttttcgttctgatggtgtcaatatccataactaactggttggccttaagcgggttacttaaattctctttgtttccatacctctatatatcaatttgggataatggtttttgtgtacgtatcctagccctaagaattggacgagataaatggatatacaggagcttgcttcctgcagcagtaagaaaggctggccctgctcagtagggctgaatttcttttgaaacca

SEQ ID NO: 714254 - DNA, 650 bp, Homo sapiens
taagaggctgttggccacagtaagttcattctagatgaccatatagcagaatatttgtttagaaaacatatccatcaaaatatagattctttatttgatttctatcatgtctacaaagtgatgagcaagtggtgtcttcttttctgtttcaaactgatacttttggactagaaccacttatatgtccttagcacccttcctgcccccagccagtggagacatctttttttttttttttttgagatggagtttcactctgttgcccaggytggagcgcaatggcacgatctcagctcaccacaacctctgcctcccaagttcaagtgattcttctgcttcagcctcctgagtagctgggattataggcgtgcgccaccatgcctggctagttttgtatttttagtagagatggggtttctccacgttagtcaggctgctctcgaactcccagtctcaggtgatccacccagcttggcctcccaaagtgctgggattacagtcatgagccaccgcgcccggccaagacatcttattatttgttctaattttgcaatatagtgttttctaggacttgggtattctggctgccttcttctgtgggaagaaggttctttattttcttggtaacttctcgacaacttgtttgaaaa

SEQ ID NO: 714255 - DNA, 1673 bp, Homo sapiens
tctctatcaagcatggtgtgtgagctcattgatcagcagctgcaatgggagaatggagtggtggtactaggaggcacaactgccaccactatggggcttcagctgtaatcatcttccaagatcagccagtggtacagtaactgcctgctatccccgcacacactttagatcctttgctttatgatgctgttttggatttgtaaaaacattttatgttcacaaaaacaaaaaatatttttatagaagagaacgttatcatactttaccccttgtagaaatcttgtgagactggtcattgagagagccttgttttatacagcaaagttgcagaaaccaaatattkcagaactgtcagcctgtgtattttaagtttaaatcaggccaggcacggtggcttatgcctgtaatcccagcactttgggaggccaaggcgggcagatcacctgaggtcaggagttcaagaccggcctggccaacatggtgaaaccccatctaaactaaaaacacaaaaattagccaagtgtggtggcgtgtgcctgtaatcccagctactagggaggctgaggcaggagaatccatgaggccgaggttgcaatgagccgagatcgcaccactgtactccagcctaggtgaaaaagtgagactgtctcaaaaaaaaaagtttaaatcagtgtatgtgtatgaatgcctgtcatcttctctgtcttttctctatcactttgactcttttcagctacttcttgaggtccaaaaacttccagagagcttttcctgccccttaacagccaaacagagacttcagggacacagcaaacaagcatgcttgccatcagcatcttaagcttgacccttaggatagaggctcagatgaaagtcattcacaccaaagctgtgtccaggcaacagccaacagactttgaaaaaggacttaaccagtataagagatgactaaatttagacttgtgtatttctttttctgttgcttgtgtctttgatccacttggcagttaaaaattgaagttcctcagaccttttttttttttccgcctgcttgttttgctagataaaccgtttgcacagagtggtgtgtgtgcttgcacatgcttaatttccctggcatctgataaatgttttgaaatagaataatgctggaaacattttttattactttaaattgctttgcttaaatagaattgattcttttcctcgactgctgtattgttgctgcttttgtttttaaatgaataagatcactctaactacgtttccttcttattagtcccatcgtgttcaaccatcacttcctgtagtgcttactggcaaatgagacttcccatcctcacgtggctacacaggcatcagtgagacctctctgaccttgggctaggaatttggaattcctggtctgtaacggggagagatgaagctgcaaaacaaaaaagcataggttggaggttggaggtctgaggtttaaccttggatctatccctaaactctgtgacctcaagcaaggtacttttccccctgagcttacttactcaaatttggatttgagtcaaatggcccctaattttcttttcagttgtgagcgtctagagtaacttcagtttactagataaccaaccctgtataaaatttgagatttgattatccaaaatgaagtgcatgaaggc

SEQ ID NO: 714256 - DNA, 608 bp, Homo sapiens
ctacctaatcgtgatcaagctcttctttcacatttgtttcactttagtttcttaccattttggctatgtacccagaattctttaggtatgcatgaactgtttcagtaatgctcatcccctcttctcaatttaagttgaaaaagcaattttctccatttttaaagtacgttaaactggagcccagactcccccctgtgtagtgagttcataactctcattaaattaatctgcatttttatttttcacatccctctgcctccactcagaccaaccagggtcaaggagggccagggaattgggttctggattctcaagaccttgtagactccaaagagatggaaagactgtgaagcacaagaaagagaaaccagaacatccactggagaacttggaagagccagaacaacattgttcatcgaagagatccctgtcatcctctagctcgggcaaagggagggacaatccccayattaacaatgagcagcatgaaaggaaacggtccactcaggagaggcctcggagacctctgcttcccacgatcagtggtgaagtgtttctgagcactgaatgtgatgactgggagactaagattaaccatcagactcgaa

SEQ ID NO: 714257 - DNA, 608 bp, Homo sapiens
ctacctaatcgtgatcaagctcttctttcacatttgtttcactttagtttcttaccattttggctatgtacccagaattctttaggtatgcatgaactgtttcagtaatgctcatcccctcttctcaatttaagttgaaaaagcaattttctccatttttaaagtacgttaaactggagcccagactcccccctgtgtagtgagttcataactctcattaaattaatctgcatttttatttttcacatccctctgcctccactcagaccaaccagggtcaaggagggccagggaattgggttctggattctcaagaccttgtagactccaaagagatggaaagactgtgaagcacaagaaagagaaaccagaacatccactggagaacttggaagagccagaacaacattgttcatcgaagagatccctgtcatcctctagctcgggcaaagggagggacaatccccatattaacaatgagcagcatgaaaggaarcggtccactcaggagaggcctcggagacctctgcttcccacgatcagtggtgaagtgtttctgagcactgaatgtgatgactgggagactaagattaaccatcagactcgaa

SEQ ID NO: 714258 - DNA, 608 bp, Homo sapiens
ctacctaatcgtgatcaagctcttctttcacatttgtttcactttagtttcttaccattttggctatgtacccagaattctttaggtatgcatgaactgtttcagtaatgctcatcccctcttctcaatttaagttgaaaaagcaattttctccatttttaaagtacgttaaactggagcccagactcccccctgtgtagtgagttcataactctcattaaattaatctgcatttttatttttcacatccctctgcctccactcagaccaaccagggtcaaggagggccagggaattgggttctggattctcaagaccttgtagactccaaagagatggaaagactgtgaagcacaagaaagagaaaccagaacatccactggagaacttggaagagccagaacaacattgttcatcgaagagatccctgtcatcctctagctcgggcaaagggagggacaatccccatattaacaatgagcagcatgaaaggaaacggtccactcaggagaggcctcggagacctctgcttcccacgatcagtggtgaagtgtttctgagcactgaatgtgatgactgggagactaagawtaaccatcagactcgaa

SEQ ID NO: 714259 - DNA, 1735 bp, Homo sapiens
  misc_feature 1649: n = A,T,C or G
cagatattaatccagtgtgatatggattagatcaactttacattatccaatgccttgcccatgctttcatgccctaatagcaatacagctaacatccctaaaaatgactgccagaataatagcaagagctcatggccccattagcaatagttggcactagtttccagtttccaatatgatctgttgcaaaattagccaaaaatgatgtccaaagatttgccgaagttgaatttctttttgaaatgcagaggacaacttcattaagattctactagtacactgtagcattgtacactgtaccagcactaaacagaaccaaatctccatcccagtcacttcaactagatagtatctaaaatctcacccttagtataatgtacttaaatgagatggaaatactccacattctgccctgcctaagttctagaaatttttattaggttaagggttctatatttataacttaatgacacatccatacatattaggaccttcaactcttgaaaaaggaatttgagtatgtatgtattttaatacaaatttagcaaataggcttctgagaagaaaaagatctcacagtattttcaattatagtaactgtacttttagcatatgtcaagttaatggtcctataaactcacagaaaagaataagactcttaaagataatatgtatcaatgaaggcgagtatacatacaagaggaagttcacaatcactttaaaaaccatacaataccgagtccataagggcattgccacattggttttatttaccactatattcccagcacccaataccttgactagcacataataggcactaagaaaatacataaggctgaatgaatcatagcaaatatttaatataaactaaaattagatgatcacttgacaagggtattgtatacaaacttatttaatcagtaaaaggaaggttagaatttgaccaggaaatctttaaggtgctttccaaacctcaagacttcataacattttcatcactatgccagtgaaagtattaaatgaaggtcatactctattatagaaaggactactagaaacatgtctatcaataaccacaggatgcattataatctaccagtcagcctttttatacaaataactgtcaagcsggggtgggcaggggaagggaccacaagagaaaccataaaacattagtaatcttaaaggataaattaatcttgtttatatacttctatatttatacacaaaaaaatgttaatctaaaaatgactaggtctatgaattgtgttaaaagaacaaatccaaaaatgatgtattaataattagggggaaaatccctggtatcgaaagtaatagaattattttttccttaaaagctgcaaattagctgggcatggtggctcattcctgtaatcctagcactttgggagaccgaggtggggagaccacttgaggccaggagttcaagaccagcttggccaacatcacaaaacccatctctactaaaaatacaaaaataagccaggtatagtggcgcatgcctgtagtcccagccactcaggagactgaggcgggagaatcacttgagcccgggagtcagaggttgcagtgagccgagatcatgccactgtactccagcctgggcaacagagcaagactctgtnttcacacacacacacacacacacacacacaaaaaggctactaattgaaaagttcagtaccagttaagcaactgctcagttacagaa

SEQ ID NO: 714260 - DNA, 1735 bp, Homo sapiens
  misc_feature 1649: n = A,T,C or G
cagatattaatccagtgtgatatggattagatcaactttacattatccaatgccttgcccatgctttcatgccctaatagcaatacagctaacatccctaaaaatgactgccagaataatagcaagagctcatggccccattagcaatagttggcactagtttccagtttccaatatgatctgttgcaaaattagccaaaaatgatgtccaaagatttgccgaagttgaatttctttttgaaatgcagaggacaacttcattaagattctactagtacactgtagcattgtacactgtaccagcactaaacagaaccaaatctccatcccagtcacttcaactagatagtatctaaaatctcacccttagtataatgtacttaaatgagatggaaatactccacattctgccctgcctaagttctagaaatttttattaggttaagggttctatatttataacttaatgacacatccatacatattaggaccttcaactcttgaaaaaggaatttgagtatgtatgtattttaatacaaatttagcaaataggcttctgagaagaaaaagatctcacagtattttcaattatagtaactgtacttttagcatatgtcaagttaatggtcctataaactcacagaaaagaataagactcttaaagataatatgtatcaatgaaggcgagtatacatacaagaggaagttcacaatcactttaaaaaccatacaataccgagtccataagggcattgccacattggttttatttaccactatattcccagcacccaataccttgactagcacataataggcactaagaaaatacataaggctgaatgaatcatagcaaatatttaatataaactaaaattagatgatcacttgacaagggtattgtatacaaacttatttaatcagtaaaaggaaggttagaatttgaccaggaaatctttaaggtgctttccaaacctcaagacttcataacattttcatcactatgccagtgaaagtattaaatgaaggtcatactctattatagaaaggactactagaaacatgtctatcaataaccacaggatgcattataatctaccagtcagcctttttatacaaataactgtcaagcgggggtgggcaggggaagggaccacaagagaaaccataaaacattagtratcttaaaggataaattaatcttgtttatatacttctatatttatacacaaaaaaatgttaatctaaaaatgactaggtctatgaattgtgttaaaagaacaaatccaaaaatgatgtattaataattagggggaaaatccctggtatcgaaagtaatagaattattttttccttaaaagctgcaaattagctgggcatggtggctcattcctgtaatcctagcactttgggagaccgaggtggggagaccacttgaggccaggagttcaagaccagcttggccaacatcacaaaacccatctctactaaaaatacaaaaataagccaggtatagtggcgcatgcctgtagtcccagccactcaggagactgaggcgggagaatcacttgagcccgggagtcagaggttgcagtgagccgagatcatgccactgtactccagcctgggcaacagagcaagactctgtnttcacacacacacacacacacacacacacaaaaaggctactaattgaaaagttcagtaccagttaagcaactgctcagttacagaa

SEQ ID NO: 714261 - DNA, 1735 bp, Homo sapiens
  misc_feature 1649: n = A,T,C or G
cagatattaatccagtgtgatatggattagatcaactttacattatccaatgccttgcccatgctttcatgccctaatagcaatacagctaacatccctaaaaatgactgccagaataatagcaagagctcatggccccattagcaatagttggcactagtttccagtttccaatatgatctgttgcaaaattagccaaaaatgatgtccaaagatttgccgaagttgaatttctttttgaaatgcagaggacaacttcattaagattctactagtacactgtagcattgtacactgtaccagcactaaacagaaccaaatctccatcccagtcacttcaactagatagtatctaaaatctcacccttagtataatgtacttaaatgagatggaaatactccacattctgccctgcctaagttctagaaatttttattaggttaagggttctatatttataacttaatgacacatccatacatattaggaccttcaactcttgaaaaaggaatttgagtatgtatgtattttaatacaaatttagcaaataggcttctgagaagaaaaagatctcacagtattttcaattatagtaactgtacttttagcatatgtcaagttaatggtcctataaactcacagaaaagaataagactcttaaagataatatgtatcaatgaaggcgagtatacatacaagaggaagttcacaatcactttaaaaaccatacaataccgagtccataagggcattgccacattggttttatttaccactatattcccagcacccaataccttgactagcacataataggcactaagaaaatacataaggctgaatgaatcatagcaaatatttaatataaactaaaattagatgatcacttgacaagggtattgtatacaaacttatttaatcagtaaaaggaaggttagaatttgaccaggaaatctttaaggtgctttccaaacctcaagacttcataacattttcatcactatgccagtgaaagtattaaatgaaggtcatactctattatagaaaggactactagaaacatgtctatcaataaccacaggatgcattataatctaccagtcagcctttttatacaaataactgtcaagcgggggtgggcaggggaagggaccacaagagaaaccataaaacattagtaatcttaaaggataaattaatcttgtttatatacttctatatttatacacaaaaaaatgttaatctaaaaatgactaggtctatgaattgtgttaaaagaacaaatccaaaaatgatgtattaataattagggggaaaatccctggtatcgaaagtaatagaattattttttccttaaaagctgcaaattagctgggcatggtggctcattcctgtaatcctagcactttgggagaccgaggtggggagaccacttgaggccaggagttcaagaccagcttggccaacatcacaaaacccwtctctactaaaaatacaaaaataagccaggtatagtggcgcatgcctgtagtcccagccactcaggagactgaggcgggagaatcacttgagcccgggagtcagaggttgcagtgagccgagatcatgccactgtactccagcctgggcaacagagcaagactctgtnttcacacacacacacacacacacacacacaaaaaggctactaattgaaaagttcagtaccagttaagcaactgctcagttacagaa

SEQ ID NO: 714262 - DNA, 237 bp, Homo sapiens
gagaaacagacaaaagtcatgccattacaagaaaaagtttaattgcttgatatgtagtgtagattgaagtctgcagctttagttgccaaccatttcagacagagattcatttataaacagatgacataaactttcagtattgataaatacagtacaatactataaatgyattttctctcccttatgattttaaaacgttttcttttctgtagcttactttattgtaagaatactata

SEQ ID NO: 714263 - DNA, 953 bp, Homo sapiens
gcacataataagtaccaaatagatatctgttaaatgaatagactagaatctatcattgctaaatattcaaaaaggctataaattttaaagtaatattctgcataaatgagcaacgaccaaaaaaggttgtttttctctaagtacctgcaagccagctgttggtgatctttaactaacttattagtttctagactccacccttacccctgtttcatgttcaagaaccaattcttcccttttactaatatcagcatcacatggtcattctactcaaatttgtcactgtcaccaataggaaacaggctgctatgcgagatgaaattacagataatacccaggtagaacaatattaatccaggtaaatatttayatgaatttgaaatgtaccttccggaaattttaaagaggccagaatcagtctaaaagaatctgtagttaatagaatgagtggaagatattatttatgagcaggtggctttcctgtgctgcttctcaactaaggacatgtctcttcttctgcttctttggcttgtcagaaagtaaaatatttaaaacaacgcagggttccacctcatctttttatcaaagctcagaagtctcaggaaaaacagttatactgcataaggaaaaagaaagtgaacttcaagcaatggaaaccacaataaattaaccaattgagcacatttttcacacaagttttaaagcagtttaatactctttccaaagtaagtacataatattgtactgtttttctttcttttgaagagcatttaattggagaaaaatactgaagctgttagtactctcaatgaaatcttttttgaatttttaatttttatgggtacacaggtatatacatttatcaggtacatgaaatattctgatatgcatataatgcataataatcagtaaatggggtatccatcacctcaagcatttatcctttgtgttac

SEQ ID NO: 714264 - DNA, 762 bp, Homo sapiens
tatgtcaaattgctccttagtaagattgtgtcagcctttcctcattgtcagcaagtgagcatgcctgcttcaccacattatcccattgggtgttcccccaccctagtgtttgctaaattggcatgtagataattgcatttcattttaatttgtttctttgttgtatttagagttctctatccacttatccattggagtcttaccaatttttrtagcattatatatgaattttgaatatattaagaatatttgtcatgttttgtgcaaatacatttaccctttctgtttgcctttttactttgtgattttttttatgtatagaagttttgaaatgtttaagtattcagatctactttttcctctacattttttctctttttttagtgtagaaatttccaaatgcttcatacatctcaatgaatgcagacacattcacagattttttttttaacataatggcaatctaaaagattaaaaaaggaatgccacttaagttacagatttttgacttccttttgtcatatgtttattggctattggtctttcgtcttctttaaatatttttaagtatttaatctttcataatttttataaatgatatgtagaaatctagattattagttctgatagcatttagtaaatgtttcatttttaccaagatttcaaagtatagtttacccaatgtaagattttcatatacacgtatatttctttgtctctattaatgttcctttgatctaattatctgtcacagcataatta

SEQ ID NO: 714265 - DNA, 1778 bp, Homo sapiens
gggacaaaaattaagcagtcaactaaatgatgtccttaattgatccccaagactaggagaaagtattcaataagcaagtagttgctgcttacagccgtgccaaaagggaagaggatcacaactgtagagctgctagaagagcaaaaatgatactgatacatagaaattttcagaaaaagaatttcatttagccacctcagggcaaaggtgagaaactaccacctatggtcagcaactcgtgcaacctaccctctgaagttgtccaccagggattacaaactacaaattcagcaacgctatggaagagagccattcgtgctcggaggatcggggatggggggatgtctattgtccccatcctaaaaatgtggccaacagattagtcagaacaccaggaaagcaagaactccgcctctttatcctattttgaggcggcacttcaagaggaattatcatccaacacctctgtccccgataaatccctttaattcaaaaaaccatagcccggttcggcgcggtagaaaagaaccaagaaagggaagaggagcccagaaatcaacccgctgcagtactgacaccaactgcgggcrtgggacgcttaccttggagtcagggaggctgaacacgctggggtcgtccgtactccccaccatgatcttgtgctccttccccggggcatggccgcctgcgccctcggagcgtgcagccttggcgccgtggcgctccccggacacccggtcgctggtggtgtttcccatggctgcagctcgtcggggaccacctaccgcggggaacgacaccgggctgggaacacctcagccgccgcgtcaggggcgcccccccggcccccgcccctgcgcctcgggacagggcaagggattccccgcccaaggaaagccgagccctggagccctctccctcttggcctgcgggaacgcctgcaaataccccggtgccctcactggccctagctcaggaaacccgctatcgggacctcccccgcgtccccgcgctcactgccaggggcgcccccactccagtcacctcgggcgatgcgctccctcctccaagggccactgatgtgatggctgttctgcagatcaggccaccaataaagttattgaaattgaagccgcacccctcgctggcgaccagcgattcctcctaaaatggctacaaggccggcggcgcggagtccgcccagtgcgcgttccctgcggcctgcagcctcggcgcccgggacccgccggcctctctagccgccgccgccgccgcctcgatggtgggcagtcgcacgcagcctccagcgccaggagggggcgccaggcagggcctgtcccgcctggggagactgcgcccgggataataggagcgcttggcctctgagactacccggcagaagggacgtccccaaatgacactcggaggccgcctccctgggctccggtgctcggtgccgggaggagcggcacggctttctaccccgcctcaggtgcgccagcacgttttctgggcagcatctgtgtgttaggcgaccggagaggtgggttccttatagggaataagaaaactgaaactgacttccaactgcaggcagaaggaagcagtggtcattgctggaggttaaaactgttctgaccgggcgcagtggctcacgcctgtattcccagcactttgggaggctgaggcgagcagatcacgaagtcaggagatcaagaccatcctggccaacaaggtgaaaccccggctctactaaaaatacaaaaattagctgggcg

SEQ ID NO: 714266 - DNA, 665 bp, Homo sapiens
ttaaaagatgaaatgatgccttgatgtgaatctttctgctttgcttcattctccctgrgccacatttatgtgttcaaccgcacagggttcagcacttggaagggtccatacttgatttaccatttttcccgatcttgaatttcttaataattatgaataaagggctgcacaccctcattttgtactaggccctgtaagttatgtagccatgcctccttcactcttgctgatctaccactcttacaactaccaggtttatggctctgatatctctgtcttatattttctggctcaaaaaatgttgaagcagaatttgaccctcagctctcctagaacaagcctaacatttgttttctcttgcccctgtgcttcaaacaacttccggtggtctgtgtgcctcaacaaccttgggaaacctgaggacacattctgtattcagaatcatggctctaacctgtgataccctgtggggttttcttgcacttcccctcatcatctgccctagcaattgataagagtaacacctttatttaaaaaatggaaatgattttacttaccgaaagcatcctatttattaaaaaatgtagaaagcaaagtggcatatgcttttttctggtatctccaccttccttttgtatgctttttttgttataacattatacaca

SEQ ID NO: 714267 - DNA, 767 bp, Homo sapiens
tggtgygtttttactgagcgctgattggtgcgtttacaaacctttagctagacacagagcgctgattggtgtgtttacaatcctttagttagacagaaaagttctccaagtccccacccaacccagaagcccagctggcttcacctctcactgggattacaggcgtgagccaccacgcccaaccggtaggaacaaaataactttaaacaattgtccccaggtgtaggcaccggctacagggggccagggaatgactggaattccatacccatgtctctgtgggtctgcagatctctcagttctcagcctgctctgagctatttttcttttctcatatcccccctgttgatcaaaattattcccatggcagcattgatgatcagtctctgtgcaggtggcagtgatagatgtccttcatccctcagtgctgggaagtctcattcctgggtagtcctcattcaagccactgatttatataaatgctgttgttgcttgttgaatcatctccactcttcagaatatcattttctggttttcttggaagaagcaaaaccctgagagatacatagtaacaaagcctattccattggggattcagttcaaattgtaggaaaataataaaagaactcaaaaacaatggtcgggggctggaatctaataacaggtgttctatagctttcttcaggagcctaacttttttctccagtccctatttttaccaaagtttagtattatacttggcctgattatttgcataaagtgcagca

SEQ ID NO: 714268 - DNA, 767 bp, Homo sapiens
tggtgcgtttttactgagcgctgattggtgcgtttacaaacctttagctagacacagagcgctgattggtgtgtttacaatcctttagttagacagaaaagttctccaagtccccacccaacccagaagcccagctggcttcacctctcactgggattacaggcgtgagccaccacgcccaaccggtaggaacaaaataactttaaacaattgtccccaggtgtaggcaccggstacagggggccagggaatgactggaattccatacccatgtctctgtgggtctgcagatctctcagttctcagcctgctctgagctatttttcttttctcatatcccccctgttgatcaaaattattcccatggcagcattgatgatcagtctctgtgcaggtggcagtgatagatgtccttcatccctcagtgctgggaagtctcattcctgggtagtcctcattcaagccactgatttatataaatgctgttgttgcttgttgaatcatctccactcttcagaatatcattttctggttttcttggaagaagcaaaaccctgagagatacatagtaacaaagcctattccattggggattcagttcaaattgtaggaaaataataaaagaactcaaaaacaatggtcgggggctggaatctaataacaggtgttctatagctttcttcaggagcctaacttttttctccagtccctatttttaccaaagtttagtattatacttggcctgattatttgcataaagtgcagca

SEQ ID NO: 714269 - DNA, 767 bp, Homo sapiens
tggtgcgtttttactgagcgctgattggtgcgtttacaaacctttagctagacacagagcgctgattggtgtgtttacaatcctttagttagacagaaaagttctccaagtccccacccaacccagaagcccagctggcttcacctctcactgggattacaggcgtgagccaccacgcccaaccggtaggaacaaaataactttaaacaattgtccccaggtgtaggcaccggctacagggggccagggaatgactggarttccatacccatgtctctgtgggtctgcagatctctcagttctcagcctgctctgagctatttttcttttctcatatcccccctgttgatcaaaattattcccatggcagcattgatgatcagtctctgtgcaggtggcagtgatagatgtccttcatccctcagtgctgggaagtctcattcctgggtagtcctcattcaagccactgatttatataaatgctgttgttgcttgttgaatcatctccactcttcagaatatcattttctggttttcttggaagaagcaaaaccctgagagatacatagtaacaaagcctattccattggggattcagttcaaattgtaggaaaataataaaagaactcaaaaacaatggtcgggggctggaatctaataacaggtgttctatagctttcttcaggagcctaacttttttctccagtccctatttttaccaaagtttagtattatacttggcctgattatttgcataaagtgcagca

SEQ ID NO: 714270 - DNA, 767 bp, Homo sapiens
tggtgcgtttttactgagcgctgattggtgcgtttacaaacctttagctagacacagagcgctgattggtgtgtttacaatcctttagttagacagaaaagttctccaagtccccacccaacccagaagcccagctggcttcacctctcactgggattacaggcgtgagccaccacgcccaaccggtaggaacaaaataactttaaacaattgtccccaggtgtaggcaccggctacagggggccagggaatgactggaattccatacccatgtctctgtgggtctgcagatctctcagttctcagcctrctctgagctatttttcttttctcatatcccccctgttgatcaaaattattcccatggcagcattgatgatcagtctctgtgcaggtggcagtgatagatgtccttcatccctcagtgctgggaagtctcattcctgggtagtcctcattcaagccactgatttatataaatgctgttgttgcttgttgaatcatctccactcttcagaatatcattttctggttttcttggaagaagcaaaaccctgagagatacatagtaacaaagcctattccattggggattcagttcaaattgtaggaaaataataaaagaactcaaaaacaatggtcgggggctggaatctaataacaggtgttctatagctttcttcaggagcctaacttttttctccagtccctatttttaccaaagtttagtattatacttggcctgattatttgcataaagtgcagca

SEQ ID NO: 714271 - DNA, 767 bp, Homo sapiens
tggtgcgtttttactgagcgctgattggtgcgtttacaaacctttagctagacacagagcgctgattggtgtgtttacaatcctttagttagacagaaaagttctccaagtccccacccaacccagaagcccagctggcttcacctctcactgggattacaggcgtgagccaccacgcccaaccggtaggaacaaaataactttaaacaattgtccccaggtgtaggcaccggctacagggggccagggaatgactggaattccatacccatgtctctgtgggtctgcagatctctcagttctcagcctgctctgagctatttttcttttctcatatcccccctgttgatcaaaattattcccatggcagcattgatgatcagtctctgtgcaggtggcagtgatagatgtccttcatccctcagtgctgggaagtctcattcctgggtagtcctcattcaagccactgatttatataaatgctgttgttgcttgttgaatcatctccactcttcagaatatcattttctggttttcttggaagaagcaaaaccctgagagatacatagtaacaaagcctattccattggggattcagttcaaattgtaggaaaataataaaagaactcaaaaacaatggtcgggggctggaatctaataacaggtgttctatagctttcttcaggagcctaacttttttctccagtcccyatttttaccaaagtttagtattatacttggcctgattatttgcataaagtgcagca

SEQ ID NO: 714272 - DNA, 655 bp, Homo sapiens
aaactatgttaattaaggtacattcacttgatagactatcatacagcattaaaatgatatttataaagaatttataacaatatgggggcaaggtttatgccatattgttaagtgggaaaataactgaatacaaaatcaaatatgttacatcatcattcaaaggtataataatgacaataaaaagaatctcatcaacatggttggaagaaatacaccaagatattaaaagtaattgttaattgaacaatggcatcataggtgactttttctctctacttttctgaaatatccaaattttttacaataaacatgtaagtgtttacagtgaaagagagaatagtgaaatttccttttaaaaatacttgaaaatgatcacaaaaatgtgtcaacatttcaggtaagaaatatgtttttatattggtctgtacacaaatttctatccagatgataaaaataacttcaagaaattaaacctattcagaaacaatataaactcattgtgattgtgtctaaattcataggctttgagaaggataaatttttaaagtgtaaattactatgcaggtggtcaggaaaaggttgtatggagtcacrtgataaatgacacaaagaaaatgctttttatgaaaaacaaactggatagattttttcccaa

SEQ ID NO: 714273 - DNA, 619 bp, Homo sapiens
aatgttctcaaaacacaaaagtaaagacctggatacaatgaattattttattattcagaaattgacttatttaggaaacttttttctttcatagctgaaacccaccattgcaaagaagagctaatatgaaaaggtttgagagtttttcatgaagagctcagatccagaggtctgtaagtctttgagttaggttatttacatgtgaagacaagataattatttacatgggtcaaaataaagagcaacagttgtcgttactgaaatcagaaacactttgggtccatgatattatagaagtaacttggcttctcagcatgaagaaatacctaccgaaattcctatatgtaattcctatgcctgaaaatgtagcatggaaccacttctttggcaacatgctgaayatctccctgtgtggaatgccccaacacttatgtgtatgaatttctgttctcaatatataacaccaacaaagagagagaggctgcctggacccagaacttattataatgtagcattagcactctttttatcaacccaatttttaaaatatccaaaaatcatatcttttttcctcaatagcaaggaatataaaagcatttttctattaagacaaacaggc

SEQ ID NO: 714274 - DNA, 619 bp, Homo sapiens
aatgttctcaaaacacaaaagtaaagacctggatacaatgaattattttattattcagaaattgacttatttaggaaacttttttctttcatagctgaaacccaccattgcaaagaagagctaatatgaaaaggtttgagagtttttcatgaagagctcagatccagaggtctgtaagtctttgagttaggttatttacatgtgaagacaagataattatttacatgggtcaaaataaagagcaacagttgtcgttactgaaatcagaaacactttgggtccatgatattatagaagtaacttggcttctcagcatgaagaaatacctaccgaaattcctatatgtaattcctatgcctgaaaatgtagcatggaaccacttctttggcaacatgctgaatatctcccygtgtggaatgccccaacacttatgtgtatgaatttctgttctcaatatataacaccaacaaagagagagaggctgcctggacccagaacttattataatgtagcattagcactctttttatcaacccaatttttaaaatatccaaaaatcatatcttttttcctcaatagcaaggaatataaaagcatttttctattaagacaaacaggc

SEQ ID NO: 714275 - DNA, 577 bp, Homo sapiens
ttaaatgacttaagagcaaatgacctaatgcttcacacagagtatgcatcatacaagtatttgcctttatgtaagaaaagctctagtttggctatttaatagctctaccaactttggcaaataatgcaccttcagttttcttagctgtaaaatgagagcatgaccatttcatgttcactaggatggctatactcaaaaaagacagataatagtgtgttgggaaagataaattggtaacctcatacattcctagtgggtaggtaaaatggtgtagtcactttggaaaactatctcggagctcctcaaaagactaaatgtagtgttaccacaagacctagcaattgcagtcctaggtatatgmccaagagaaatgaaaacatacatttgtatataaacttatacatgaatgttcatagctacattattcataatagccaaaaatgcagaaacaacccaaatgcctatcaactgatgtagagagaaataaaacattggtatacccacagagtggattattattcagccataagtgctgatatatactgtaacatagataaacctacaaaatattctaagt

SEQ ID NO: 714276 - DNA, 577 bp, Homo sapiens
ttaaatgacttaagagcaaatgacctaatgcttcacacagagtatgcatcatacaagtatttgcctttatgtaagaaaagctctagtttggctatttaatagctctaccaactttggcaaataatgcaccttcagttttcttagctgtaaaatgagagcatgaccatttcatgttcactaggatggctatactcaaaaaagacagataatagtgtgttgggaaagataaattggtaacctcatacattcctagtgggtaggtaaaatggtgtagtcactttggaaaactatctcggagctcctcaaaagactaaatgtagtgttaccacaagacctagcaattgcagtcctaggtatatgcccaagagaaatgaaaacatacatttgtatataaacttatacatgaatgttcatagctacattattcataatagccaaaaatgcagaaacaacccaaatgcctatcaactgatgtagagagaaataaaacattggtatayccacagagtggattattattcagccataagtgctgatatatactgtaacatagataaacctacaaaatattctaagt

SEQ ID NO: 714277 - DNA, 577 bp, Homo sapiens
ttaaatgacttaagagcaaatgacctaatgcttcacacagagtatgcatcatacaagtatttgcctttatgtaagaaaagctctagtttggctatttaatagctctaccaactttggcaaataatgcaccttcagttttcttagctgtaaaatgagagcatgaccatttcatgttcactaggatggctatactcaaaaaagacagataatagtgtgttgggaaagataaattggtaacctcatacattcctagtgggtaggtaaaatggtgtagtcactttggaaaactatctcggagctcctcaaaagactaaatgtagtgttaccacaagacctagcaattgcagtcctaggtatatgcccaagagaaatgaaaacatacatttgtatataaacttatacatgaatgttcatagctacattattcataatagccaaaaatgcagaaacaacccaaatgcctatcaactgatgtagagagaaataaaacattggtatacccayagagtggattattattcagccataagtgctgatatatactgtaacatagataaacctacaaaatattctaagt

SEQ ID NO: 714278 - DNA, 599 bp, Homo sapiens
aggattctggatcattaggaataagtgccatgcttgatattactgtgctggcaattgtggtttgttattggtcatctaccatgggcaaagatgtgttcactatgcctgctgtagcctcaacttacaggtccttcacctggcatgcttccttatggagggcaccaccagggagatgctgcctagatttttagatgttttcttggtcaaccccaatacaaagagtaaaacgtaccttgccccgcatgtcggcctccctcattttkttatagtttctggtctaagagactaatttctaatttatttattatttttaatttttatgtttttatttatttgtgagagactcatttcttttccaagtaatgactcagattacctcccttctcaggtgggaccccttccctgtacctaagggtgtgactttgcatttgaagcccatcagagtaaccatgcctactgcattcatgtaacaggaattactttatatactagaacataaaggcctgcaatggagtactggcccctcatttatttagatgtgccagatgtcccactcttttatgtatgtatattgcctcatttaatcctcactggcaacc

SEQ ID NO: 714279 - DNA, 598 bp, Homo sapiens
tcagttcaaaaacgtagttctaggtcaggtatggtagcttgcacctgtaatcccagcactttgggaggctgagacaggtggattgcttgagcccaggagttcgagaccagcctgggcaacagagcaagaccgagtctctaataaaagaaaaaacaacaacaacaaactagctgggtgtggtggtgcgtgcctcctggctgaggcaggaggattgcttgagcccaggggttcgaggctgtagtgagctatgatcaagccactgtcctccagtctggcaacagagtgaaacactgtctcaaaagtagttctagttgactgcagaaatgcagacaggagattaataatttagtagatgatagctgttgaccatttcatccattatcctgcaaacatgcattcagtttcaaygttcatgaacagacctgacctcagggacccatgtgcccaagagccaccctccacccaaggttatcctgcagatgagcagcagccatttgcagtgctccttccctgaggttaattaagcttatatttgtctgagagttgtaataagtacaagtcatcttcctaattcccattgccatcagtgactgctgag

SEQ ID NO: 714280 - DNA, 1760 bp, Homo sapiens
tgacatagtttttttaaatttttcattcattcactcattttaagtttttattgtgtaaactttcatcaaacatgtacaaaaatagactgccacaaggaatgcccatatatatccatccactgatttcaaattattgccaactcatggcccattttgtttcatctacacccctacccacttacacctcctaaaatattttcaagcaaattccgagtcatttcaactataagaatctcggtgtatatttctgaaagataaagactcctaaaaaattaaatcagtactattattgtaccttgcccttctctgccaaaaaaacttaatttctttcttttcagtttatttagtaagctaaaatttagtaacagggaggccgaggctggtggatcaactgaggtcaggagttcgacaccagcttggccaacatggtgaaactcmgtctctattaaaaatatataaattagctgggtgttgtggtgggcgcctgtaatcccagctactcaggaggctgagacaggagaatcgcttgaatccgggaggaggaggttgcagtgagccgagatcatgccaccgcactccagtctgggcaacagagtgaaactctgttagaaaaaaacaaaacaaaacaaaacatatattcactctcacctcccacctcactccatgggattcaaccaagctactttaacttttttttttttttttgagacagggtctttgtctgtggcccaggcaggagtgcagtggcacgatcttggctcactgcaacctcctcttcctgggttcaagtgattctcatgcttcagccttcccagtagctgggataacaggcatgtgccaccatacccagctaatttttgtatttttaggagagacggggtttcaccatattggccaggatggtctccatctcctgacctcgtgatccgcccaccttggcctcgcaaagtgctgggattacaggcgtgagccaccacacccagccagaatagattattttcctaccaaatcctgtcttctggatttgaaataagaaaatatttggttaagaggtgtaaataactgataatagcattagggctgacttaattaattaaatacgcccagaaagcccaagtgggaggatttagttgaggaggaggaggagttttccaacagtccctccacctgggcaccaggtgtaagcctgacctgtgccgtgtacacagtgctcattcgtgccctgagacaggaagctacagagatccagaccaacagctcacagtaagcttgggccaggtctggcgggaagaacagagtaggcaacaagagctggacactgtttaatgattagactgttttcctctttgattttggaagtgttctacaaaggtgatctgttaaaggttggccctgtggttattgaaacccaaagcagagtgggcccagcctggcctaggcttgagaggaaacaattgtaaatcaaagacccactgtgtcctcaaaagcaaaaatagctgaagggttgatgacaatccttggcttggtgaatctttcattaagaatgctctgagtaattcttgcttagccagcagctctgtttgaactctgccaggtgccctggctgctcacaaaccatgtcatgtgacataagattaggaagcttttgacacaggcagtctgtattgcttgtccaggaagggctgtagtggaaaggtatgaagtcccaaagacttgtccagaccaggtctggaactaggggccagtgatggaagtagggg

SEQ ID NO: 714281 - DNA, 645 bp, Homo sapiens
aggggctggacctttaagatgagctctcctgacaatgttgttgtttttaacctaatttgagtcaatccaatttgagaatacgatgaaagctaaaagacttatcccagaaaatatacatgtcctcaaaattttgcacataagtttaaggcctcccaaactccctaaaacccactcagaaaatctagattaagaatctctaaaacagccaggtgtggtagctcatgcctgtaatcccagcactttgggaggctgaagtgggtggatcacttgaggccaggagtttgagatctgcctggccaacatagtgaaacctcgtctctactaaaaatagaacaattaggctgggcgcggtggctcacgcctgtaatcccaacacgttgggaggccgaggcaggtggatcacctgaggtcaggagttcgagaccagcctggccaatatgaggaaacacagtctctactaaaaatacaaaaaattaactgggggtggtggcaggtgcctgtaatctcaggtacccaggaggctgaggcaggagaattgcttgaaccctggaggcggagattgcagtgagcagagatcgtaccactgcactccagcctgggcaacaagagcaaaactccatctcaaaaamtaataataataataaa

SEQ ID NO: 714282 - DNA, 1677 bp, Homo sapiens
ttgtcttaggctcagttctcatccttcctgtattgagcttgaacgtataccctgtctggccttgctttccttgctctgtctttagtctggttctgtgccagctccacctttgcccatatagggactggcaggtatccctgaaacctaaaactctgccctgaattaaactcatcagaggagacttaaacatcacaagctgaggctctttgctctgtctgtccctgtctttctggaggatagagaagctgccatttttctggctgtggcttacctgcttggctagtgccctgggatcttgaggctcagtaatcaaagcgtgtagccctataacctgcccacttgccaactctttttgctgctcaggagttcctgtgaattcagcagagcccggggaagtcaggtactacagctacctgtgcaaataggtgactccaacaggttctggttacagtaatagacttactggtttggaatttgatcctctttgcaagcaaatgaaggaatcctgccagccatcacccttcctggaattctcaggttgaactgattggacctcgcctccaaatgttggttaaatgatccactttctattcttcaagtatattaagcacacacatacacacacacaccctcttttttaggaaggtaggtaggtttgatccttagcacagctttgctaagcaggctaagtactgtatttcggactatagtgcctgctgtggggaagcagttgaagtcactaatacagattcctgccccaagtttaactgactgctttctgtaacctgtttcctaggaatgagatcagcttgatgtggagraggttcaggggcctcagagataaaatttggcttctggttttgcaggaatctacctatcctagcaccagttggctagggtgggacagggtcagggtttgcgatctggcaggtaggtttccctggagaataaagaatgtgcctccatcacctaccaatgatgtgttctgggaagaagctggctggtagcccttctgtaccttgtcagattctaacagggctccccactccctggggtaaactcagttctccaactctggccaagcattgccctggttggggccctgcagtggagcagacattgagattactggcaaatcaaactttgggtgatcttgccctagggaaccagcctgtgcttaacccctgctgagaagtgggataatgcagccaaacatgatcctcagcccacgtgggttgtgctcaagtgctgaaggcaaatcctgggcagagaggctagagagccaaggggcctgtgagtgaagaggagataggcccctgtggatgctcagccatggaggtagccattggacaactcaccagcgctgcttcctgggcagctgcctgggtttcccttgccatgctgattcttttttgagtgcatcttctaggaccttctgtcttggaaggagagccccttactgctctctttcatgtattgactcaaagtttctgctggaaggagcttcagagatcatctggtcctacctctgcatttttcagatgaagggacaggtccagggagggaatgaccctggaccagggtcactccaggtcaggagcacaccatggtcagggcccagggcttctgcttcacaggctaggtatctgtcttctgctcacactgccttggagggta

SEQ ID NO: 714283 - DNA, 1476 bp, Homo sapiens
cactggtgtgttttgtttagcttagaatttaaaaaaagagcttgttgccaacaagaaggaagtttttttttgtttgttttgttttaaacttcagattcctgggtttttcttgaaaagccactggtcctacaggcagcaatggggtccctgtgtttcttgcattctgtagaggggctggcattcctgggctcactgaggccccacccagctgcttcccttattcgctcacattatctgcctggcccctgaatctgttgagcttgcaatcccttttctaagaagatattaatagttttcctttctttcatgcataatttcagttgtctttaaaatcaattaaatttacagagattaatctatggcaatgaaaaaacagagtctagtgcctgtcaattttatattccaagtaaaggtgaccctaagaagaactggtagaatatctgctcacttgcttttcaatgtgaatttagaattttatttttcttatggacttaatctctttgctcttcattttcttcatctgtaatataaggttactgaagtaacagacaactgcctcaggaataatttttgtggattaaataaggtcatgctgggaagcacttatgtcagtgcctggcagatagaatgctctcagtaaacatttattaaaaagagggagtataatgaaggaatgatctaaaattcatattgtctaaaatatgctcagtagaatacatcaagctagaaatctcaaaatatttactgtggcaataaattgacaaacatttcaataatttagctgctattgtgtttggtggttttcataaagggtacgccattgtcctgttcactttccagctctcctgcactaacccggtggttaccatagccctagaaggagttctgttaggctggggatgatcacttgatgaggctggtgtcctctaaaaagtggtactagtttccccacttgcttatctaggatatctcttgaggaaattgtcttcaaaaagagaagcaagactaaaacctaaacaaatgaacaaaccaaatagttaattccttttggaataaatggaacagcaaaagtctctcaggtgttaacttggagtcagccaaactcaaggttaagggcacagtcttccaagactgtcaagtctgcccaagacttctgacaccacttacaagtttgggagttcccagggccatcctcacatgagacaaggtaacaacaaatttaggggttcccatggactccctcaggtttgataaactgccagaatgactcacagagtgcaggaaagcaccatacttacaattacagttttattatagcaaaaggacacaaattagagccagccacaggaagagacacatgggacggaatttgagactcagagkgtctcaaaggtaaagcttcggtgtcctcagggatgtgttaccctcccgttgttgaagtgtgataatatgcagcattgctagcctatggaggtc

SEQ ID NO: 714284 - DNA, 1476 bp, Homo sapiens
cactggtgtgttttgtttagcttagaatttaaaaaaagagcttgttgccaacaagaaggaagtttttttttgtttgttttgttttaaacttcagattcctgggtttttcttgaaaagccactggtcctacaggcagcaatggggtccctgtgtttcttgcattctgtagaggggctggcattcctgggctcactgaggccccacccagctgcttcccttattcgctcacattatctgcctggcccctgaatctgttgagcttgcaatcccttttctaagaagatattaatagttttcctttctttcatgcataatttcagttgtctttaaaatcaattaaatttacagagattaatctatggcaatgaaaaaacagagtctagtgcctgtcaattttatattccaagtaaaggtgaccctaagaagaactggtagaatatctgctcacttgcttttcaatgtgaatttagaattttatttttcttatggacttaatctctttgctcttcattttcttcatctgtaatataaggttactgaagtaacagacaactgcctcaggaataatttttgtggattaaataaggtcatgctgggaagcacttatgtcagtgcctggcagatagaatgctctcagtaaacatttattaaaaagagggagtataatgaaggaatgatctaaaattcatattgtctaaaatatgctcagtagaatacatcaagctagaaatctcaaaatatttactgtggcaataaattgacaaacatttcaataatttagctgctattgtgtttggtggttttcataaagggtacgccattgtcctgttcactttccagctctcctgcactaacccggtggttaccatagccctagaaggagttctgttaggctggggatgatcacttgatgaggctggtgtcctctaaaaagtggtactagtttccccacttgcttatctaggatatctcttgaggaaattgtcttcaaaaagagaagcaagactaaaacctaaacaaatgaacaaaccaaatagttaattccttttggaataaatggaacagcaaaagtctctcaggtgttaacttggagtcagccaaactcaaggttaagggcacagtcttccaagactgtcaagtctgcccaagacttctgacaccacttacaagtttgggagttcccagggccatcctcacatgagacaaggtaacaacaaatttaggggttcccatggactccctcaggtttgataaactgccagaatgactcacagagtgcaggaaagcaccatacttacaattacagttttattatagcaaaaggacacaaattagagccagccacaggaagagacacatgggacggaatttgagactcagagggtctcaaaggtaaagcttcggtgtcctcagggatgtgttaccctcccgttgttgaagtgtgataatatgcagcattgcyagcctatggaggtc

SEQ ID NO: 714285 - DNA, 579 bp, Homo sapiens
aactgggaataatatttaccatagtgctccaaaagtctagtattcttttatttgctctttcacttattttaaaactattccttgaatatccactgcatgctaggcactaggtttggagtggtgatccttgctcttgagcttcctgtgtggtggaagaggctaacattaaacacagaacaattaaatgatgacaaatagtgagtgctccaaggaaaagaaaaatgtgctattgtggtttagattaagggacccacaaaagcttctttgaggaagtggcacttggggtgtacatacaagttatgtgactgctggggatartaactttccaggtggagctgcagcatgttccagaggccagggtgtggacaagagatgagatgctggaactcatgaaagcccatgtgatgatgtggtgccctcctagttggattttagaggaagccacaggaagctctaggaaatcaagaatgaggggttctagtgcatttgtgagttgcctaacaaggaattccgcctctctactcttggctggtttgctcaccctggtggagcccaaggctcctttgcacgtggaagcac

SEQ ID NO: 714286 - DNA, 636 bp, Homo sapiens
ctggccctttgccagacagcaagcctgaattgggcatctcctttggggtcaaggggaagatgagagcctggtatagaacaaggcaccgggccccactttatgaaggatgtttatcagcccacagtgggtctgtttagcagctcartgttggacacacatctgactcttccaagtttgggccaacttgagcaccagcttggactttgcttgggccattttggcttggctagatccaagtgtcaggcattgttctccctctgccctcagcagagtctgtgaagtcaggacatcatcattctctgacaaacattcagtacatttccctgggtcccaggaggcctgatattgaaatgttttcctctccatagttatattttccttggttgaaagagttttgttttggaagttgctaccctgtcgaggtaatgagtcagtttgggaggccggtgcagaggggaaaatgcacatcattggcagaggccagaaggatgggggtgagggaagatgggagattcccagtgggggagaaagaccacaccctcttcccccttccacccttttaggaagaacatagcccctccttaccagctgagggcttcctcacggggaccaggagccaggcccaactgctgcctt

SEQ ID NO: 714287 - DNA, 1424 bp, Homo sapiens
  misc_feature 605, 608, 633, 685: n = A,T,C or G
aaacacctgaaaagtatacaaggattccttagcacgaaaccagcaaacagcctcaatctatcagcaatcatctttagacccattaccaaaaccagacagctccccaaaagaaagtaatcctggtcagccaggtgatttaagaactttcaaatgcggaaaatgcttgaacagcattttgtgtgtgactgttttgaaatacactcttactcttaagcctctggttccttccactcaacctggccatcccctctgtggtccctggatgcctctggaatgtgccttcctgggtctctggaagacccctccaacataaggtcttggtgacctttttctaattttatgtttttgtttgtctgtttgcttgctggctggcttgtttaaaaagaatagcaccttcctctggagtgttttgctagcattaagtaaatttaaaacacatgggaaaggccgtatggtttacaatgtaatcttgctcttcattctcactacgtataaggtgggcagtgtcattgtgcccttttttttaatgaagataccaactctaagagaatatagccagtaggaataaaaaaaaacagaaaatttcagatgcaggtttctgactntanatcctataccatgcctcaatattanacgcggtttattttatttacatgggagtgatatttagatatggttagtcgtngcattcagctgagtcatttaaaacacacacaaacacacacatatacacacactcaccaacacatatagaccaatctcaaaactgcatccaaataaactaacccacctcactccccgacccaaacagtgaacagatgcattttcctggattttacttcagacaaatagtcactttgaaaagtaaaacgctgcatatacaccatgkaatactatgcagccataaaaaatgatgagttcgtgtcctttgtagggacatggatgaagctggaaaccatcattctcagcaaactatcacaaggacaaaaaaccaaacatcgcatgttctcactcataggtgggaattgaacaatgagaacacttggacataggaaggggaacatcacacactggggcctgttgtggggtggtggagaagggagggatagcattaggagagatacctaatgtaaatgacgagttaatgggtgcagcacaccaatatagcacatgtatacatatgtaacaaacctgcgcgttgtgcacatgtaccctagaacttaaagtataataataataataataatagaaaaagaaaatgctgcataacaaaataaaataatgacttagcaaattaaaagaggagggagagggcgggcgcggtagcttatgcctgtaatcccagcactttgggaggccaaggcaggcggatcacgaggtcaggagatcaagaccatcctggctaacatggtgaaactctgtct

SEQ ID NO: 714288 - DNA, 1879 bp, Homo sapiens
tattccaaccagccaccattgatttcctaaccttcaatcttctctctggttaagaaagtaaggtcaccttcatagcaatgcaaagcaaccctggcatgattttcctctggatcttatttggggcctgaytggcttgctcccaccatggaggagccattgctttgtttttgcaatggcacctccaccatgatttagagacctaccaagttgaaattggatttaagaccttattggccctggattgcaccaagagcacagtaatctcttcaaagcccaagctgcagcagtcagcattccccctgctgctattgataatttgtaccatattgactgggttacttatcatttgcaaacaggatcccatggtgactggatgtcaaatacatggaaataactcttcatcaacctggagtctggggcccaccctccacccaccctttggccaccagaatgccgggcagcccaggctgtccttaccacccacatacccagctcattgccttgctaaaggtaaagacctcagcctcatcatgcatgcagctcctggggggagggagggatggagggaactgatggggactggggaatcccaaagagtaaacccaaggcaggtgaaacatgcccaggacctgaaggatgcaattaagcccaattcaccgggatccagagtttttctaccaaattcctgaggaaaccaaattgcataatgtgtgacttattcagaaacacacatccccgtgttgttggccaaggcagaggcaatgtggtgggggtcttaggcaaggggtgcaggtgcacagaaatgaaaacaacagactaaaacaacaagctccctggtctataaagaacagccccgtgttttgccggattcctcagtcagagcgagcatgcatatatatgtgggttcttgtgtgcatgtgcagctgggactgggggtggggagggtggggccttccagggaggaagcaagaacatgtctacacattttaagtggcaattgcaaaggaaacaatcagaggtgctctcacatacattgggcactatttactttttgccggctcctataacttctgaatctcccccttctcgtttcataaacattttgtgtatagttttaggtggcaatatttttgctcatttgggaagactgtgcctttttggagttgaatcaggctaacttgtgccttccatgtttcttcaggagtgggaaacaggagcagtgacaaatgctaaaatgtgggatggggcagaatggtttgagatgagagaatttgcagaaagccaggaggaagatgattgtttaaaaaataaaattttgtcattgtcccgccttgggtcttttccacacctttccagtggaaagcctgtttaacctgctttaaaaaaattgcagcaattggaagttatgagtaagggttgtgttgcttttctatttgacctccactcctgcaggactgaacaattcaatctctctttcccagcttacctgtggcatgtggggcctgcttgacttgaataaatggctgtttatggatgatagcatctggtatgcccctgattaggtcactgtgttatgttaagtatttctacctcctggtggagaaaccaaagctgacagttctcaagaccaccactgcccaacacagacagcacagcacccgagattggatctaccccttagaaaggccagttaagctttctgtcaacttgcagcactcctctgggactgtaggaggagagcaaaagataacagcttcaacctaataatgacaatattcatactccaatggagaacctatctgtacaggactctgaacacctcatctggtttgattctcaccaccaccctggcaaagttgctattgttgctttgatcccc

SEQ ID NO: 714289 - DNA, 783 bp, Homo sapiens
aaactagggagaataatgcctatcatgcaagtactgggtaaaaaccaatgaaaaattgcacactgaaaatagaatcttataattatcaamgtaactgaggctgcccaattataatactatgtatgtagttcaggccagctcaaccttcaagcagacaacaaatcctgctatggtcctttgcagcaaataaagatagaagagcatcaccacattctgtgacagaaccacaaaaacataaaggtcaatcctttctcctaaggtgctctggccaggcaagtcacctgaacatcaaggctataattacgcacctaattatggggtgcctggtttttgtttgtttatgtttcgatacagactctttaacaaaagatatgagtcctttcttaaaatacatggtggcaatttgacactatgtcctgccacccaagttgtgttggggggaagccatagaaagttggggtcatcacatgttttatccttgcctgcctttgatcatgctgatgtggttctcatgttctgccagcttaatccaagcactgcacgaagtaaattaattcacaggtgaaatctgttgaaattaaaatatatgtatgtatcagttagtttatcatatttccctctccaacacagatcatagttatcacgccaccaaaggtgcaaaggctgctggaagtctgaccagttaggctactcaaaatcacatgggaaggggcaccatgaagctctcaactctggccctcttacactctatccttcgtctgactatgacccttgtcaaagaaa

SEQ ID NO: 714290 - DNA, 1074 bp, Homo sapiens
tgcggtttacaagatttaaaaaatcatagaatccagcacgaactccacccttcataatcsagttcaccgcccctggatgtagcacctcttatctgggaaccacaccattatctgaagcaataaaatgagttaaatcctgatctttctttccaaaaagcacaggaagccgacttgtttacttgtggttttcaaagtagaagaaaagccgcagcagcttgatgaagacgtctatagtatagttaacctttaacgattatctgttggggattgaaactaaagattgaacaattgtggcttgatgatcttctctgtcttcagaattgagaactaccctgagtcagtgcgaacgagaaaacttttcattgcccttttaaccaaacttggcattacaacgaaaaaatgaaataaagcgaggctttttgtgtgcgtgaagagcaaaacttgcttctacaagaaaaagtaaatttagtttctttagaagacactaattatactcttaacatttaaaacaagcgcttgaaatgaaaacattcgcatttccccctcatttcaaaacttttctctggggaataattaattcctttgcagtaagagagtgcatggacatactgtgttcctctcttggtgtactgaatacaaaaactgtgagcaagtaaataatgcccgaggacaatggattggaaggagtcttccagcctttcttaaatatacctacccagtaatcactctgccactgtgcaagggacaaagagctcaaggtctagaaggtgagtgccaggaggagaggctatcggtgggtggtgaaattacggaattacagggccctcagtaagtatttgttgaatgaataaacatttgggaatataattttgtgccactaaagctaaatatatgaaaatttggaattactagatccatgaagcaggggaagattaagtcactttgcctgtgaaaggttctgatagggaaatttttagtcttcctgggagcacaagaaaataatttggtgtatgtgttttttaaggataagatctctggtctattcgtctttttagtaatcaggaaaatgcaaat

SEQ ID NO: 714291 - DNA, 1714 bp, Homo sapiens
ctgtcttatttgacttccatccactttgtgaagccattacaaatctgtccttaggaaagttttttctccctctgtggctttgcaccacacttggcaaatcagcaactcccagacaagctgcaaacattctgaaatgcacctacacagaaatacacatgcacacacagacaagcaagcatcctccagcagacacacagaaagacatgcacatcccagggcaggaccaccagcttccacacagcagtcacggtcagcagtcatggggctcaggaccccagcgggagacctgaggagtcacagtgtcagaagagaagatccaccaacaatgtcccatcttacaagcatgctggccagggtggatggaaagaacagtggtttttttgttttgttttgtttttaataaaaaagaaacaacaggcaaaccacattagtccaatgtcccaccagttcctgctgcaatgctatccacgaggtgacttgcttcatgttaatcccatctccttttggaggtaactgatctttttttttgtaagagacagggtctcatgctgtcacccaggctggagtgcactgttgcaatcatagctcactgcaacctcaaactcctgggctcaagcaatcctcccaccccagcttccctagtagctaggactataggcatgtgccaccaagctcgggtaatttttatatttttagtacagacagggtcttgctatgttgcccagactggccttgaactcctagcctcaagcaattctacctcctcagcttcccaaagtgctgagattacaggcatgagccactttgcccagtcagaggtaattaatcttgaatcttatgttttcttctcccatgtccatgttaatttcctgttctcactcacctgcctgacagtcctacccacccagtgcatacacttaaaacagtgcagcattcttctggaagagtccagaaatcaccagaaatcataaggtcctctgattaactccactgaaacactggggatatattttaaagttagtgataaagagagaaattcagactttagtaactgacaagggggaaaaaaatgcatacccaggcagaagtcagacacatagacacttatctgtgaaactccacacaaacagactatatgcacacatctatgcctcaaaataaaaaaccccagcacctcactctttgcagtaagctccaccctgtgcctgaaaataggtaaatggcatgttcaggatttcagctcccatatttaatttgttaccacgcaaaacatcagaggcatcactttgaatggtaggcatcaatatgattgaaacggctgccacttaatgtggtgaggaggaatcagctgtgcccccaaaacagaagacaaggaggagcatcatcctattggtttccygggaaatgatgagccctattaatagttgttaacatgaatcaacaaatcactcctctgtcagcagctggcgggctgggccccaaatcagtcagttaaggggaagaaagctgatcattccaggaaaagtctgagcaagggaagggggcaggccattgacccctctgaggaaggagagggagccagatggtagcaaagagaaataaatgttaaccagaactccgcgcctctctgtatggctgagggaggggccgtcaaaggcagggctcctccctactaaaaacctagaatttagtgctgcgatatcaatgctcatga

SEQ ID NO: 714292 - DNA, 1594 bp, Homo sapiens
gctcgcccttctgataggttttagaaaggtcataatttagggtattttgccattgataaatgatctgtatgtttgcgttcacacgcaccgattgatttgttatagccaaaatattgtttctataacaacccaagggcccttaactagacaaacrgcaaaccagaatccaaggggaggcaaagggaaatctaggcctgcccagaaggggctggcctttgcccagggactccaggatgatggagtggagcgtgtgggtgaggatgcaggggcaaaactgtgggagggagaggtggtggtggagcaggtggagcagcggcttcggttcttggcaggcctgcagtcgtggtctctccagcccagcgtgggtggcttccactgcagctgaagcaagtcttgtcaagactttcaagttgagctccctttggtgcagagtgggccagtggggttgttagggcaattttcccacctttccagacttggaagaggctcctgtttctgggcccagttgatgcattatgcatcagggctgcctgcaactgacagcccctcagccaacgtcgacttgaaaagcaatggtgctaatcaaagccgacacatttgaatgtccagacacacacacagagaaatttactaatcaaaaagtgtatttcctagggctgtctccagagaaatccgcgagaagaaattggaataatttattagcttacaagttttcgttgacagttagcccaaagctatttatctctgtaatagagaacgtctccaatgtggcaaaattgaccaaatcaaacagctttgatcagaaaatgaatctggcaaggctgcctgtcggagggtcccaggagaaagaggggaaacaaacaaaaagatttaacaagtggtcaataggaaaaagagagcaagagaaagagatttaggagaagaaaagaacgagagaggaggaggcagaacaacaaattttgcaaaaccatggccccagctctggactgaattcttgaagaaataaatgatgtttcacatcataacatttaacatggtgcttgtacattttctgagccctgcagcccaaactgagatgtgatttttatggtaacaagatgatgacaaactgcagagggatagggcttgctgctgctggtggtggtggtggcagtgaggaaataagcacgggaaaatccagagaaatggctctgcctctcctggacccaggatcagcgttagctcactagaagcaacaatcatgctaactgtatccagtctgcctcagtgggtatgaggtgcttgcccatctagtgctaagctggcttctgtgagaggcactgtaaccacgtgtgagtttgaagataggacctgttcagaggctcctctccttctgcgctcatgggcagtgcctgggagactgtagtgggaagatctattcagtgggagagtggatctggggtgccctgctttctaccttaacctcttctttcaaaatgtacaggtatacaagtatacacactgcagtcaagggagggcaccaaatacagctttgaagcccactgttagatggatggataagaattataaactaggaaaataccttaaatcatca

SEQ ID NO: 714293 - DNA, 1594 bp, Homo sapiens
gctcgcccttctgataggttttagaaaggtcataatttagggtattttgccattgataaatgatctgtatgtttgcgttcacacgcaccgattgatttgttatagccaaaatattgtttctataacaacccaagggcccttaactagacaaacagcaaaccagaatccaaggggaggcaaagggaaatctaggcctgcccagaaggggctggcctttgcccagggactccaggatgatggagtggagcgtgtgggtgaggatgcaggggcaaaactgtgggagggagaggtggtggtggagcaggtggagcagcggcttyggttcttggcaggcctgcagtcgtggtctctccagcccagcgtgggtggcttccactgcagctgaagcaagtcttgtcaagactttcaagttgagctccctttggtgcagagtgggccagtggggttgttagggcaattttcccacctttccagacttggaagaggctcctgtttctgggcccagttgatgcattatgcatcagggctgcctgcaactgacagcccctcagccaacgtcgacttgaaaagcaatggtgctaatcaaagccgacacatttgaatgtccagacacacacacagagaaatttactaatcaaaaagtgtatttcctagggctgtctccagagaaatccgcgagaagaaattggaataatttattagcttacaagttttcgttgacagttagcccaaagctatttatctctgtaatagagaacgtctccaatgtggcaaaattgaccaaatcaaacagctttgatcagaaaatgaatctggcaaggctgcctgtcggagggtcccaggagaaagaggggaaacaaacaaaaagatttaacaagtggtcaataggaaaaagagagcaagagaaagagatttaggagaagaaaagaacgagagaggaggaggcagaacaacaaattttgcaaaaccatggccccagctctggactgaattcttgaagaaataaatgatgtttcacatcataacatttaacatggtgcttgtacattttctgagccctgcagcccaaactgagatgtgatttttatggtaacaagatgatgacaaactgcagagggatagggcttgctgctgctggtggtggtggtggcagtgaggaaataagcacgggaaaatccagagaaatggctctgcctctcctggacccaggatcagcgttagctcactagaagcaacaatcatgctaactgtatccagtctgcctcagtgggtatgaggtgcttgcccatctagtgctaagctggcttctgtgagaggcactgtaaccacgtgtgagtttgaagataggacctgttcagaggctcctctccttctgcgctcatgggcagtgcctgggagactgtagtgggaagatctattcagtgggagagtggatctggggtgccctgctttctaccttaacctcttctttcaaaatgtacaggtatacaagtatacacactgcagtcaagggagggcaccaaatacagctttgaagcccactgttagatggatggataagaattataaactaggaaaataccttaaatcatca

SEQ ID NO: 714294 - DNA, 1456 bp, Homo sapiens
gcatttttagtagagacagggtttcaccatgttggccaggatggtcttgatctcctgacctctcaaagtgctgggattacaggcatgagccatcacgcccggccccctcttctaagtgactcgagactggaagtggattcctctggtagtataaaggaagcttagtaaaatgaaaggagttctgaacacatccaggattccatccccacctgtgccacctcaatagtccttgataagattatacataaaaggagataatttgactcatgtggattctgaaagcagacagaaggtcagaaactgctagggcactctttaccaatatatgtgcagatcccaactggtaaatttagcaggcattatataaaggctggcaatctgtatttaataatcatttcagaggattagaatgcatctgatccatggaaaatgcaggaaagccactagattaaatgcttgtcagacattagtggcatatcttgtgttaaaaacaaaaacaaaaaaggcctaaatttattatgttttaaaatgattatatacatcagaatattgagacaagataggaaatgttagtttcataggtctatagctatcagtcattgactacctaccattttttttgcctttagaagatcacaatggtaattcacaaagaactgctggcagagatagggtagagaagaaagcgacaaaaagaaaaaagtatttaagtttaaaaatgccaagtttttaagactgttatgaaaatgatatcagtaatgcaggaatcagcaaacatttgcagtaaaggcccagagagtaaaagttttcagctctgcaggccagatagtctctatggaactacttacctctgccattgtagccacagacagtaagtaaataaatgagcatggctccgccattgaaaatttactcacagaaggaaatacaacctggattaggctcacagtctgtagtttgccaagtgttgatataatggggaaaaaagtattgtgataaattatcaacttcaaagtttcagttgctttatcaaaaagtattttttacatatgcaattgtaatgagaacaaactaaaattagtattaaagaggaaaaaattcacacaaaatgtggtaaggagaatttgctttaagactttatccatgcaaacctattttaatcaggtaaatgagacccagctraccaggatggaaatctttagttaaatgaaaattttctgaaatctctggaaaaaagaataaaattgacagctccacatacttcatagaaaatcagtatgccctacaaaaaccttcagaacaaaacgcgaagggttttcagcatctgtaaaatgagctgagatgctttatcattaatatagttcagaaaaaactaggtaatctttcttacttcctttttaaaaatctgtgcccatcaagacaaattaaatgcttaaaaagttacaagtaatatttc

SEQ ID NO: 714295 - DNA, 644 bp, Homo sapiens
tacttctagggatttcacctaaggaaattatgtccaaaaaatacatagcagccaaaggcccatccacaagtcttttatatgcagtgttgtttataagagcaaaatatttgaaaacaaatacgttcactagtaacaattttgtgcagaaaaatatttattgtcgtggaaaagtgttcatgggatactactaaatggaaatagtatttttaaaattttgtcctttatgatccaatgttaaactataatgtctggagatgccacaaatttaataactggcttktggaagggattataagtgatttcaaaaatatattttctgtatttgttcatggtttttaactttttatatgtctaatatgctctagtgtactaaaagaatagaagatgtactaaaacttttaaatgtatataatcgtagaagaatcaatgaaaaccacaaagcagtgtctgcttatgacatagctttatatgtagaaaatacaaaaattttacagattaaactataggaaataagaaaattgaacatggttgctgaacacaaaattgatataaaatatcagttgtagttttatattggctatatataactagaaaatgaaactttaaacatttaatttttataatgctatctaaaagtcccaaat

SEQ ID NO: 714296 - DNA, 599 bp, Homo sapiens
caagatgcaggcagcarggtattactactttatctgggtaggagataaacatggatacatactgtaaacatggattatgtttacttcataaaaatttctcactctatatgtatgatttgtgtacttttccccatgtacattaaacttcaatcatatatttaaattttaaaaaatattacactaaaaatctaagactaaaaatcagatacatgggaatgaacaaagtaactaccataatacaaacaaggaaatcaacatgtttgtttattgttggtttgttttgttgctgtggtattagtggtggcaggtgtttaagatccattgtagctcaggaatatatactgtcatcctcattttaaacaaaaagaaaatatgttctatattcagcagcccaactctatttctaattttatgtaaatgttgtcagaaaattcaccttgatcaactaagatatgttcaatgtcagtatctttaaacagagggcaagctttgttcagaagataataggatatttgtaacatatttgatatgttttgattacattatggacacaaaatattagcgctgtgattcctaaatctgttgacattttgtataca

SEQ ID NO: 714297 - DNA, 1639 bp, Homo sapiens
tttattaacagcaagaagctatccctcaaaataaggatgctcttcacaggacaaatatatttgctttctaaaataaatatatttaaatggacaacttacaaatgccttacttaaaacatgaaataacatgccagcctatgatgctcaatgtaatatcctttgagaagcttccacaagatattcaaaatatattctgattaatttttctagtatcttacatattgacgagtttggtccttaagtttgttagtactggcttaatatccttagcctgtttaaagataaagaaaaggttacttaacctgtttcctcatttctaaaaattttgaataaaaatacataagacatgtaggtaagaccctgatgcatctaattttttgaaaaccttcaataagtaagttatttatcattaattctacttaccacttgtttaaaattataaatatttatcacagtagcatttcttctttttccatataactatcatccaataaactgatggctctcttactaaggtaagagaatcatattctcacattattaagatcatcaattatcatgatggccttgtacaattcagaaacagcaaacaatgggcaagtatttgatacagtcatttagtcatttattcttcaaatctctgagtgcctattatacgccaggcttagtctaggcactgatattacaaagatgaagatgacagaatcctatacccaatgaatttaagggatttagagagctccaaagataaagaacaatgcagtgggaataaagctgagatggaaccagaaaaagagggcaatcagaagagagagagtgtgtttaaaatttccagggtgatgcagttctggccaaaatgcagctagtcctgcaactggtagctacagcagagtgaaggtgaattaggccaggaattggacagtttgagggttgaatggggtcattcacatggattttgaaacctcctggaattgtaacagcagtatgcatgaagagaaggactacaataaaccttatctcaatatattcaataaagcttcccaaatgatttttttaatgtcagttattttaactttgcattaatgctaaagcaggattaacatctctttgatgatttcaacaaatggttttaatcyggaaaatctattatgaaaacctactacagtataaatatgaccactcatactttcatttggtttaaaagcttaacaatatatatttcaataaggaaaactctttatctttagtattgaacttcttttgatgaaacctaatatgtaacaagtatccttttgtaaaataaacctttaaaatgtagaccactccattgagacaaaaaagaaaaaataatccattctttcattcctttacgataaaacacaatgaaagttctgtaaacacaatggaaaatcatgattgctatgagattcatacagaagtaaccagaacatagcagaactttttctttgattatttttcaaaagaaaaagaaacattagaaatgttggaaattcaaactatacttttatgacctagagttatgtgataaaagaccagtttcatcaacaagcaaaataaacttgacattgaaacaacagtagtaacaaattttttaaacaaatctacattaagtttctta

SEQ ID NO: 714298 - DNA, 1275 bp, Homo sapiens
ttatgtgtatttattaccctggaggtaagtgtacttttttatcttttaaatgaaattgaagtttgaagagagaggcagttgtataaaagtcaaggatctggtctggatttttttcctacagagtcgaaagtacaactgacatgttcttactgtgtgtgtgtttggcttactagaacggctagcagcagccaaagaactgtggtttctgacaggacctcgaataccctttaccacgccttccctcactgccccgcaggtatccaaggacgtgcttgtccagtagcactggggccaggataccctcgggcaaamatggtaggcaatgcagcgttcaccgtgaccgtcggagagcttaaatgttgcggccatcatcttttactagcctgttcaggatgcgtaatgaggaagcagtatgacgagtctggatttcctctgggttaagagtatctagcctctgcttcttcctggcaaatccttacaaggctagaccagaattgggatatggtcagatgagagcaggcctagagtggctggtagaggctgactgctttaggcttttgggagaaacactcttctcttgataatactctttaggatctaattggccaagatagtcaatattgtaagagagagagagagagagagagacttgatgtcacctaggctggagtgcaatggcacgatctcggctcactgcaacctccgcctcccaggttcgagcgattctcctgcctcagcctcctgagtagctggaggtacccaccatcatgcccagctaatttttgtacttttagtagagatggggtttcaccatgttggccaggcaggcctcgaactcctgacctcaggtggtccgcctgcctcggcctcccaaagtgctgggactacaggtgtgagccaccacgcccggcctgtaaaaacaatattcttggttagtatatagtccagtccagggctagcggttctacataatttagtaccaaaccctagtggtcaaagagtgtttttttttgcatggagcgtttgcctcttgagtgcttcccttgaaactgtggtggggctagccagtgactctgatgtcgtggctccaaaccaaatattttcgcatgtcttctcatctgagagatgagttatctctttagtttagctttttttttttttttttttttctttttgtttctttcagctgacaacttacagacatttgggtaattcagcagtttaatataataaacattttataccctacatattttttcctgcttttggagaatg

SEQ ID NO: 714299 - DNA, 1275 bp, Homo sapiens
ttatgtgtatttattaccctggaggtaagtgtacttttttatcttttaaatgaaattgaagtttgaagagagaggcagttgtataaaagtcaaggatctggtctggatttttttcctacagagtcgaaagtacaactgacatgttcttactgtgtgtgtgtttggcttactagaacggctagcagcagccaaagaactgtggtttctgacaggacctcgaataccctttaccacgccttccctcactgccccgcaggtatccaaggacgtgcttgtccagtagcactggggccaggataccctcgggcaaaaatggtaggcaatgcagcgttcaccgtgaccgtcggagagcttaaatgttgcggccatcatcttttactagcctgttcaggatgcgtaatgaggaagcagtatgacgagtctggatttcctctgggttaagagtatctagcctctgcttcttcctggcaaatccttacaaggctagaccagaattgggatatggtcagatgagagcaggcctagagtggctggtagaggctgactgctttaggcttttgggagaaacactcttctcttgataatactctttaggatctaattggccaagatagtcaatattgtaagagagagagagagagagagagacttgatgtcacctaggctggagtgcaatggcacgatctcggctcactgcaacctccgcctcccaggttcgagcgattctcctgcctcagcctcctgagtagctggaggtacccaccatcatgcccagctaatttttgtacttttagtagagatggggtttcaccatgttggccaggcaggcctcgaactcctgacctcaggtggtccgcctgcctcggcctcccaaagtgctggkactacaggtgtgagccaccacgcccggcctgtaaaaacaatattcttggttagtatatagtccagtccagggctagcggttctacataatttagtaccaaaccctagtggtcaaagagtgtttttttttgcatggagcgtttgcctcttgagtgcttcccttgaaactgtggtggggctagccagtgactctgatgtcgtggctccaaaccaaatattttcgcatgtcttctcatctgagagatgagttatctctttagtttagctttttttttttttttttttttctttttgtttctttcagctgacaacttacagacatttgggtaattcagcagtttaatataataaacattttataccctacatattttttcctgcttttggagaatg

SEQ ID NO: 714300 - DNA, 633 bp, Homo sapiens
gggctaacttgcctggctcgaaacccaaatcttaagtaggactagggaaatagaaccagagagggatggagacctcttttgggtgtcagaagcgctaagttttacttttagctcctctgatgacttgctatctaaacttgggaaaaaccactgccatttacagggtctcaatattttcatctgtaaaataccctcccctttactctgccacagaaaccttgtcatgatttgtgcctagctggatttagatgtttaagagatacggatcacaaggttccttcagtcttcggactaagcaatgctcccaggggcctagaaggccctatccacagtgttcaacatcctcttccctatatcccatcccctatccttgaaagaaaaaaagaatacataagagatttgtctcatcagagttttcttaagtacctacataccatcttattttcatctcttaatggatgggataaccttcacrcaagcagctctgggaacagcccagagggttactctgccctaagtccccaggatgtgggccagcaccaaggagggatgaagcatttcatcaaggattccgggggcaacagtgtggagcactggctactcacttggagagactctttttgagtttgagtc

SEQ ID NO: 714301 - DNA, 1174 bp, Homo sapiens
tgcatgtgtggccgaggactgccttggagttgaagagttgctgcggagactgcccggcttgcaaagctgaaaatgtttacattctggccctttccagaaaaagtttgctgatcgctgtttagatggtgtggacagggaagacctcttggggaaggtgaagaagcgagccaaacggtttctggcgggagacggctcaaggcacagggaactgcaagtgtcaaggccctaaagcagaatgcgctgggtgccgtggaggaaggcaagaaggcctgttgggagtgagagaaggaagttgtgagggttgtgtgcttcctctgatgaggatgaaggccgctggggttttctgagccaaagaggttgctgtgttgacactcgatgtgttccgacactgcgggggacggggggctaggggaagcatggggagctgttgggaggctactggagtcatcgcatgatgatatttggggaaggtaagaagtggctgattctggataaatttagaaggcaagagtgccgtgatttgctgatgagacaagaatgcaggtatctatgtttttaatgctttggagagtttgttgaatgaatgaatgaggtgactttccagagatcagggagccggtcagtgtcccagcagggcccagcagccagccccctggctcctgtgaccctccccgccgcatggctctccttttagkgtcctccttggcactagttgtgcgctgacctatggacactgggagtcccagatcctttggtcacacgtgagtccaaacttcttgtctcctgtagtccaggccaagatttcttcttgagcagccattgccacagattctttgggttagctggcggaggcagcaggcactgcgttttcttacctactctgaattcaccagactctgacctcattatgcttctccaggccatgagaccaggcttgcagggagaaaagttggagctgagtcccagaagagctgtcggggaggctttcaccacctttaatcatctgataccaacaacagcctcctaataggtcatcactgcattgcagtgtttacactaattagttaatatccacagaatgctttgaaggtgccaggcctgccaggagcacacaggagagcaattcacaacagaaggagagacggcccgaaatcttggaggcatcgcccttccg

SEQ ID NO: 714302 - DNA, 2204 bp, Homo sapiens
tcaggcctgagggcatctcgggtttttcatgtttattatttttattatactaggcgtttactacgaagactaccaaacaccaagctggcacctaggaaagaaggggtgtctcctctacccaggggacaacctggcccagagcacaaaagaacaatttgcacaaagatactatttattctccaaagtcctggaagaaggccctgattgattcatctcaagaagaataataaagtcctaacaacagtgctgtctctgcctcctgtctgcagtgcttaccatttataaagttcttttgtaaatacaatccaatctgagcctcaccacaatcctgggaaacatgggcggtggcagcttgcattctccccattgcatggatgaagccagtgagataccagctggacaaggttagcatctgtccagctaacagaccaggtattccaactcagtccagtcatctttatgccacaaggcagttacaaaaatcaggccaggtcattcagatgaccacgatgaagaagaagttctaggatggaactggaaggagccttgtgttcctatgaagatgggaatttgaattctatgtctaatcacccaggtccagcatgggatgggaattcccatgcaggcatataagatgtgttcatccaacttcagaaccacatacaatagctgcctcctattgaaatgtctatttttaacattctatctcaaaagaaatctcttccacagggcagtgagcctagaccccaggagttaaaaataataatgagaactcagggacatccccattaattgtgcttggcctgggtagtgctacacatctagagcaaacgacacacatgtccaatatcccagcagccttccacctttaatgagccacacacccagaggatgaaggaacaagaggatatcaaatactcagaggactcagtaaagtggctcacatggaaaatgacctcaaaactgtgtgaaaacgtatcttcatgcaggggtttttttccctacacctttcatacccacatcgttcttatctttgtacataaagggccacacagaatatctgctcaccaaagcaaatgctttgcgggtttaaacgtttttataatagatcactccaaggtcagctgtatagagtaagcattaagcagataagagaagcacactctttcctagaaaataagcacctgccaagccacctaataatgctaatgttgcctaggaagttgggttagataggtgggggagaaggataagttttaggaggggagggtaaactacagcatttttacaagaagaataggctaagaaggttctctctctgtcataaagccattgcctctgaccacatcaaagtgaccattctacctgggcatggtggctcaagtctggagtcccagctgctccagaaggctgaggcaggaggattgcttaagctcaggagttcaagaccagccygggcaacatagtgagatccactctctcaaaacaaacaaacaaaaaagtggccattctgattgtaaaaccagagcgccacacagctgcaggcaccaggactgccattagcccctgagttacagtaactgtctgaaggttaaggaggcataaaggaataaaaatgcatcttgcctttttgctctgtgaatgcatgctcccaaatggattctcggcagcaagtggaaagccatgggtacagatgccttccagcttaaatgataccattcaggtcaccctggccaggggagggagagggcagtgggcccttcccgggacatccatgggtctcactgaacaggaaattgcttccagtttcccccaagcaagtccctccttcaatgaagccctcaggagtactccctggcatctcctccaactcttttgcacctgctgaggcccacaattaagaaaacaagcgaaacctgccacacctgttgacatccaggaccttcccaatttcagcttcctcagcttggcctttggtttatgcagttgtattttctcaggccaccaacaatgtccagacagatctttctctacctgctctaaaaatacaccacccagccctcaccctgggcggacatatgaaacaaaaaagcagcacaaaggtggcagttagctcttctagctttccacagatgaaagtcctgcttggagggctcgtggtctctgctctgcatagaaaataaattgaaaccatctctaaacac

SEQ ID NO: 714303 - DNA, 1584 bp, Homo sapiens
tgaggacattcatctgaaaagcaccccagtagaacaagcatgtgaaatagaaacatctcaatactttagaaaggcataaagtttgtttacttgtgagggaccccatattttgagaataaggccttaaggcaagaaagacatttgatgtttaaagaaacacacacatgaatacatacacacaagcattcttagataatcttaaaagcagtttcttcacattggaaatctatcaaatcagtaaactgagacctagaaagaaagctgtgtgtcatagaaaacagtgggcagggggggaaagaaacagcaacatccccattgtcagaagactcttaggatttgtgtgtctaatgtatcttctctctcctcattcagctcttccacttttttctttcctatcatgcagtgcatcatccaaggactcatctcaaagcaaaatcatccgcttcactctgggtcagaaaaagatctctaggttagactttctctgtgtcctgcaaagcatggtttaatcccaacccactgttccattgttccctctgttctggctgagtttgcctttggtcctctcctcgtttcatgtttgcagttcgagaaaactaaatgtgctttggctaatggtcccatggtgcagagctttgaaagtggccatgggattgttgcaagtgtgtgtgggggaagtgacagagtgcaagtgagattgaggtgtacatgacgtttcgcattttcttgacttttggctttgactgctttgtcatcagactccattctgatttaggtaaaggtgagtttctacatagtttttatagtggttttatgatgagtttgcttcctgcttcgtcctggccctaatcccacctcacctgcatctcatttatgtgtcttgtgctttgtgttgttgttgttgttgttgttgttaaaattactaatgtgggtttggttttcccttgagttataaagacttgagcatgaatccatattgggcagaggagacaaaacagcaaggcagctatgtctcgtctttgtttctggatgctcttaggtgccatggagaccgcctcagttccctgaaaataaaaaacaggcttgctcacaagctagttctcttaattcagacttcaacctgtctgctgcctcctatgaggacccatcctatggtatgggaaaagccagttatatcacgttgcatcattgcttctactgttattttcaaggtatcaacagctaacatttattgaacgcaccagttcaaatgtgtcatcttatatcatcctcatgccaggcttcatgaggtaggtcatattattgtctccatttcacagatgaggaaactaaaatttaggaagttacatcattgtgccyaaggccacacacataaaaaatggacgaaccaggatttgaacacaggtggtctaactcagaaccttcactataaccacagtgctacactctcttccctctccttcaattctggtatctctgtggttgttgaggctgctttttaaaatcttacgtttcaaccactactcttggctttttctctcacactgcccttgtggcatcctaacagaaattgctgctggggta

SEQ ID NO: 714304 - DNA, 1878 bp, Homo sapiens
tgcctgcatggaacttaaagtctgatggaagagacagtaaacaaatgcaaacagtatcattacattttgtggtaactggtcttataaaaaaaaaagargggtactatgaatgaacttaattctctggattaggtagaaacttaattctctggactaggtacaacctcttcagggtgagacccatagccaaagtttgcagggtccattgtgcccatgatccccattctcccacacaatggttggaaataaaggatgtttttgaaaacagttttatggacagaaaccagttcccttgcacaaatgaagatctatatcctgaactagcttttttcttctctctctggacatagggagtaaaagtaaaaaaaaaatacagggaggcaaactttggctccatatgtatattgtgaaaagaacttttcacatttgtcttctcacagttgaataggctctcttgagagtagtgagttccctgaccccagaggtattcaaatagaggctggaatatcacttgctagggatgctacaggtgaggtttcttacaatagccggtaggttggaatagattttctctcagattgcttgcaaatctagcatttaattaccccaggcaagggtaaagttggtgtgatttgttctggaagagtctcctccacctcagtaatttcacacatatccccacagtttattagagttcccaaaaccccacctttggattggttcccttaaaagtattcattcattccaaaaatgagctttatttttgagggtgctacttgtactctaggattcatttgtatgctggaaaaaggctgcatcttacgtggatatgcctgtgtgcatttgtgatgacctcttttactccattcacattcttgagaagatttctcccttaacttcacttaaattgtcttgaacttgccaagttcatgctcagaggccatcagagagttcacaggcaaggatgggtgccacacagaagaaatcatggctacttcatgagaagtcacatgtgtggtttccaccatttaacacttggataattccttgccctcatctaagagccagataggaatgttcatgcaaattattttttaaaaaatctatttcactgacatgctgtagggggcagtattcattaaggaaaaccagggacagagtccaggaagagccagtaatttcgaccttgtagggaagaaactgggccctatttttaactatttctgtatactagagactcattcagtctgtcctattgttcgtgcatgaatgaggctctgaccttcagtaatgaaccttcttagggggccaggattaatttggcttatgttaaattcatctggcttggagtgaaaaccagtgaatacctgtgagggagagggacttttccatataggacatatgtgctagggcaaggattcttacctaggtcacctgactccaagcttttgctcttttagccacaatttgaaccatttcaggctcataccttccaacacaagtagtgtttacctcccccagaacatcttcaaacctgttactgcctaggaaatagataataataaaacttgtgggagcgaacctttttttggaccctctcaccttgataagtttggtgaagcaggtgccttactcacccctatcttcccagcccctcaaaatgaatgttttcaaatcatagccacgtatgatttcttacaagcccaaggctgatgggacggtcttgctaaggtgcaccagcttcagggggtctcggctgggcctgctcctatgtctgagggcatctggcacattgactgcatgctggctggtctgtaatggcctcaggtgagacaactcagaattctctacatggtctttcatctcccagcagtctgg

SEQ ID NO: 714305 - DNA, 1878 bp, Homo sapiens
tgcctgcatggaacttaaagtctgatggaagagacagtaaacaaatgcaaacagtatcattacattttgtggtaactggtcttataaaaaaaaaagaggggtactatgaatgaacttaattctctggattaggtagaaacttaattctctggactaggtacaacctcttcagggtgagacccatagccaaagtttgcagggtccattgtgcccaygatccccattctcccacacaatggttggaaataaaggatgtttttgaaaacagttttatggacagaaaccagttcccttgcacaaatgaagatctatatcctgaactagcttttttcttctctctctggacatagggagtaaaagtaaaaaaaaaatacagggaggcaaactttggctccatatgtatattgtgaaaagaacttttcacatttgtcttctcacagttgaataggctctcttgagagtagtgagttccctgaccccagaggtattcaaatagaggctggaatatcacttgctagggatgctacaggtgaggtttcttacaatagccggtaggttggaatagattttctctcagattgcttgcaaatctagcatttaattaccccaggcaagggtaaagttggtgtgatttgttctggaagagtctcctccacctcagtaatttcacacatatccccacagtttattagagttcccaaaaccccacctttggattggttcccttaaaagtattcattcattccaaaaatgagctttatttttgagggtgctacttgtactctaggattcatttgtatgctggaaaaaggctgcatcttacgtggatatgcctgtgtgcatttgtgatgacctcttttactccattcacattcttgagaagatttctcccttaacttcacttaaattgtcttgaacttgccaagttcatgctcagaggccatcagagagttcacaggcaaggatgggtgccacacagaagaaatcatggctacttcatgagaagtcacatgtgtggtttccaccatttaacacttggataattccttgccctcatctaagagccagataggaatgttcatgcaaattattttttaaaaaatctatttcactgacatgctgtagggggcagtattcattaaggaaaaccagggacagagtccaggaagagccagtaatttcgaccttgtagggaagaaactgggccctatttttaactatttctgtatactagagactcattcagtctgtcctattgttcgtgcatgaatgaggctctgaccttcagtaatgaaccttcttagggggccaggattaatttggcttatgttaaattcatctggcttggagtgaaaaccagtgaatacctgtgagggagagggacttttccatataggacatatgtgctagggcaaggattcttacctaggtcacctgactccaagcttttgctcttttagccacaatttgaaccatttcaggctcataccttccaacacaagtagtgtttacctcccccagaacatcttcaaacctgttactgcctaggaaatagataataataaaacttgtgggagcgaacctttttttggaccctctcaccttgataagtttggtgaagcaggtgccttactcacccctatcttcccagcccctcaaaatgaatgttttcaaatcatagccacgtatgatttcttacaagcccaaggctgatgggacggtcttgctaaggtgcaccagcttcagggggtctcggctgggcctgctcctatgtctgagggcatctggcacattgactgcatgctggctggtctgtaatggcctcaggtgagacaactcagaattctctacatggtctttcatctcccagcagtctgg

SEQ ID NO: 714306 - DNA, 1878 bp, Homo sapiens
tgcctgcatggaacttaaagtctgatggaagagacagtaaacaaatgcaaacagtatcattacattttgtggtaactggtcttataaaaaaaaaagaggggtactatgaatgaacttaattctctggattaggtagaaacttaattctctggactaggtacaacctcttcagggtgagacccatagccaaagtttgcagggtccattgtgcccatgatccccattctcccacacaatggttggaaataaaggatgtttttgaaaacagttttatggacagaaaccagttcccttgcacaaatgaagatctatatcctgaactagcttttttcttctctctctggacatagggagtaaaagtaaaaaaaaaatacagggaggcaaactttggctccatatgtatattgtgaaaagaacttttcacatttgtcttctcacagttgaataggctctcttgagagtagtgagttccctgaccccagaggtattcaaatagaggctggaatatcacttgctagggatgctacaggtgaggtttcttacaatagcyggtaggttggaatagattttctctcagattgcttgcaaatctagcatttaattaccccaggcaagggtaaagttggtgtgatttgttctggaagagtctcctccacctcagtaatttcacacatatccccacagtttattagagttcccaaaaccccacctttggattggttcccttaaaagtattcattcattccaaaaatgagctttatttttgagggtgctacttgtactctaggattcatttgtatgctggaaaaaggctgcatcttacgtggatatgcctgtgtgcatttgtgatgacctcttttactccattcacattcttgagaagatttctcccttaacttcacttaaattgtcttgaacttgccaagttcatgctcagaggccatcagagagttcacaggcaaggatgggtgccacacagaagaaatcatggctacttcatgagaagtcacatgtgtggtttccaccatttaacacttggataattccttgccctcatctaagagccagataggaatgttcatgcaaattattttttaaaaaatctatttcactgacatgctgtagggggcagtattcattaaggaaaaccagggacagagtccaggaagagccagtaatttcgaccttgtagggaagaaactgggccctatttttaactatttctgtatactagagactcattcagtctgtcctattgttcgtgcatgaatgaggctctgaccttcagtaatgaaccttcttagggggccaggattaatttggcttatgttaaattcatctggcttggagtgaaaaccagtgaatacctgtgagggagagggacttttccatataggacatatgtgctagggcaaggattcttacctaggtcacctgactccaagcttttgctcttttagccacaatttgaaccatttcaggctcataccttccaacacaagtagtgtttacctcccccagaacatcttcaaacctgttactgcctaggaaatagataataataaaacttgtgggagcgaacctttttttggaccctctcaccttgataagtttggtgaagcaggtgccttactcacccctatcttcccagcccctcaaaatgaatgttttcaaatcatagccacgtatgatttcttacaagcccaaggctgatgggacggtcttgctaaggtgcaccagcttcagggggtctcggctgggcctgctcctatgtctgagggcatctggcacattgactgcatgctggctggtctgtaatggcctcaggtgagacaactcagaattctctacatggtctttcatctcccagcagtctgg

SEQ ID NO: 714307 - DNA, 1878 bp, Homo sapiens
tgcctgcatggaacttaaagtctgatggaagagacagtaaacaaatgcaaacagtatcattacattttgtggtaactggtcttataaaaaaaaaagaggggtactatgaatgaacttaattctctggattaggtagaaacttaattctctggactaggtacaacctcttcagggtgagacccatagccaaagtttgcagggtccattgtgcccatgatccccattctcccacacaatggttggaaataaaggatgtttttgaaaacagttttatggacagaaaccagttcccttgcacaaatgaagatctatatcctgaactagcttttttcttctctctctggacatagggagtaaaagtaaaaaaaaaatacagggaggcaaactttggctccatatgtatattgtgaaaagaacttttcacatttgtcttctcacagttgaataggctctcttgagagtagtgagttccctgaccccagaggtattcaaatagaggctggaatatcacttgctagggatgctacaggtgaggtttcttacaatagccggtaggttggaatagattttctctcagattgcttgcaaatctagcatttaattaccccaggcaagggtaaagttggtgtgatttgttctggaagagtctcctccacctcagtaatttcacacatatccccacagtttattagagttcccaaaaccccacctttggattggttcccttaaaagtattcattcattccaaaaatgagctttatttttgagggtgctacttgtactctaggattcatttgtatgctggaaaaaggctgcatcttacgtggatatgcctgtgtgcatttgtgatgacctcttttactccattcacattcttgagaagatttctcccttaacttcacttaaattgtcttgaacttgccaagttcatgctcagaggccatcagagagttcacaggcaaggatgggtgccacacagaagaaatcatggctacttcatgagaagtcacatgtgtggtttccaccatttaacacttggataattccttgccctcatctaagagccagataggaatgttcatgcaaattattttttaaaaaatctatttcactgacatgctgtagggggcagtattcattaaggaaaaccagggacagagtccaggaagagccagtaatttcgaccttgtagggaagaaactgggccctatttttaactatttctgtatactagagactcattcagtctgtcctattgttcgtgcatgaatgaggctctgaccttcagtaatgaaccttcttagggggccaggattaatttggcttatgttaaattcatctggcytggagtgaaaaccagtgaatacctgtgagggagagggacttttccatataggacatatgtgctagggcaaggattcttacctaggtcacctgactccaagcttttgctcttttagccacaatttgaaccatttcaggctcataccttccaacacaagtagtgtttacctcccccagaacatcttcaaacctgttactgcctaggaaatagataataataaaacttgtgggagcgaacctttttttggaccctctcaccttgataagtttggtgaagcaggtgccttactcacccctatcttcccagcccctcaaaatgaatgttttcaaatcatagccacgtatgatttcttacaagcccaaggctgatgggacggtcttgctaaggtgcaccagcttcagggggtctcggctgggcctgctcctatgtctgagggcatctggcacattgactgcatgctggctggtctgtaatggcctcaggtgagacaactcagaattctctacatggtctttcatctcccagcagtctgg

SEQ ID NO: 714308 - DNA, 1047 bp, Homo sapiens
gaactcacgggggagagcagccaaagcatccttggttaccccagtcccatagaaggtgtctctaagaagcagatgctggcaggtcggtgaaggggcacaagcaccacttgctttatgaggcccctgtggccaaggaaagaaggtaggaaccagctgttaaartagaactccgcaaaacaggtcttactccacttgagtctgttctccagcctttgggattcttggtattcacaggcctacacttctctgctttctctttcccacaccaactggcaaaagttgttgtgtgatgaagatgatccaaatgtcagacttgggctcaggacacctggggtctggtcccagcaactctatttgatggctgtgtggctttgatgggtcatttaacacctctgaacttcacattcctcagctctaaaatggaaatgaggatagcaccaaccacataaagttattgtacggtttccgtgagatgaaaccatacagaaaaataccctaaattgtgtatataaggtttgttgaatcaatgatttcataagtgtccaaaagtcagaaatgactacaaaggggaaagtaaccacagcagctgaactgagaacctcagagagccagttctccactcctggtctgttgcttcagatcaaaagtctgaagcacccctgtagccgcctcttcttgctcatcctcctctctctctgataaaccgtgatgaaaagtgtttttgaaaaccaagggaccaagaaacactgaatgaccttcactgaaaggacgacttttagcaaatgcacacttgacatagtttggtaaatatccaccctgttatcttttgctcctggtgtcttagaaatgtcacttattgattcttgaaattcccccactgccactcatagggggagggggaatttgagacagaagtattgattgaaactagtgaacactgaaagaagcatttgttaggtggtcctttccttttttataaattggctaaagtagacgaaagaagatacatcttttggcggagttttaaacaaaaggaaattagccaat

SEQ ID NO: 714309 - DNA, 1047 bp, Homo sapiens
gaactcacgggggagagcagccaaagcatccttggttaccccagtcccatagaaggtgtctctaagaagcagatgctggcaggtcggtgaaggggcacaagcaccacttgctttatgaggcccctgtggccaaggaaagaaggtaggaaccagctgttaaagtagaactccgcaaaacaggtcttactccacttgagtctgttctccagcctytgggattcttggtattcacaggcctacacttctctgctttctctttcccacaccaactggcaaaagttgttgtgtgatgaagatgatccaaatgtcagacttgggctcaggacacctggggtctggtcccagcaactctatttgatggctgtgtggctttgatgggtcatttaacacctctgaacttcacattcctcagctctaaaatggaaatgaggatagcaccaaccacataaagttattgtacggtttccgtgagatgaaaccatacagaaaaataccctaaattgtgtatataaggtttgttgaatcaatgatttcataagtgtccaaaagtcagaaatgactacaaaggggaaagtaaccacagcagctgaactgagaacctcagagagccagttctccactcctggtctgttgcttcagatcaaaagtctgaagcacccctgtagccgcctcttcttgctcatcctcctctctctctgataaaccgtgatgaaaagtgtttttgaaaaccaagggaccaagaaacactgaatgaccttcactgaaaggacgacttttagcaaatgcacacttgacatagtttggtaaatatccaccctgttatcttttgctcctggtgtcttagaaatgtcacttattgattcttgaaattcccccactgccactcatagggggagggggaatttgagacagaagtattgattgaaactagtgaacactgaaagaagcatttgttaggtggtcctttccttttttataaattggctaaagtagacgaaagaagatacatcttttggcggagttttaaacaaaaggaaattagccaat

SEQ ID NO: 714310 - DNA, 1047 bp, Homo sapiens
gaactcacgggggagagcagccaaagcatccttggttaccccagtcccatagaaggtgtctctaagaagcagatgctggcaggtcggtgaaggggcacaagcaccacttgctttatgaggcccctgtggccaaggaaagaaggtaggaaccagctgttaaagtagaactccgcaaaacaggtcttactccacttgagtctgttctccagcctttgggattcttggtattcacaggcctacacttctctgctttctctttcccacaccaactggcaaaagttgttgtgtgatgaagatgatccaaatgtcagacttgggctcaggacacctggggtctggtcccagcaactctatttgatggctgtgtggctttgatgggtcatttaacacctctgaacttcacattcctcagctctaaaatggaaatgaggatagcaccaaccacataaagttattgtacggtttccgtgagatgaaaccatacagaaaaataccctaaattgtgtatataaggtttgttgaatcaatgatttcataagtgtccaaaagtcagaaatgactacaaaggggaaagtaaccacagcagctgaactgagaacctcagagagccagttctccactcctggtctgttgcttcagatcaaaagtctgaagcacccctgtagccgcctcttcttgctcatcctcctctctctctgataaaccgtgatgaaaagtgtttttgaaaaccaagggaccaagaaacactgaatgaccttcactgaaaggacgacttttagcaaatgcacacttgacatagtttggtaaatatccaccctgttatcttttgctcctggtgtcttagaaatgtcacttattgattcttgaaattcccccactgccactcatagggggrgggggaatttgagacagaagtattgattgaaactagtgaacactgaaagaagcatttgttaggtggtcctttccttttttataaattggctaaagtagacgaaagaagatacatcttttggcggagttttaaacaaaaggaaattagccaat

SEQ ID NO: 714311 - DNA, 1917 bp, Homo sapiens
taaaatttaaagggtataagatatacctccttattagagatgtactataacctcattgcaactaggtgaatccttgatagaaattaaatgtaattttgaagtaaaaaagaatattctgctgcaattgtggctaaattccactatgaatctgtggctaaattcagtgacctgaaattgagaatttatggaaaccccaacatgataaaccaaagttttaacttattctacaacaagatagtaaacctttgaaaggataggtcaaataattattcccaaaacataagaaaaacagtcttttaaagtctcacttggacacattcaaagaataaaatcaccatttaaaatatttgtgtgtatatatatatatatatatatatatatatatatatatatatatatctttctttttgactttactataaaccccttgagtcacagacatttttcgtttgtcttttgaacctccataacagtgcaatactgagcaaccagtaataaagtactgaaggaatcaatctaatacttttatttatttatttatttatttatttatttatttatttttgagacagagtcttgcactgtggcccaggctagagtgcaatggtgcgatcttggctcactgaaacctccacttcccaggttcacacgattctcctgcctcagcctccagagtagctaggattacaggtgcacaccaccacacccggctaatttttttatatacttttagtagagaaggggtttcaccatgttggccaggctggtctcaaactcctgatctcgtgacctgcccacctcggccccccaaagtgctggattacaggcatgagccaccacgcctggccaaatctaacactttttaaatcttgagatcaagaagaaaggaagggaaagatttgtctccattaatgagcttgatattgtgaaacagaccaatatgcaaaatcacatcatggcaaggcaagtatctattcccttactgaacccagctttcagcaaatattgactccactagtgggaatgagtcccagagaagtaccaacgttaccttccaattctaattttgtggttttagtggtaagaaaaaagcagaaaataataggctgtctatagcagaagaatatatgttggtagagaattagttaatggtactataattagagaaaggcagcatgatttgtcataggctggtatgcttaacttcaaccgtgagtccattaagacaaaaacttcatacaatgatgttgataataatactgataatagctttgtgtacattcagaaatcctcaaataaaaactaatacattcctcatttttttgttcttccagaaccataatgtaccttttttttgtaaagttatttgattaaacaaaaggttcacaaacattttaagttttattttgtttctttttttttttaattatctgtcattgattccacagcttactacaattagaattaccataatggtaggatgtggttggtagaaatatatgacttcatcctttataatcaccagcatggcatttcccgaaacaaaacactacaggatatcaatgatgctgagcctctcttctcggatctaatgttttcatgcatgccagtctaaaaatgctgactgcatcatagccctggcagccaacattaagcttgtaaaacaacagaaaagcaacagtaaaactgctatttgtgttttatggaactatgcaaaactaagaaaatagcagagtacccmaaagttggatttttaaatattcccagtggtctaatttttttacccactcattattttgtgccaattcattttggcacacttccaaagtctttttttaaaactattatgtatgtctaaatagaaatgagttgaaacactgactgacatctgcctatgcatatatattattttaatga

SEQ ID NO: 714312 - DNA, 694 bp, Homo sapiens
ttaatacctgaaatacagaaataccatctgcttaaactttgtcaatttaggattttgaagtctttctaatcatggtatcttcaatgtctagaaaatgtccacacctctcttaaacagatctgcacattgatatgtgggctttgcaaagtaatatcacttatgagtttcctaaaagattctaaaatgtttaggatcactcaaacctgatggaagaaaagtgcttctatcttctcatttttgggcagacaaccaaatgtgttgctaggctgggtggtaaattcaggggaattaatcactattgactgaaacaaaggtcatgggtgttttagctgaatagcaggaaaacgattctgtagcataaaagccaagaacacagcgctatcactcaatagcataacagctgcagatgatwtctaagttttaatagcaaaaccgaagagttggctaggttggtgaaacttgcaactcttctaacaacattttcctctttgctggaatctgagacatctgtgcctgagaaaatcacaactatttcttacatatggattcaccttattttcagagaatatttttttccaatgcatgcttaatagatatacataaaataaacatatgaaaatgtgttgggctacactataaatactattaaaattgttctgccctcaataattccagaaagttttttcagtgttta

SEQ ID NO: 714313 - DNA, 655 bp, Homo sapiens
aagcgtggtatatgtataccatggaatactactcagccataaaaaggaatggaataatggcatttgcagcaacctggatggaactggagactattattctaagtgaagtaactcaggaatggaaaaccaaacatcatgttctcactcatatttgggagctaagctatgagaacacaaggcataagattgatataatggattttggggactcggggaaagggtgttggggggtgagggacaaaagactacacattgggtacagtgcacactgcttgggtgatgggtgcaccaaaatctcagaaatcaccactaaagtacttatkcatgtaaccaaacaccacctgtttcccaaaacactattgaaataaataataataaaataaaaataataatgtactttaaaaaggaactaaacgtttctacctcacttattttatctttttagcatttcctatcttttacagtgctcttgcttttcgtcttttttgtatcttttctctaaatatatacaaaattaaacggaaatttaaatttcttttgccttgcaagtgaatttctttaatgttttggaactataactttagtttaacaaaaccaccaatccagggtactgagatagtattgttggaggatacaaagataggtaaggtttgtc

SEQ ID NO: 714314 - DNA, 923 bp, Homo sapiens
tataacatatattaatayatgatttttgtattatgaatcgacagaattaaatctttcttcttaattgtttttggctctccaaatatgtcactaaatttctaaacaatttttattaattaatcaatatttgtctgttctaagcattttacacacatttactcatgcaatcttcataatgaccataaaaaagtcacactgtcctccttactttacaaatgagaaatctaaagcagaaattgtatctgttttcttttgcatacagctagtaactggcagaactgagattacaatccaggtatcatagctccgagtctgctcctaaccactagccgagctacctgccagaaactgtgttagaaatgtaacatatacatcctgttctattatgtgcaatgtgtttgtattgtcacctgcatttcatagataaggcatcagttttaggtaaattctccaaagtcttacataccaaggagtaaaatagcaaaaaaacagtatgcgaatacagtctgtcatactccaaaatctacactctgatgcatgttgcttggcaccagcattgttttaataatgtcaaattatttagtgtcatagcagaaaaggcatttgatggcaatttccaacacaattatccagggcaataatgtataaaagagaatctagtatagtgagggtgacctcactaacgtggcttgtaaatgtcatgcaagcacagcggtaactcatcagcagccagaaatgaaaaggcagttttagtttctctctgcctacataccacgttatttacatagatctaataagaaacaaaccctgtctttaggaagatgacatttgaggactcaagaaagtaatgaatttcaggtgagtttaatttcataatgtatgctcttcagaattttgtgctcataattaactaagttcctttt

SEQ ID NO: 714315 - DNA, 869 bp, Homo sapiens
ctcatgtatggttgtcaatctgaaaatctgatgacaacctggcaagatatktaaaagttagcccacgagtggtgagaaaagcaactgtactataacactggctgaaaaactgccagttttgcaagtgatataacttctttaataggtagctctaagtaccttgcttctggcttcttcatagcacattcggataactagagagagttcatataaagagagaatcagtacattgtccaacctaagagggtaatacttacagaagtagcacagggcagcagctcttaaattttagaatacttaggtttggataaagagtattatataaatgcaaagtcctgagctctagcaccagaaatacactttggtaacttcaggatgtgtcctaaggatgtatattgtttttgtaactctaatctcacgttagtctgattcggtatgttgctaactcaacactggcttcctcattaggagtactggctctactttcacatgatcttgggaaaatcactgaaactcttgaactgaacatgttcataatcttgttaagctgtacaattacttaaaagtaacaactacatatgcttgtttcaatctttatatcattctttttaggatgttatggctcctttctttttgatgttgtattcagtatgaatcactttatgttcacctttaagtagtgattctcttgagtacttgctggtgatttggaggagacaaataaaactccagcactcatgaattcttaaaatgctagatattttccgagtggcttgctgaaggtcacaacgctaatacctctgaaagtggcagcgccatggcccgagcctaaggccttgctattctagtttcagagtgatgcctacctc

SEQ ID NO: 714316 - DNA, 434 bp, Homo sapiens
ttaatccaatgacaggatttcccaggggaattattgcgagtaaataattgggcaatagataatacatgcaaagaaacattttgaaggtactaggaattacctaaatgtatgaagggttcagagaactaaggattagaagttggctggagtttcacaactgcaaattaagtttcagccagaaaacagcatgtcacagaagccttatgagtgratctattaaaaggatactactttgcacagacaagttaatgggccaaacttgtatttctcacactatgagcaaaagagtaggcactaccttaggagctaatgtccttaactgcaggacctaaagtaattggttataattacagtaatgataatgatagacagttcgatgtttatatcaatgaactatgttaaaaaatttcatgatcctgatttaattctgcaag

SEQ ID NO: 714317 - DNA, 1002 bp, Homo sapiens
tttttgcacatcccatcaatctgcatttgctttttcccatgttaagtatacaccctatcttctcccatgatctatctattccttgcacaaaggcctcccaactgctttctacctaggctacttttatgcttctccaaactgtcatcagattatcagcttgatctagttaaaacaaaaacctgatcaggatgccctactccaaagttttcagtcttcctttgcctgcagaataaaatctatactcctagcaatgatctgctcttccttaagtgcccaaatctcacactctctgagtgtcttgtagtttcctgacatacggcaacttacatgttcctacttagtttttgcatcttttcttatgctccttccacaatgatgcataacccaatatattatataagtctattctattttgattttttttttttttttagagtctcactctgatgcctaagctggagtgcagtggtatgatctggccttgctgactgcaacctccgcctcygggttcaagtgtttctcatgtctcagccactggagtaactgggattacaggcctgtgccaccacacccggctagcttttgtatttttagtagaggtgaggtttgaccacgttggacaggctggtctcaaacttctggcttcaagtgatctgcctgcgttggcctccctaagagctgggattacaggcgtgatccactgcacctgaccctattttgctttttattcatcttcttttttcccagcacttaacatattgcacttatcaaataataattgctaagtctccccatgtgccaggtactgtcctaaggacttcatgtatattcactgctttattctcacaacaaacatatgaaatagatattataaaatcataatagttttatagcggaggaaagtgagctactgagggctaagcatttcatttacaaccacacaagtgataagtggcagagctgggtttttagcttggatagttcatgcacttgaccattaca

SEQ ID NO: 714318 - DNA, 601 bp, Homo sapiens
atggtctagtacttccatacaacctgkgcacatcctcctgtgtactttatcattgctagattacttctaatacctaatacaacatctacatgtcacttctatcacatggattcaacacagtcctctgcacatggcaaattcaagttttactttttggagcattgtcaaatttttccaaatattttcgatccatggttggttgaatctgtggaggcagaacccacagatacaaaaacacatggatacagagggctgactgtatacactcaattaattataatggatttctccagggaagaaagaataatgtgattagacatgaaaacaaagtaaactaaaacttcacctgaattttttagtttatataaaccacgttaacaattattgcatctttgcgatgggtacccaggtgtttgtaataattccctttattcttttacaaattttgtattttctttaaaaactaaaaaaaaaaaaactacccatcttatataagaattggagacagcctttgttcttcacaactgccagttgaaaataatttgctgtagctgatcaataagacactatttatagaacatgaagaaacacagacatggtt

SEQ ID NO: 714319 - DNA, 601 bp, Homo sapiens
atggtctagtacttccatacaacctgggcacatcctcctgtgtactttatcattgctagattacttctaatacctaatacaacatctacatgtcacttctatcacatggattcaacacagtcctctgcacatggcaaattcaagttttactttttggagcattgtcaaatttttccaaatattttcgatccatggttggttgaatctgtggaggcagaacccacrgatacaaaaacacatggatacagagggctgactgtatacactcaattaattataatggatttctccagggaagaaagaataatgtgattagacatgaaaacaaagtaaactaaaacttcacctgaattttttagtttatataaaccacgttaacaattattgcatctttgcgatgggtacccaggtgtttgtaataattccctttattcttttacaaattttgtattttctttaaaaactaaaaaaaaaaaaactacccatcttatataagaattggagacagcctttgttcttcacaactgccagttgaaaataatttgctgtagctgatcaataagacactatttatagaacatgaagaaacacagacatggtt

SEQ ID NO: 714320 - DNA, 644 bp, Homo sapiens
gcatagactttctctgagttcagttccacctgccgcttaaactcttccagagcggcatctgcctgctgggcctgcaacctctgaacttcagtcacacgagttagctgctcctctttttccctagaaaggttcagagaagcttcagagttaaaatataaaagagctaggcctgaatgaaagaacaatatttaaccccctctaaaataaaatccagattttaatttttttgatccaaatcctacaaaacttccctttagaaatttgacaataaactaatttgtctcaagagaaaaagggtataaacatatattgtgtattctgatgaaggcaaaactgctttcaaagatttctctaaaaacaaaactgagtaaaaccatgtgtctccatcaagtgatgaatgaataaacaaaatgtggaatagctatccaatgggmtattagtcattcttaaaaaggaatgaagttctgatacctgctacaacatggatgaaccttaaaaacattcagctaagtgaaagaagccagtcacaaaaagttacatattgtatgattccatttatatgaaatttccagaataggtaaatccatggagacagaaagtaccttagtagttgctagggtctgagaggctggggaaatagggag

SEQ ID NO: 714321 - DNA, 601 bp, Homo sapiens
cagaaggctgttcagtcaaaaactcaaaatagagttttagctatttccagaaacctggtttacactctgctccactccttactggcttaagtgatttgggacaaactgaaagcatctcaggaccttgaggaatcctcagacacgtttaattaaaaatatatgtaaaacataaatacaatttttaaaacctcatatgcttcccaactagggtgaacatacaatatttaactactattaatgttttattataatttttccttctaaaactttattggtttgtctttattattgtcataagctataaaacatacatatatatgtatgtttttatataaatataatgtctagatccctttcaatgcatttatacacacaccctaaacatccccccccmcacacacacacacaatcttttttctaaattcactcttgtatcaaagttaaaatattggaaagcaaagtaaccaggaagcaacatattgaggctaccttagcttaggtctctacaatatgccaaagcacatcttaatataataactttcagcttttattgaaagtcaaaataagaaatagtctgcattttctgcaaaatgactattga

SEQ ID NO: 714322 - DNA, 1562 bp, Homo sapiens
gaatgggggctcctgtcaatggygcggaagtgattgtagctgcacccagtggcattggggtgactctctgagatattagtttgacatgagggtatggggccgtgcctgctggcagaaccgttgtgcacctggggtagccactgtgctcacgagggacaggctgcctaacgctgaagaaccgggtttcagcctctgagcgcaggaccttctctccagcccccatggcccactgagacctgagcaacagaaaaggagcaaacctgcaggcaggccctcccaggcagcagcaggacagggtgcccgaaggagagcgtggagttgcctctcagaagattctagaaactctggctgggtgcggtggctcacgcctataatcccagcactttgggaggccgaggcgggtggattacctgaggtcgggagttcgagaccagcctggccaacatggtgaaacccccatctctactaaaaaattcaaatattagccaggcatcctggtgcgcacctgtaatcccagctactcgggaggctgaggcaggagaattgcttgaactcgggaggcagaagttgcagtgagccaagattgtgccactgcactccagcctgggcgacagagcaaggctctgtttcaagaaaaaaagaaagaaagaaagaaactcaactctgcccaggtgccttagctattccgctgcccagaagcagggaggagacccagtgctccttcccagaaggcccgttttccagcccgtcgccatccagtctcccttggagaagtcccgggagatgggatccagcttccttcctcttttcccaccttctccactcccagaagctattcctgcaatcctggcctagcctctcactgagagcagggaattccctctctggcagcgggataaagaaggaccctgcttagagccgggacagccaaagggacagggagggcctggatggggaggaggcagaagtctggcccctgctgcctccccacacatacctccacccccctacccccgccccaagaatgtaattaagcagcagcttctgccaggagccaagctttctgccttccgactataaatcaccttctgaatcatctctcagctcctagagaagcaacttctgctcaggctgctctgggcggccctggtgccactccccctgggaagcctgcctcccccaccccttctgtgcccagccccctggctctaggtcccagcaagagtctggcagactctgggggtcggggaatgattaggggacactccagcaaccttctctaccctgccctccccttcctgagcaggtaaagagctgaagtgagattagcctggcccagcaccctcaacttaagaataaagctaaagcactgtggggcaaacaggcaaaaagaagaaaaggggaaaacagagccaggtggggcaaatctgggagggcttcttggaagaggcaagtttggctccagggcttcagtgagccaatagcttgcagataggaggtgaaaatagctaacatcgatatgcttcctgtatgcaaggtatcattctaagaagtattcactc

SEQ ID NO: 714323 - DNA, 1562 bp, Homo sapiens
gaatgggggctcctgtcaatggcgcggaagtgattgtagctgcacccagyggcattggggtgactctctgagatattagtttgacatgagggtatggggccgtgcctgctggcagaaccgttgtgcacctggggtagccactgtgctcacgagggacaggctgcctaacgctgaagaaccgggtttcagcctctgagcgcaggaccttctctccagcccccatggcccactgagacctgagcaacagaaaaggagcaaacctgcaggcaggccctcccaggcagcagcaggacagggtgcccgaaggagagcgtggagttgcctctcagaagattctagaaactctggctgggtgcggtggctcacgcctataatcccagcactttgggaggccgaggcgggtggattacctgaggtcgggagttcgagaccagcctggccaacatggtgaaacccccatctctactaaaaaattcaaatattagccaggcatcctggtgcgcacctgtaatcccagctactcgggaggctgaggcaggagaattgcttgaactcgggaggcagaagttgcagtgagccaagattgtgccactgcactccagcctgggcgacagagcaaggctctgtttcaagaaaaaaagaaagaaagaaagaaactcaactctgcccaggtgccttagctattccgctgcccagaagcagggaggagacccagtgctccttcccagaaggcccgttttccagcccgtcgccatccagtctcccttggagaagtcccgggagatgggatccagcttccttcctcttttcccaccttctccactcccagaagctattcctgcaatcctggcctagcctctcactgagagcagggaattccctctctggcagcgggataaagaaggaccctgcttagagccgggacagccaaagggacagggagggcctggatggggaggaggcagaagtctggcccctgctgcctccccacacatacctccacccccctacccccgccccaagaatgtaattaagcagcagcttctgccaggagccaagctttctgccttccgactataaatcaccttctgaatcatctctcagctcctagagaagcaacttctgctcaggctgctctgggcggccctggtgccactccccctgggaagcctgcctcccccaccccttctgtgcccagccccctggctctaggtcccagcaagagtctggcagactctgggggtcggggaatgattaggggacactccagcaaccttctctaccctgccctccccttcctgagcaggtaaagagctgaagtgagattagcctggcccagcaccctcaacttaagaataaagctaaagcactgtggggcaaacaggcaaaaagaagaaaaggggaaaacagagccaggtggggcaaatctgggagggcttcttggaagaggcaagtttggctccagggcttcagtgagccaatagcttgcagataggaggtgaaaatagctaacatcgatatgcttcctgtatgcaaggtatcattctaagaagtattcactc

SEQ ID NO: 714324 - DNA, 680 bp, Homo sapiens
aggtaggcagatcacctgaagtcaggagttcaagaccagcctggcaaacatggtgaaacctcgtctctaccaaaaatacaaaaattagagtgcacacctgtagtctcagctactcgggaggctgaggtgggagaatctcttgaacctgtgaggcaaagtttccagcgagccgagattgcacctgcactccagtctgggccagagagtgagactccgtctcaaaaataaattaattaattaaatgaataaaaatagcaacaactaaaattaaccaaagtgaatttgttgatgtattaatgtaactggtgtgttcaaaagaagaatctggcttgaaaaaatactcaaagtgtgtcttcaaagatatgtaatattgtcccttctctctctctttctctctctccatttcttagctctgctatcctctgtggtaacttcattgcttcatttctgggcaagctctctgtgcagtggctaatatgactatctgcagacttacacttaacatttttcttccaactagtagtcccaaacaaaagaaagtgmctcttttctgatagtttgaagaaaagtttctcacaaagtttctccatttctaactgtgcttagatgatatagatgatgatggtctatggagatagatattaataatgatttgaggcactttttcattttcagagact

SEQ ID NO: 714325 - DNA, 640 bp, Homo sapiens
ataaaaataaattaatttaaaataggccaaatcttaaatatataataatggcattgaggttttaactttctttttttatgtgtgtggaaaattattcatgtaaatctttttaaaagtttaatacataggtcatgacaaaggataaatgacatttgggtttaatatcagagcatgcttcagggctcctttatgttaagttgatatcaattaaaaataattctgccagttgagatcaggaccatctcagacattccatttagtatataggtctgatcagtttatttcraatatgttgttaaattggtagttgatggatatttacagccctgcaaaccaattaaagcttttatttgaaaagaaaaagttcacctctattaacatgtcaaacattttatgttaccagccaaaacagaaaaacaattctaagagaaaacaaaaactatgttctatatagattgggtctataaaaattaggtctcaaaatcaaacattaatgaaatgaaggtacttaggaaaaatcagaaatcttcacatgaagaaagcactttatacttatgactctgggaaaggtgcatagagaggttgggtttggtgaggaattaacaaatgaaaagagaaatcatctccaggtcatttcgcc

SEQ ID NO: 714326 - DNA, 624 bp, Homo sapiens
aaattcagtcttatagaatgccactgataactacaccttgggttaaccacagttcattgacaaatttcttcactgaatttttgaaagactatcctttgggagtttcaataagatagtctatgtcacctagtttttctaaattactaggctgatagttccaccatattttgataatttcccttaggttactaaataaatttcttcccttaggtcaattcctctctctctttgtaatagtaagaatgtcagaaatgataaattccagttcacaggtgtttacatacacatcatcgcatttccatttgattccacaaaataaccatatgatttagaaagaattgtataagccacatctgattggcaaaagaactaaaggttagtgagaagtgaaatgtctaagttcccacaacttgtacatagaaaagcaagaatttatttagacctcctgatttcaattaactatctcttyactatcaatttgtacaaattctattaataattctaatctatatagggccaaaattcattatcttttatgcatgatcctatgcacacttggcttctttactttataaataaagttgtgagaaaaaactgattccttttgagttcaacattattcag

SEQ ID NO: 714327 - DNA, 612 bp, Homo sapiens
ttttaatacctctgacattggaatgccacttatattattataactataattggtagcatttttaaaaytatcttattgatatataaaatagcggggtatcacacaatccatgagaccttacattaagtagaatatggtatactcagcaggtctagggcagttctaggcatataattggcactcaaatacattttagttcttaaaggtactatggggaaagagcactgaaataacaatgcatttttttaaaaaattaattccttcattttcaaacaaattgaagccaaaggaaactcatgattcaaatgaatacatatggttcattttattcaatacttataatacttacagaatatatgcaaataacactttccaatgattaatattagtatttaagactgataaacttttcaaagagcagttaaaggttatcttctactattttctaagttcagaaatgcttttgtttgaaaagtgggacacaaagtttcaaggagattaagtcccaatattcctattttaaatctctcagcttgtgcaggcagggcaggtaaacatgaagtttttaaggatagaagcgtcctgagagatagtagaatatgtctgctacat

SEQ ID NO: 714328 - DNA, 3228 bp, Homo sapiens
tttcctccctggctgatgcctgtgtgcccagatggccttcgaggcagcgagaggagctatggccatggcccatctctgctgctgtgagcccgtgcggccaggaaagtggcgggccaggatggatgaggtgtcaggagagggcccgccactgtgtgagggacacgaagggcaagattgtgcaaaggagaggaggtggctgcaggagagcccagagcaggggaagggagaagtcatgggggcctctgaggggcaaccagcagttggactcaccagttagagcttctgatcccagagaggccttggaatggcctctggccctgcctcaccttccctctccagaagtgttttgtttggcagtgaaaaaagtagctttaattacagctgtgcgtgccaggaggtgcccactccagcctcattgtgtaactggtggtgaggaagcatgctactaagcatgctcgggtgaactttgctctatatttcactggattataacactgaactctattaacatgctcttggcatcctggctgcccgcccgtgtagctcagtcaggctgcaactctgcgtcctcccagcctgcaggctgctagctcaagcaccaactccactagggcaagggctttgtccagggcccctttatgtggcccccagtaggcctggtaatttcgtagaatgaaggaaacatgaagtgctcatgttctgaaactcatttgtgactttagaaaaattctgatggataaaatgcatagcagatagctgctgctagtctgaggcttctctcatttgtctggtattcttctgttccctacagtacctgtctcacaatgctataaaatatcaccaaattcctccatatgggagaaaggccaaaaagaatcagtgaaaacctaaactggcccattcaggacaggcggttccacgtgttttctaccatggttgttttctttcctatgggtagatggacttcaggaggtgacagtgcatgctcttcagcagcacggtctcttggcaccatgcagacccaatttcagatcctgattctgccgcttttttttttttttttctgagatggagtcttgctctgtcacccaggctggagtgcagtggcacaatcttggctcactgcaacctccacctcctgggttcaagtgattcttctgcctcccaagcagctgggattacaggtgcgcaccaccacacctgactaattttgtatttttagtagagacggggtttcaccatgttggccaggctggtctcaaactcctgacctcaagtgatccacccgcctcggcctcccagagtgttgggcttacaggtgtgagccaccacacctggccgattctgccactttctaaggtgactagaactcgagcaagttccttaacctctctgaatctcagtcctcatattgaaaacggggatgctgatgataataaaaataaccgagaggattaaataagttacgcatataaagcacccagcatagtgcctggggcacagtatcctaaaatgagaaccattatcaaagaagaaacttgaatctttgcacaaaaccaatcaagtcatgccccgttgttaaaattaggacttgtttctggaggacacagtcattaaaacaagcaccactaatctctctctctttctccctctctctttctgcttcccttggcttcccctttcttatttctattatgccttgctggaatatcttcaactcacaagttaaaaaacagcactggatagaggtaaaggattagaagaaggcaagaattttattagctgcttcttcaaattctaccatgcaaatttcagacatacacaaagtacacagaaaaagcaaaatgatgccccatgacccctcacatggcagcacgcctgcttcgtgtgtgtccaccagctcccgccacccccagctgcctggagccaatcccaggcatcaggtcacttcctagtcagtacttcagcgtgtctccaaaaacagactgctctcttacaaatacaatcacatcatcaatatcactctctacccaaaatgcatccctaaaatcagcaaataatcccatcagtgttcaaatttccaattgtctcgtttttatggaaagtggcctcctaaggtcatagtctgcgttctggggggacttcctgttcctgggtcagtctttgttgccttttcactggactgtgctaggaagtacgtattttttatttgttttgttttgttttttgaaacaggatctcactctgtcacccaggctggagtgcggtggtgcagtcttggctcactgcagcctccacatcctaggttcaagcaattctcctgcctcatcctcctgagtagctgggactacaggcatgcgccaccacatctggctaatttttttgtattttttagtagagacggggtttcaccatgttggccaggctggtctcaaactgctgacctcaagtgagccttttgcctcggcctccgaaagtgctggggttacagttgtgagccactgcacctgaccatatttttaaaatatagagtcgataatgagttatactgggtttttttttttctgtttttttttttctgagatggagtttcactcttgttgcccaggctggagtgcartggggcgatctcggctcactgcaacctccgcctccctggttcaagtgattttcctcctaagcctcccaagtagctgggattacaggcgcatgccaccatgcccagctaatttttgtatttttagtggagacagggttttgtcatgttggccaggctggtcttgaactcctgacctcaggtgatccacccgcccgggcctcccaaagtattgggattacaggcatgagccaccacacccggcctcaaccccatctcttaaaaaaataaaaagataacctttgctctcagtaacagttgacaagcttgttctatgggtcatgtcctctctctgtcacctgtccacctctggatggttgtgctgcatcctcattgggatagcacccagccactgtgtgccacgctctcacctcaaagccatcattcagtcatggttccacaggtgggtacagatttaacgccaccactgtcctgtgtgctgatgcttctccagtcattctggttgtgtgaagtacattctctagtatagcatttttaaagctttttgatcttaggacaaacccattcatactcctaaaaaaattactgaaggcctttaaaacatttattaa

SEQ ID NO: 714329 - DNA, 582 bp, Homo sapiens
agcctgtgggtttcaaatccgagaaaataaacaagtccagactggctttggggtgtgcggggtggggctccgtggctggcccttgtcccccgtggagggctggcctcrtgtcacccgtggtctatttgtgacactgctgtggaagcggaagtcttaagtgaacggtccaagtgcatctccagctgacccctagagcgtgtgatctcacaaactaaaaggagcacttagttttggagagcatcctcaatcccaatattctaataattctttcttatcttcctctggttattagcatgagaacatagctctttcatggttcccatagaccttctgaactacacagtgttgtgcgacctgcatggaaggcgtggggctgaggtttaaagcttattaagtaattcaagcagcagcactgagaagagccttaatttctttctaattgaaacagttttatttaaatagggccgagggctgcatgtttctcaaaagcagccctgcttcagagcagcatttgtgcagcttcaccttagtctcagcacagactccctggcaggggagctgagagaagtacttaagttgaag

SEQ ID NO: 714330 - DNA, 1123 bp, Homo sapiens
gtgcaatcacagcaagtaataagattctacataccaaaccacatttagcttgttgtcttcgagtttttggtagagcctwgtgctgggggtggcaggaagagagaggggacacagcatggccagtgctatatagcatggaatgcttttaacagagaacaaagtgtttgtactaaaaggcaggaatctggggctcagtaggtgttgagtaactgaattgctatgaatgattttccgtcaaaatctaaataacattccagcctttgccagcttcataggggaattagatagtaggaatgcactgagtttgtgctcctgggaagactccacgattgggggaaggaaggcaacagaaatgagggcagggatgttgtttatctccgtccaagcacaggaggccccgggtgggatgacaggtgggatgacctccgtttactggtggcccaaaagcacacctatgccttcaggatgaagtgcgctctgctcctcacccaaaggtttatttctggaaacctttaactgaagtacatgcacattcagaagaatacatgtatcctgaacatacaactcactggactgtcacaaactgaccatacctatgcaaccagcaccaggtcaaaaagatattattttattttaattaatttattattattattttggagacagggtctggctctgtctcccaggccgaaatgctgtgtcatgatcttggctcaccgcaacctccacctcccgggttcaaatgattctcctgcctcagcctccggagtagctgggattataggcgtccgccactatgcctgggctaatttttgtatttttagtagagacagggtttcgccacattgctcaggctggtctcgaactcctgacctcaagtgatccacctgcctcggcatcccaaaatgctgggattatagatgtgagccaccgcgcccagctaaaaagatattttaataatatgaatgcaactctgcatgtgcatgaaatgcaaaggtgacagggtgttatgaaaatgtctcccttccctctattttctagtcacccagatttcctattaagaaaaaaaaattgtcattagtttcttaaccaatgggttttaaaccagacttcctgacatctg

SEQ ID NO: 714331 - DNA, 1123 bp, Homo sapiens
gtgcaatcacagcaagtaataagattctacataccaaaccacatttagcttgttgtcttcgagtttttggtagagccttgtgctgggggtggcaggaagagagaggggacacagcatggccagtgctatatagcatggaatgcttttaacagagaacaaagtgtttgtactaaaaggcaggaatctggggctcagtaggtgttgagtaactgaattgctatgaatgattttccgtcaaaatctaaataacattccagcctttgccagcttcataggggaattagatagtaggaatgcactgagyttgtgctcctgggaagactccacgattgggggaaggaaggcaacagaaatgagggcagggatgttgtttatctccgtccaagcacaggaggccccgggtgggatgacaggtgggatgacctccgtttactggtggcccaaaagcacacctatgccttcaggatgaagtgcgctctgctcctcacccaaaggtttatttctggaaacctttaactgaagtacatgcacattcagaagaatacatgtatcctgaacatacaactcactggactgtcacaaactgaccatacctatgcaaccagcaccaggtcaaaaagatattattttattttaattaatttattattattattttggagacagggtctggctctgtctcccaggccgaaatgctgtgtcatgatcttggctcaccgcaacctccacctcccgggttcaaatgattctcctgcctcagcctccggagtagctgggattataggcgtccgccactatgcctgggctaatttttgtatttttagtagagacagggtttcgccacattgctcaggctggtctcgaactcctgacctcaagtgatccacctgcctcggcatcccaaaatgctgggattatagatgtgagccaccgcgcccagctaaaaagatattttaataatatgaatgcaactctgcatgtgcatgaaatgcaaaggtgacagggtgttatgaaaatgtctcccttccctctattttctagtcacccagatttcctattaagaaaaaaaaattgtcattagtttcttaaccaatgggttttaaaccagacttcctgacatctg

SEQ ID NO: 714332 - DNA, 1123 bp, Homo sapiens
gtgcaatcacagcaagtaataagattctacataccaaaccacatttagcttgttgtcttcgagtttttggtagagccttgtgctgggggtggcaggaagagagaggggacacagcatggccagtgctatatagcatggaatgcttttaacagagaacaaagtgtttgtactaaaaggcaggaatctggggctcagtaggtgttgagtaactgaattgctatgaatgattttccgtcaaaatctaaataacattccagcctttgccagcttcataggggaattagatagtaggaatgcactgagtttgtgctcctgggaagactccacgattgggggaaggaaggcaacagaaatgagggcagggatgttgtttatctccgtccaagcacaggaggccccgggtgggatgacaggtgggatgacctccgtttactggtggcccaaaagcacacctrtgccttcaggatgaagtgcgctctgctcctcacccaaaggtttatttctggaaacctttaactgaagtacatgcacattcagaagaatacatgtatcctgaacatacaactcactggactgtcacaaactgaccatacctatgcaaccagcaccaggtcaaaaagatattattttattttaattaatttattattattattttggagacagggtctggctctgtctcccaggccgaaatgctgtgtcatgatcttggctcaccgcaacctccacctcccgggttcaaatgattctcctgcctcagcctccggagtagctgggattataggcgtccgccactatgcctgggctaatttttgtatttttagtagagacagggtttcgccacattgctcaggctggtctcgaactcctgacctcaagtgatccacctgcctcggcatcccaaaatgctgggattatagatgtgagccaccgcgcccagctaaaaagatattttaataatatgaatgcaactctgcatgtgcatgaaatgcaaaggtgacagggtgttatgaaaatgtctcccttccctctattttctagtcacccagatttcctattaagaaaaaaaaattgtcattagtttcttaaccaatgggttttaaaccagacttcctgacatctg

SEQ ID NO: 714333 - DNA, 1123 bp, Homo sapiens
gtgcaatcacagcaagtaataagattctacataccaaaccacatttagcttgttgtcttcgagtttttggtagagccttgtgctgggggtggcaggaagagagaggggacacagcatggccagtgctatatagcatggaatgcttttaacagagaacaaagtgtttgtactaaaaggcaggaatctggggctcagtaggtgttgagtaactgaattgctatgaatgattttccgtcaaaatctaaataacattccagcctttgccagcttcataggggaattagatagtaggaatgcactgagtttgtgctcctgggaagactccacgattgggggaaggaaggcaacagaaatgagggcagggatgttgtttatctccgtccaagcacaggaggccccgggtgggatgacaggtgggatgacctccgtttactggtggcccaaaagcacacctatgccttcaggatgaagtgcgctctgctcctcacccaaaggtttatttctggaaacctttaactgaagtacatgcacattcagaagaatacatgtatcctgaacatacaactcactggactgtcacaaactgaccatacctatgcaaccagcaccaggtcaaaaagatattattttattttaattaatttattattattattttggagacagggtctggctctgtctcccaggccgaaatgctgtgtcatgatcttggctcaccgcaacctccacctcccgggttcaaaygattctcctgcctcagcctccggagtagctgggattataggcgtccgccactatgcctgggctaatttttgtatttttagtagagacagggtttcgccacattgctcaggctggtctcgaactcctgacctcaagtgatccacctgcctcggcatcccaaaatgctgggattatagatgtgagccaccgcgcccagctaaaaagatattttaataatatgaatgcaactctgcatgtgcatgaaatgcaaaggtgacagggtgttatgaaaatgtctcccttccctctattttctagtcacccagatttcctattaagaaaaaaaaattgtcattagtttcttaaccaatgggttttaaaccagacttcctgacatctg

SEQ ID NO: 714334 - DNA, 1123 bp, Homo sapiens
gtgcaatcacagcaagtaataagattctacataccaaaccacatttagcttgttgtcttcgagtttttggtagagccttgtgctgggggtggcaggaagagagaggggacacagcatggccagtgctatatagcatggaatgcttttaacagagaacaaagtgtttgtactaaaaggcaggaatctggggctcagtaggtgttgagtaactgaattgctatgaatgattttccgtcaaaatctaaataacattccagcctttgccagcttcataggggaattagatagtaggaatgcactgagtttgtgctcctgggaagactccacgattgggggaaggaaggcaacagaaatgagggcagggatgttgtttatctccgtccaagcacaggaggccccgggtgggatgacaggtgggatgacctccgtttactggtggcccaaaagcacacctatgccttcaggatgaagtgcgctctgctcctcacccaaaggtttatttctggaaacctttaactgaagtacatgcacattcagaagaatacatgtatcctgaacatacaactcactggactgtcacaaactgaccatacctatgcaaccagcaccaggtcaaaaagatattattttattttaattaatttattattattattttggagacagggtctggctctgtctcccaggccgaaatgctgtgtcatgatcttggctcaccgcaacctccacctcccgggttcaaatgattctcctgcctcagcctccsgagtagctgggattataggcgtccgccactatgcctgggctaatttttgtatttttagtagagacagggtttcgccacattgctcaggctggtctcgaactcctgacctcaagtgatccacctgcctcggcatcccaaaatgctgggattatagatgtgagccaccgcgcccagctaaaaagatattttaataatatgaatgcaactctgcatgtgcatgaaatgcaaaggtgacagggtgttatgaaaatgtctcccttccctctattttctagtcacccagatttcctattaagaaaaaaaaattgtcattagtttcttaaccaatgggttttaaaccagacttcctgacatctg

SEQ ID NO: 714335 - DNA, 1021 bp, Homo sapiens
agccgggcgtggtgacacaggaaatgcctgtaatcctagcacacaggaggctgaggcaggacaatcgcttgaacctgggaggcagaggttgcagtgagctgagattgcgccattgcactccagcctgggcaacgagtgaaactccatctcaaaaaaaaaaaaaaaatcctcctgccttggccttccaaagtgctggtactacgggcatgtgatgaagttttttatactataccccaaattgaagattttccaaaaaccattagtgactgaacatttttaagcagcaagaacagctcatgtcttcattcgttttgttccaaggatataataagcaaaacactgtgacaactaaggtgagaacagcttttctctttggtttgtggaaagtcttatattaccccaatacccaggcaggggtctcagccccctctgaaagcagaggatcctcacatcaagtccccagcgctccttctgcatctctcattcagaaaaaagaaaatcagaggagaatagcaagtctcttttgcagcacgattctcataatgtcatggttcaataagagtgtgaaattaaatgtacatttcaatatgtattttgcaatttcggtgacaactgaaataacatctatcttgcccgtttctccctttcccaagaggttcacaaaacagtgtattccaactaaatgatatctggctaatcgacatatttcctacatagacaaatgtttacaattagccaacctaactcaagattgagttgttctaataatcttagatagcctatgaattctaatcatcttccaaatagcctacgcatttttaatatcagtagtaagtacaacttccataaaatctccagctcaagctgacaytgattcgtggattctctgggatacttgtgctggacctcacagcaggatgagggcacctggaacacagagtcctacctcaggggtgctccacttcccttcatcaaagatatcccccaggatgaagacgacttccggctgcagcaaccacag

SEQ ID NO: 714336 - DNA, 573 bp, Homo sapiens
catcacaagatgtgccacgcaatgacaacaagatgctacacaatgcctggtgcctgggactggtcccctgggcaggggaggacacagatgtgggttggtggtcccatctcaccttcattgctgtgtaactttgagcctattgggtttcagcctcctctaggcagcagaggagcagagcagatttgtggctgtcaccctggggaaggatcaggtcctatctttccaactcacacctgcccctgcatggtccattgtttttttcaccaggaagctttttaaacaaattatttttaggccaggtgcactggctcacgcctgtaatcccagcactttgggaggccaaggcaggtggatcacctgaggtcaggagttcaagaccagcctggccaacatggtgcaactccatctctactaaaaatrgaaaaattagctgagcatgatggcgggcgcctgtaatctcagctactccggaggcagaggcaggagaatcgcttaaacctgggaggcagaggttgcagtgagctgagattgcaccactgcactccagcctgggcaacagagcaagattccatc

SEQ ID NO: 714337 - DNA, 1061 bp, Homo sapiens
ataatctgccctcatctccctgcttaaaacgctccctgacttctctttgctcctagaatgaagcccagtcttcttccctggctacagagtcctgccctctagcttgtaccactctctccttcacttaatatgcttcacccattctggtttcctttctgtttctttccaacttcaaagtcttgcacttgctgttccttccagtgttggtagagttgwctccttttgctttcaggttgaatgtcacatctcagcaaggctttccttcatcactctaaggggatattattctgtgtcacagcaccatttttatctccctcgtagcacttgcttaatctgtaaatatcttgattatttacccatttatttgttaattgattatcttactatattgtatgcaccttttttgttgtcttgtacactagggtatctctatatcagtgtttaacacatttctgctgaatgaatgaatgaatgattcctcctagcaacacaataggtagaccaggtattgtatgcttattttacagctgacaaaactgaaggttaaaataggtgattcttgctctaagtaacataggctggaagtagagcagccaggtatgctagatcatggacttttcccattagaccattttgccttgaagggagatggatggagggctgggaacccatcttggctgattcatagatagttccccaacatgggaccggatgacagagataacaagttcctgcctcttaaagaggtcatgctgccagtatgtgacagttccaaattccagactgcacctgacacattgcacacacccaataaacactccataatcataagaaaagttcagtggctgtttgagaaaggaaatcacacccatgggcctgacaggaggactgatctactaggaccctctgcagaggctgttctaatctgggcctgatgaaatgggaaagatgtttctaattcctttacacaaatgtgacctaatttggaagattttgtaattcctaaggtcccaactgctgcctgagagcagatcctgattattatcattttattattatta

SEQ ID NO: 714338 - DNA, 1061 bp, Homo sapiens
ataatctgccctcatctccctgcttaaaacgctccctgacttctctttgctcctagaatgaagcccagtcttcttccctggctacagagtcctgccctctagcttgtaccactctctccttcacttaatatgcttcacccattctggtttcctttctgtttctttccaacttcaaagtcttgcacttgctgttccttccagtgttggtagagttgactccttttgctttcaggttgaatgtcacatctcagcaaggctttccttcatcactctaagrggatattattctgtgtcacagcaccatttttatctccctcgtagcacttgcttaatctgtaaatatcttgattatttacccatttatttgttaattgattatcttactatattgtatgcaccttttttgttgtcttgtacactagggtatctctatatcagtgtttaacacatttctgctgaatgaatgaatgaatgattcctcctagcaacacaataggtagaccaggtattgtatgcttattttacagctgacaaaactgaaggttaaaataggtgattcttgctctaagtaacataggctggaagtagagcagccaggtatgctagatcatggacttttcccattagaccattttgccttgaagggagatggatggagggctgggaacccatcttggctgattcatagatagttccccaacatgggaccggatgacagagataacaagttcctgcctcttaaagaggtcatgctgccagtatgtgacagttccaaattccagactgcacctgacacattgcacacacccaataaacactccataatcataagaaaagttcagtggctgtttgagaaaggaaatcacacccatgggcctgacaggaggactgatctactaggaccctctgcagaggctgttctaatctgggcctgatgaaatgggaaagatgtttctaattcctttacacaaatgtgacctaatttggaagattttgtaattcctaaggtcccaactgctgcctgagagcagatcctgattattatcattttattattatta

SEQ ID NO: 714339 - DNA, 999 bp, Homo sapiens
acttaaccactggttgaaagtctgtatcaggtgtcccaaatcaaatgtattgattctagatgcctttttgtaaagaggcaataaaaagaaataccatttattttcacaattgttccttcctccctgtgtctaggaattacagagtcattgttattattcctcctstcattcgtagctccaagtacatagagagcagggcttgacacactttgtctgtaaagggtcagataccaaatattttagactctgtgggccatacggtctctgtccctgctactcggttctgctgttgtagcacaaaagcagccatagacaatatgtaaatgaatgagtgtggctgtgttccaattccacttttatttacaaaaacaggcagcaggcctgtgggccgtaagttgctatcccctgttatagacagtcctagtcgtcaacttgacgtctcaaagaaagcagcgatttcatagaactgaggatattttcaggatcagtaataaactttaggggcatggctatgctcatttgaaatagtcatccttttaatgtaggcacatgtcagaaaggtacattgtattgtctgatgccatccctccaagatatttggaaaaatcttttggagtaagtagctgcaaataataaggactagggagagttaagagcaggcataagcccctgtcagtcacataaggtttgttatagtgaataggcaaggaatgatcattttggggtcttgcttttttcttgggctgtggggtgctcttgctcaaggacaggtgctctgtgtggacgtggtagccacaagctagaggattgtacccacaaacgtgtgcaaaggcttgctcgtcatgcaacacttatctggccacattcctgaaagtggaaggccaaagtgggaacttttatgcagctttatgcgacgggtccttgactctgctcactcacatctataagctgagaatttggtggtaatcacttttctaaaagaggaaaaaatggatccac

SEQ ID NO: 714340 - DNA, 1251 bp, Homo sapiens
ttttcttaaacagcacgaggtttgtgggattctatagggttttgtacagcctgaccagcagttagccatctcccctccccttctcccggaagaaatgggtgttttgttctccactggcctctcctcgtgtgtttcttcttctgggaaaaaacccacaaccccaggttctgttgcccaagatgagactggatgaaaatcaagaggggttgctgacgagaccctggaatgcccagagaacagaggggtgggagcgagggaggcggygctggcctggggccatcttactcttcctttcttcctgacaggtgtgtagaatggcatctcctgccggcacgctgggggcctgggatacctctggcagacagtgctggaaatttaatgctccttgaaacaggagagcctgagaatgcttacaaaaatcatccttattaaagtttgaagggatgaagaaaagcgctaatgggagagaccctatacttacaaacccaccttgaaggggttaggggttacttcccacctgccagcaccttccctgctctgaggaaacaggaaacctgatggctgggggcttcagggctctggggacagctaccgtttgcggcctgtctgcctggctgatgtctgtgcctgtctgcagctgaaggcccacttaggacaacaaaatccagccaagccggctggctggggctgagtggggccttttggcttcaggtgactttgtggcttcggccttgggtaaagggagtggggggccatgtgtggagccctctggaaggtctggactcctgcttttccttggctcttctcgttctccaaccacccccaaggttcagcagagtcttgggcgcgtctcctccgtttgtgccgcgtgtttgtggcagcagctgttggtgctgactaataggacttcctggcagctgtgccgggcacacgtggcaccggcaggaactgcctctcctcggctgcccaatctgtaccccaaccaccaaagaaaggcctggaaaaggggctgagagaggctgcttgagtgggaaagccctagaacttggtgactcacagatccatagaacacggttggaagaaccaactcccatctgcagaggggagcactgggtgcctaggaggggtctctcaggtcgaagagcaagttaggggctgagctgacacgtaaaaccccatctcctccctgccccctgaatgtgtttgctctgcccgtgtgagacaggcttgtcagggggtcagcctgaaccg

SEQ ID NO: 714341 - DNA, 1251 bp, Homo sapiens
ttttcttaaacagcacgaggtttgtgggattctatagggttttgtacagcctgaccagcagttagccatctcccctccccttctcccggaagaaatgggtgttttgttctccactggcctctcctcgtgtgtttcttcttctgggaaaaaacccacaaccccaggttctgttgcccaagatgagactggatgaaaatcaagaggggttgctgacgagaccctggaatgcccagagaacagaggggtgggagcgagggaggcggtgctggcctggggccatcttactcttcctttcttcctgacaggtgtgtagaatggcatctcctgccggcacgctgggggcctgggatacctctggcagacagtgctggaaatttaatgctccttgaaacaggagagcctgagaatgcttacaaaaatcatccttattaaagtttgaaggsatgaagaaaagcgctaatgggagagaccctatacttacaaacccaccttgaaggggttaggggttacttcccacctgccagcaccttccctgctctgaggaaacaggaaacctgatggctgggggcttcagggctctggggacagctaccgtttgcggcctgtctgcctggctgatgtctgtgcctgtctgcagctgaaggcccacttaggacaacaaaatccagccaagccggctggctggggctgagtggggccttttggcttcaggtgactttgtggcttcggccttgggtaaagggagtggggggccatgtgtggagccctctggaaggtctggactcctgcttttccttggctcttctcgttctccaaccacccccaaggttcagcagagtcttgggcgcgtctcctccgtttgtgccgcgtgtttgtggcagcagctgttggtgctgactaataggacttcctggcagctgtgccgggcacacgtggcaccggcaggaactgcctctcctcggctgcccaatctgtaccccaaccaccaaagaaaggcctggaaaaggggctgagagaggctgcttgagtgggaaagccctagaacttggtgactcacagatccatagaacacggttggaagaaccaactcccatctgcagaggggagcactgggtgcctaggaggggtctctcaggtcgaagagcaagttaggggctgagctgacacgtaaaaccccatctcctccctgccccctgaatgtgtttgctctgcccgtgtgagacaggcttgtcagggggtcagcctgaaccg

SEQ ID NO: 714342 - DNA, 996 bp, Homo sapiens
caagcctgcattgagagggaaggcgtggggctggaccttccagcattgtgtatgtaggagtgggggtggtgggcagggtgagtaggacctttgtctgactaggaccaatagttttgaaatgacttgaaaaaaatttgatcttggggaatttccagcatgagtaaaacctagagacttctcagagttttgagaaagccaccccctgtcaagccagtcaccgcttctgtctctacagcctccctccccatggccccactgagactgcctcctgtccaggccctagtcacccacccactaaggctttgccccgccctcccagctggctgggtctcctccccaacagcccggggcttcttctgcctccccatgagcactgccttcacatgggggtgcctccatcagaatctccrgggtgttctcatacctggccttccagacccttccctgtccagtccaatcacaacctcagcttcatccattcagcagtgtgaacccactgctccagccccctgctctgcccctggccctggacagcacatctgctgtgcccagtccagagcactccccctctctaaatagttgagacctaccctccaacaccagttctgtgcattcattctctatattatccaaccagcatcgccctcttctttgtcatttgttcgacactttctggatccttagactggaacacttcagactgaagagtttacctgaattttgtcacccctaaagtgtctccaccttgtctactttcacatgtagtttggttcagtttaatgaacgtgtgtgtgtgtgtgtgtgtgtgtgtgtgtatgtgtgtgtgtgtgtgtgttttcaagaatattttctggactcacagtggttctgtctccttggttgatattttgggagatgaggtggggagttgaggaaggaaggaaggaaagaagtgacctggaggtagaaaaagagttggccagggcagtggctcacgcttgtattccggcattcggg

SEQ ID NO: 714343 - DNA, 1603 bp, Homo sapiens
tgacccgggctgcccgatgcccagccagaagcagaccagctgcagactctgtccacagggagggacgggtacggtcccctttcctctccaactccaaaagcagcttcagagcatgacatcacccaacacgggcggggggaccggaaggccccagagcagggactgtactcaccagcaacagggcttccagctggttaatgtagatctcttcgctggccaagaaccccgagagaaccagcttcctcatctccaggcctttccctgcttccacctgcacaaacgcaaagcacagccaacagctcatgagcaaggaggccaaaaccctgcgtggacggtctgcttccctgcccttcccccccgacctttattttttttttgagacgaagtctcgctctgtcacctaggctgaagtaaagtggcacaatctcggctcactgcaacctccgcctcccgggttccagtgattcccctgcctcagcctcccgagtagctgggattacaggcacctgccaccatgcccagataatttttgtatttttagtagagatggggtttcaccatgttggccaggctgatatagaactcctgacctcaggtgatccacccacctcagcctcccaaagtgctgggattacaggtgtgagccaccatgcccagccattatgccagactaattttttttgtatttttagtagagatggggtttcaccatgttggccaggctggtatagaactcctgacctcaggtgatccgtccgcctcagcctcccaaagtgctgggattacaggcgtgagccaccgcgcccggcccccctttcccctttccttttattttaagcgacactttcataggggataaaagtcagatattattataaaaaatatacaaaacatgcagaaatataaaaggaaaagacaatcacccatattcctcctgtaacatctcgttttgcttccctcaatctattttccacctgggttctcgaaccgacttttcctccctctcttcctctcctcctgcctgtcccacacaccagagctggattcaactcctaagagtgccaccttgcccgatgcttgccaaggaccgagtatgaataccgcaaaacgcgagtacttggggattccactgggctatgtgtccatttatttattcattcaataaatatttactgaatgtccaccaggccctatagataccatgggaaacagacagtggcccctgttctcaagtggcttagactctartgggaaagacatttattttttcttttttttttttttttagagacggagtctcgctctgtcgcccaggctagagtgcagtggcgcgatctcggctcactgcaagctccgcctcccgggttcacgccattctcctgcctcagcctcccgagtagctgggactacaggctcccgccaccacgcccagctaactttttgtatttttagtagagccgggatttcaccgtgttagccaggatggtctcgatctcctgacctcgtgatccgcccgccttggcctcccaaagtgctgggattacaggtgtgagccaccgcaccctgccggaaagacatttaaaaaacaagtaaagattcggcc

SEQ ID NO: 714344 - DNA, 594 bp, Homo sapiens
agctgaagacagaacctgtcacctcaagggattctcacagtgtcctttcagatttggtgttttccctgatagggagggaaccacgagtcagggtcctttagaggcttttcacaaagcctctcctatgataacctttggttttatagaagcaacatcgaattgtaaaatggtggagttaaagtaacaagcaactttaaaaggyaataaaataccaagattatacccttaatggaagtggcagacctaatgttgaggactactttaaagaagggttattttgttcttaacagataacatggagacagtgtaatactttcttaatgtgcaatgaggacctaattttgaggactactttaaagaagggttatttcgttcttaacagataacatggagacagtgtaatactttcttaatgtgcaatgactcgaatttattgctggagaaaaagcaccatcttaaacattgatctgaagcatcttatctcacatgctggaggtcttggagttgtgtgacttctgctgttctatgtaattactgacgtggcttgaggggaaagtgggactgctctagtggggagaacagatgcagaacctg

SEQ ID NO: 714345 - DNA, 606 bp, Homo sapiens
tctgagaatcccctaccaattttccaggagtgaacatgcccagacggtaccctctctgtgaagacttccytaagtttctcaggcagagtctgtcctttcccctactcggcttccacagtacctgcacctgcctatgattttctgcagtatactacattcattttcttgtctggttttctcattcacctttgcatcactgggacccagcacataacaggtactcaacaaatctttgctaaaacaatatacaggtcagaggagaagaagaaaaatcatagagaacaaaaacagaatcagacagtgagaagctaaaaatgaaatggaaagggaagtgactaagaaaagaaagaattagacataaaacggagtggccaaattagtctctttaggagtcaggcagcaaagaacagaaccgacaaagaattgaggaagtgatgtgaacagcaaactgagctaaactttcatgtgggtgatttgtcccttctgatatgataatttctggtattttctcatttttctttaccgctgaatttctctattgaaagatgatctatatgaaaacaaaactggaattaatcaaaatgttcaatagtaatggaattgctt

SEQ ID NO: 714346 - DNA, 597 bp, Homo sapiens
tctgttgtgtctaatttgctattgagcccaaccaatgaattcttcatttcagaaactttatctttcattctagaatgtccatttggattttgtttagttcccagttctatgccaaagttctaattcatgtcttttatttctatgaatgcactaggcacagttattttaatgtctgtgtctgatagctctaatgtttgtatctgccgtaggtctgttcttggtattgtcttgtccctctgttgcctggttatttttcaccatatactagacaatgtattcaacagtcgtagaaataaattgatttctaagatgatgttattttcctccagagaaaatttatgttttctaatgcatggtgcctgtggggcagtaacaatctagaatcacctcaatycaatctgagataatttggagctgagtggagtccctgagaaggcctatttacatccaggtcacctgtacttccagagtgcaatcttttaggagctcaattaaaagtgaagaaagttcaccaggacaattcccccactttagcaacccgtgaattccagcctctgtcctctgttctgaaaaggctgtcagaagtgctgctcatct

SEQ ID NO: 714347 - DNA, 1485 bp, Homo sapiens
tgaaccatgaagaatttggccaagaggttgccagtcagataaggctttctctgttggcttccacctcacggctatttgcagggggtgttgttaggagcctcaagaggtgtgcatagggtagaggaggatcttaaggatctacctcagcggtagctctcccctgtctctccaaccaaacattcattcatggagatcaaaggagaacatgaaatgctggtctgtgtatcacttcaactttgtgaatcctagagactgagcttcaaggagtatggtcttgagatcataaagaatgcctcaggctgaggctgggagatggagcaatgcccccaaaccagttgttgcctctgtctgctttctgggcgggaagggagagaggaagacagtgagggacctcattgatccacccttccatttactaaacattcatggagtgcctggcagcccctgtgctggggatactgagctgactgctgctgctgctgctgctgctattactactactactactgtttgttatgaatgataataataccacctgccattcattaagaatcagatactctgataaggagatatatgcattaacccattttcctttacagccttctaaagtaggtgctagcagtaacccctttcacagatggacaaattgagattaagagaatttaagtaatttacccagagttgcagaatttgatagtgttagacagagttaaggttttagcccatgaatatggctttaaagtctgtgcttttaacttttcctctgcagaacatctctagtttgtctcaaggtatggtccctgctctcaagggctcataacctagtgggggatatgggtgtgcayatgaatcaaagaattctgtatgaaagggccagtggaggcatacatgatcaatgatggcagaaatagggagaaacataattaacataattctactgagactggagttgggagatgatccaactgggaagacttcctgtaagaggtgatatttgagctcacccttgaacattctaggaaagatgacaaacatacgtagtcacaggcccagactgggagaaagtctgcagtgttcagaagcccccagaaatctggtgcacttgatgtgtagagcactggtgtatgtgccaggtgaagttgagacggcctggagagatggacagtatgttgtcttggacagtattctgcaaaaacaaaaatcctggagagtaatgagtaagggattaaaataatggactatgttttatctatggccggaaaggagactgggcagaccagaggggaggggctcatccagggagaagtaagaaaggccagaggggaaagagtgcaggcagagggtctcattctttatccctggacagctggtctgtctccatgtagatgtcccctccctggcctttaaaggctgagttctcagacagaccctgtgcgacactctgatacactttgacatgagcttattggccagtttctgaat

SEQ ID NO: 714348 - DNA, 1485 bp, Homo sapiens
tgaaccatgaagaatttggccaagaggttgccagtcagataaggctttctctgttggcttccacctcacggctatttgcagggggtgttgttaggagcctcaagaggtgtgcatagggtagaggaggatcttaaggatctacctcagcggtagctctcccctgtctctccaaccaaacattcattcatggagatcaaaggagaacatgaaatgctggtctgtgtatcacttcaactttgtgaatcctagagactgagcttcaaggagtatggtcttgagatcataaagaatgcctcaggctgaggctgggagatggagcaatgcccccaaaccagttgttgcctctgtctgctttctgggcgggaagggagagaggaagacagtgagggacctcattgatccacccttccatttactaaacattcatggagtgcctggcagcccctgtgctggggatactgagctgactgctgctgctgctgctgctgctattactactactactactgtttgttatgaatgataataataccacctgccattcattaagaatcagatactctgataaggagatatatgcattaacccattttcctttacagccttctaaagtaggtgctagcagtaacccctttcacagatggacaaattgagattaagagaatttaagtaatttacccagagttgcagaatttgatagtgttagacagagttaaggttttagcccatgaatatggctttaaagtctgtgcttttaacttttcctctgcagaacatctctagtttgtctcaaggtatggtccctgctctcaagggctcataacctagtgggggatatgggtgtgcatatgaatcaaagaattctgtatgaaagggccagtggaggcatacatgatcaatgatggcagaaatagggagaaacataattaacataattctactgagactggagttgggagatgatccaactgggaagacttcctgtaagaggtgatatttgagctcacccttgaacattctaggaaagatgacaaacatacgtagtcacaggcccagactgggagaaagtctgcagtgttcagaagcccccagaaatctggtgcacttgatgtgtagagcactggtgtatgtgccaggtgaagttgagacrgcctggagagatggacagtatgttgtcttggacagtattctgcaaaaacaaaaatcctggagagtaatgagtaagggattaaaataatggactatgttttatctatggccggaaaggagactgggcagaccagaggggaggggctcatccagggagaagtaagaaaggccagaggggaaagagtgcaggcagagggtctcattctttatccctggacagctggtctgtctccatgtagatgtcccctccctggcctttaaaggctgagttctcagacagaccctgtgcgacactctgatacactttgacatgagcttattggccagtttctgaat

SEQ ID NO: 714349 - DNA, 978 bp, Homo sapiens
cctccggctgcccaggctcctccggctcatcgtcatccagcttccttctccagaaacaaccactgttaccaattgttatgtgttttttcagaaatatactgtgcgtgcaagcatctctctctgtctgttgatctgtcctttatttaacacaaatgtgagcataccatgtgccctgatccttgcctcccctcccctcccctcatcccaacctaactacgtagcttggaaggtgtttctgaggaaaagttctccattgggcgatatctgacaatgaaatgggctaacgagctctcaacactggggatgtggaggcacaggctagatgaccacttggggaaagaaaaatgggagagttgggcccttccttggaggaggaaggttagactcatgccgtctaaggccctttccatgaaccagctgcttggatacaaagagaacagctctctttatcttgcgttcttcccatttttccccactccctcccagcgccccacaagctgggccagggtcaccagtgtttaaagccgcccagccttggcttccagcccttgtgtaattgacaagaattccccccctccctaagagatggccttctctctgtgccagccacatgccactaaactccaaattaagaggcccagctgagatttctgtcttattccacccatactcctggggccaatcctctctcatttcaggaggggaatggaactcagagtttggatttgggaaggggggtagagggggctcgccaccaaagctggtgcctctatgctccagagagatgtgcgtgtcctaccatgcggcttaagacttctccaaaacaccgtccccccaaatccaataaaattgcaaatttcactgtatttcacaatatcctaaataaacatgaacagcatgcgtttctcttccttgcatcaaatattaatctgcccgtggccagcgcccgctcccccgcgtgtgtgcgcacsctgggta

SEQ ID NO: 714350 - DNA, 580 bp, Homo sapiens
agtctgaataggttcaaatggtatattagtccattctgttttcacactattataaagaacttactgagaccgggtcatttataaagggaataggtttaattgactcacagttctgcatggctggggaggcctcaggaaacttaaaattatgctggaaggtgaaggggaagcaaggaccttctttacatggtgaggagagacacgtgcaagcatggaaatgccagatgcttataaaaccatcagatctcatgagaactcactatcatgagaacagcatggggggaaactgcccccagatccaattacctccctccctcgacacatgggaattacaatttgagatgagatttgggtagggacacagagccaaaccatatcaaatgcgaaatrttacgtatccctaaagagaagcttaagtttccagaagttctaatataataggatgctgagttttaataatattacattggtgtgattattaattttagtgtcaactgggccacagggtgcccagataattggtgaaatgttatttctgcgtgtgtgtgtaagggtgattctggatgagactaacatttga

SEQ ID NO: 714351 - DNA, 594 bp, Homo sapiens
cggataagaaacttgcccaaagctacacagctgatggtggagagcactgttagtcacaattcctgctcttcgaagaacaggacccattcttttattccttccttttgtgccatggagaacacaggctgtggacccactgatgtacttgttaggcaaccactttgaccggtaatttttctctccctcctatttgatggsagtagaggtcagttaggtggctaagagattggtccaagtctaacatcaatcagaacaaggacatggtacaacgagagcgttgaatgagtttatgttatactttcaagtgctactcaggttgtttgatggggctgggtaggtaggaagaagaatgtctatgatgcaaggagtaggacgctcatggggccatgagaccagggcagggcttggtgtatgagcacatggcagaacatgtgaccatatttcaacccatctgagatgcggagactcctgtccatgcatcattcttcctcagtgtctttgccatgtatctttccagggttggaattggaatgcaaggcacggaacagcagagagcagggtccgcactataatcgtgtgggtaggcattccaca

SEQ ID NO: 714352 - DNA, 2124 bp, Homo sapiens
caaacttcaggcagtatgattcagcattgttcctccttctcccatactccaaatacacagaaatggccaggcacagtggcatatgcctgtaacgccagcactttgggagtcgaagttgggaggatgacttgagcccaggagttcaagaccagcctgggcaacatagtgagtccctatctttacagaaaattttataaaattagctaggcatgatggcatgtgcctgtagtcccagctactcgggaggctgaggcaggaggattgactgagccaaggaggtggaggctacagtgagccatgatcaatcacaccactacactcgagcctgagtgacaaagtgagactctgtctcagaaaaaaaaaaaaacagaaatgctaaataaaaacataacaataaatgaaaaatccatgctagagtttgagaagaagaagggggaaawctccaggtacccgaatttagtagaatactaaaagctgaatggaaaatgcacaaattaaattgttgttggccaaggacatatgagatcctagattaagatcctaaaggctgtggtattaatgtccatacagaatatggtatttggcctttgtctcacttgaggcagggagttggaaccgaggtccttgtataaaaatgataccagtaaccccggtaaccccttggttaaaggagaactagaacattctgcccacagaagcaggaaatgacagtgtcttgtcatctacctggggttctgagtaccggaaaaaaacaattcctgagtttgaaaacaaataccaagtttgtgctgcagatgagtgacagttccaagtttatgctatccacattgtatgggaacccacagccaaaaaattaaagtcatacttaatctgtaaaaggagaatctctaaagcactccaagaagtagaatgcaaaaccacacatcagaaatacgcccaccaaccaggtcaagagagactgtgacatttggggagatgggtggggatggagaggtcactaaatcacaaccaaaagcaataaaccagccaggcgcagtggctcccacctgtaaccccaacactttggaaggacgaagcaggtgggtcacttgaggtcaggagttcaagaccaccttgaccaacgtggtgaaaccccgtcttgactgaaaatgcaaaaattagctgggcgtgacggcaggcacctgtagtcccagctacttgggaggctgaagcaggagaattgtgtgaacccatgtggtagaggttgcgctgagccgagatcatgccactgcatgccagcctgggcaacatagcaagactccttctcaaaaacaacaacaacaacaagccatatgagaaaatgtcccattttaaggaagagtcaacaactgaacataataaaacagaaagctcttattaaaaaaacagcatgtttgagatgacttggtaacaaaagaataaatccaataacaaaagatcaaaatagtatgcacaaagaaaaggaggatgtgaaccccaaagtacggaatgtctataaaagaaaaccatagcaatgaagttaaaaactcaatggtcagattaaatatagtaatcagggtttcataggaaattagtcaattggatgaaaagataaaaagcaagacagaaaagatagcataggaagagatgaagatacgaaaagaggttaaaaaacatgttgacagaaagcatagacaatagaatgagaaggttgaacaaccgcctataataagtttcagaagtttcagaagcagcgaataaaactaatgatgggtcactttcaagaactgaaagatggctgtgaaacctcaaagaatcactctgggcctggcacgatggctcatgcctgtgatggctcatgcctggcacaatggctcatgcctgtaatcccagcactttgggaggccaaggcggatggatcatgaggtcaggagttcaagatcagcctggccaatatggtaaaactccatctctaccaaaaatacaaaaattagccaggcatggtagcttgtgcctatagtcccagctactcaggaggctgaagcagaagaattacttgagcccgggaggcggaggttgcagtgagctaatatcatgccactgcactccagcctgggcaacagagca

SEQ ID NO: 714353 - DNA, 2124 bp, Homo sapiens
caaacttcaggcagtatgattcagcattgttcctccttctcccatactccaaatacacagaaatggccaggcacagtggcatatgcctgtaacgccagcactttgggagtcgaagttgggaggatgacttgagcccaggagttcaagaccagcctgggcaacatagtgagtccctatctttacagaaaattttataaaattagctaggcatgatggcatgtgcctgtagtcccagctactcgggaggctgaggcaggaggattgactgagccaaggaggtggaggctacagtgagccatgatcaatcacaccactacactcgagcctgagtgacaaagtgagactctgtctcagaaaaaaaaaaaaacagaaatgctaaataaaaacataacaataaatgaaaaatccatgctagagtttgagaagaagaagggggaaaactccaggtacccgaatttagtagaatactaaaagctgaatggaaaatgcacaaaytaaattgttgttggccaaggacatatgagatcctagattaagatcctaaaggctgtggtattaatgtccatacagaatatggtatttggcctttgtctcacttgaggcagggagttggaaccgaggtccttgtataaaaatgataccagtaaccccggtaaccccttggttaaaggagaactagaacattctgcccacagaagcaggaaatgacagtgtcttgtcatctacctggggttctgagtaccggaaaaaaacaattcctgagtttgaaaacaaataccaagtttgtgctgcagatgagtgacagttccaagtttatgctatccacattgtatgggaacccacagccaaaaaattaaagtcatacttaatctgtaaaaggagaatctctaaagcactccaagaagtagaatgcaaaaccacacatcagaaatacgcccaccaaccaggtcaagagagactgtgacatttggggagatgggtggggatggagaggtcactaaatcacaaccaaaagcaataaaccagccaggcgcagtggctcccacctgtaaccccaacactttggaaggacgaagcaggtgggtcacttgaggtcaggagttcaagaccaccttgaccaacgtggtgaaaccccgtcttgactgaaaatgcaaaaattagctgggcgtgacggcaggcacctgtagtcccagctacttgggaggctgaagcaggagaattgtgtgaacccatgtggtagaggttgcgctgagccgagatcatgccactgcatgccagcctgggcaacatagcaagactccttctcaaaaacaacaacaacaacaagccatatgagaaaatgtcccattttaaggaagagtcaacaactgaacataataaaacagaaagctcttattaaaaaaacagcatgtttgagatgacttggtaacaaaagaataaatccaataacaaaagatcaaaatagtatgcacaaagaaaaggaggatgtgaaccccaaagtacggaatgtctataaaagaaaaccatagcaatgaagttaaaaactcaatggtcagattaaatatagtaatcagggtttcataggaaattagtcaattggatgaaaagataaaaagcaagacagaaaagatagcataggaagagatgaagatacgaaaagaggttaaaaaacatgttgacagaaagcatagacaatagaatgagaaggttgaacaaccgcctataataagtttcagaagtttcagaagcagcgaataaaactaatgatgggtcactttcaagaactgaaagatggctgtgaaacctcaaagaatcactctgggcctggcacgatggctcatgcctgtgatggctcatgcctggcacaatggctcatgcctgtaatcccagcactttgggaggccaaggcggatggatcatgaggtcaggagttcaagatcagcctggccaatatggtaaaactccatctctaccaaaaatacaaaaattagccaggcatggtagcttgtgcctatagtcccagctactcaggaggctgaagcagaagaattacttgagcccgggaggcggaggttgcagtgagctaatatcatgccactgcactccagcctgggcaacagagca

SEQ ID NO: 714354 - DNA, 632 bp, Homo sapiens
ggtgggaaggtaccaaaaatttactgcctgcttctaggctgcatctcaactgagtctttaaagtgagcatggccactcccgtgggaggtggtgagtgagtggccratcctaaggagagggaagaggatgggcaggaagatggtttgagttcttgagttccaattttatcttctgctgaatccttcattttccttcctcaactgatactattcctagtttgacaaataatatagcttttcaaattctggttggcttcagacaaccagatatgcaacacttttggatttccttctgggataaaaaaagagacctctaaggaaagctatgttttcttccttcttttccttcagctaagtgtgtctctttactgtagctccttcctgaaggctaaggatgcatataatatcctgagattttcccactaatgatgcagttccactcactgatgcaaagacacgcattctttttttttttttttttttttttgagacagagtctgtctctgtcgcccaggctggagtgcagtggtgtgatctctgctctctgcaacctccgcctcccaggttcaagcgattctcctgcctcagcctcccgattacaggggcgtgccaccacgcccagctaaaaaaaag

SEQ ID NO: 714355 - DNA, 632 bp, Homo sapiens
ggtgggaaggtaccaaaaatttactgcctgcttctaggctgcatctcaactgagtctttaaagtgagcatggccactcccgtgggaggtggtgagtgagtggccaatcctaaggagagggaagaggatgggcaggaagrtggtttgagttcttgagttccaattttatcttctgctgaatccttcattttccttcctcaactgatactattcctagtttgacaaataatatagcttttcaaattctggttggcttcagacaaccagatatgcaacacttttggatttccttctgggataaaaaaagagacctctaaggaaagctatgttttcttccttcttttccttcagctaagtgtgtctctttactgtagctccttcctgaaggctaaggatgcatataatatcctgagattttcccactaatgatgcagttccactcactgatgcaaagacacgcattctttttttttttttttttttttttgagacagagtctgtctctgtcgcccaggctggagtgcagtggtgtgatctctgctctctgcaacctccgcctcccaggttcaagcgattctcctgcctcagcctcccgattacaggggcgtgccaccacgcccagctaaaaaaaag

SEQ ID NO: 714356 - DNA, 632 bp, Homo sapiens
ggtgggaaggtaccaaaaatttactgcctgcttctaggctgcatctcaactgagtctttaaagtgagcatggccactcccgtgggaggtggtgagtgagtggccaatcctaaggagagggaagaggatgggcaggaagatggtttgagttcttgagttccaattttatcttctgctgaatccttcattttccttcctcaactgatactattcctagtttgacaaataatatagcttttcaaattctggttggcttcagacaaccagatatgcaacacttttggatttccttctgggataaaaaaagagacctctaaggaaagctatgttttcttccttcttttccttcagctaagtgtgtctctttactgtagctccttcctgaaggctaaggatgcatataatatcctgagwttttcccactaatgatgcagttccactcactgatgcaaagacacgcattctttttttttttttttttttttttgagacagagtctgtctctgtcgcccaggctggagtgcagtggtgtgatctctgctctctgcaacctccgcctcccaggttcaagcgattctcctgcctcagcctcccgattacaggggcgtgccaccacgcccagctaaaaaaaag

SEQ ID NO: 714357 - DNA, 664 bp, Homo sapiens
tgttaggaatgtggtagaacttttttttttttaaagcaaagacatgattcccataaatgtcagggttatggttacctttagtgaaaaggaagagagctgtgatcagtaaggggtgcgtggaaggcacttggagtctggcaacattttatttcttgatcggtaactcagctacagtaattatttcaataatacatttatgttttatgtgcttttatatatgtgtgttatacttcaaactttttttaagtttaaaaagaaactaaatagagtccaaggcaggcagatcacttgagaccaggagttcgagaccagcctggccaacatggcaaaacccccatctctactaaaaatacaaaaaattagccaggcatggtggygcacgcctatagccccagctactggggaggctgaggcacaagaattgcttgaacagaggaggcagtggttgcagtgagctgagatcacgccactgtactacaaactgggtaacagagcgagactctgtctcaaaaacaacaacaacgacaacaaaaaaccactaaatggatgactaaaaagagatctaggcataggtaacaagagaattatggttggaggagagttatgatgaaattttccagtagattgcacaagcagataaaaaggtaggaaatattagaggcta

SEQ ID NO: 714358 - DNA, 1154 bp, Homo sapiens
ccccttatcagttaggcacaaaaaggccaatccaggctgagtctcctgctcattccttggcgccaccggctctaactgaaggtggcggcttcgggtttgcagcccatggcttgccctaagttccgacaagtgcgcctaacgcggggccggcycctgggggcgggaggggctggaccaggccgggcagctaggcaagcaggggcggggaaggggaaccggccaagcagggcaagggacaggcaccgagctgcgagcttcgaactgctccgggcagggcggcgcccgcggggacacatttctgtcggagtgagcagctacggtttgggatatgaaatcgcccggggagcggtggaattcaaagaatctgcgtttctctctgccgcgtcctgcagaggagagaggggagggagaggaaaaaaagggagaatcttctctgcttcgatctgcttttgcagctttggcttattctcaggctttctctgatatttaactttcacctaaatgggtttctttctcattctctccgaatctctgtctccaattttctttcaatcttctggtattttttcgtatttagacgtttactgaactatttatccaaccctgtattacttaagccatgcattggttagaagctcgaaataatcacatggaaattcgagtgttttttctattagaccccaaaaggatacatctggtttgggggagttttattttgtctttctttttaatccgcttggctgtgttctgtggacctagttgagatcggattgtggttttgcagatgttgattatctcaccaatggccagcattgcttctcggccttctctggagggagcttctgagtttgcaccataaatataatttcaccccccaataagataattcttcaagggttttttccctcaatcctagccccctcaggaggcaacctactgcgggcctctgcactgctatctgatggtcccaggggcaggcttggccggttctggggtgcagttgtctcctccgcagtgagaattaggcccctctcagcccagtcaagccctgttaggggtccaaagcttcccactgcaaagactccaggaggcccccagaagctcctcagttccccggaaatgacagcagaagagtagttcgcccccagattttc

SEQ ID NO: 714359 - DNA, 1100 bp, Homo sapiens
tccttcctttgcccttttaatagccttccgttctttgaaatttgggcccagcatcagactggagagaaaaatatcctctctgtcaaaaacttttctacagtctcattgtagagagcagttgtggcttcccctgcctggcacccagtctccctttttctggtaagagcagccaagtttcctttgaaaaatcacttcccccaaccttcagtctaggtgacggatgtggggctgaccctgcagagctgattctatacccctgcttctcaccccaggggtaggcatctgggccatagttgctgattagtgcagtccatgacctcagacaggcacagtgtggtggggtggggctgtgtgtcctcaggggctcaccttatttctgtgcctcagtctcttcacaygggcatgtggcgtgccagtccaatgggaatctttgctaggattttgttgggactactgagaaagtggttctctcttttcctctctctggtgggggtggtgtgctatgggatatggggttggacctcttagtagaaggaagatctgatgagtccagagacagatttttctcagcattgtgtgaaggcctgggcctggctgtggctgtggtcaccactcccctgggctttccagtagcatgcaccagtcattcccttttgtgggaagatcagggttttgtttttgtttttgtttttgagacggagtctcgcactgtcggctgggctggagtgcagtggcgtgaactcggctcactgcaacctctgcctcccaggaagcaattctccttgcctcagcctcccagtagctgggattgcaggtgcctgccaccactcctggctattttttttttttttttttagtagagatgggatttcactatgctggccaggcgggtctcgaattcctaacctcgtgatctgcctgccttggcctcccaaagtgcagggattataggcgtgagccaccgtgctccgtcgaagatcagttttaaatggggtcaggacaggggtggggcagcagagtaaaacgagtgagaattgtttgaatatcttcagactttagcatcttctggcttttctctcctcttttaactcatgagacac

SEQ ID NO: 714360 - DNA, 1580 bp, Homo sapiens
tgggccatgcctgggtaaacttagacatttttccacgagccgggtttctgccccacgttctcaggacttcagagggaaggctgtaagtggcagcggtttctgacctggctgtacatttgaatcatttggggagctttaaattctactcctgccaggtccccccaccctyagagattccgattcagctcatctgtgtgggaaggacctgggcaggtgcatttaaaaattcctcaggtgattctactatacacccacggtgagaaacagtacacagtcgacacgctcctcagtttacaatggggttatgtctcaataaacacatcgcaagttggaaatatcattaagtcaagaatgcatttaatatatctaactttctgaacatcacagcctaggctagcctaccttaaatgtattcagaacacttgcattagcctatagcagggcaaaatcatctaacacaaagcctattttataataaagtgttgaatattttgtgtaattgattgaatactgtacttagtgaaaaacagaacggctgtatcggtacctgaagtagggtttctaccgagcgtgttctgcttttgaaccatggtgaagttgaaaaatcaagtggaaccgtcgtaagtcagggaccatctgcacagcacagtgtttctcaagctgtactgtgcccatcaccacctgagacactgttcagctgtagactctgactcactagggtctgggacccagaacctgcatttccaacgggcccccaggtgacactgatgcactgcgtagaccacaccttaaccacccagattttagagggtgaaaaacttattattgtagaccctgtgtatctctaattctccagatatatcgcttaataagttatctgtcttctagctccatctgtatttcaatttttctaaataaaaagaagaggtcatttcccctcggttcatagaacgaaccgcaagctggctaactgaaagatatctgagccacactctcgacagaggcttcttcctgcttttacctccctggttaggtggtttttctaattacttggatggttcatatgttcacctctcgaggaagaattcaccagaagtgaacaaggctctcacactttaatcacgtgtaaacactgcaccctaggtttatttcctaaatggtcttcctgacactacaaaatggcttaagtgggaaagcacattcgtttgctccttcagcaccactaccacagtaataaagacaagaacgaaagaaagaaataaaaattcatctcccaacccatctgtagaaccttaccggcgacttcttgatgtcagagacagcataattcccttgtgatatccatctggcagattcagttaaagacaagccggttccataaaggttgatgctaaaacgaccctggaaaacacgaccaacaaaagagattttcagtccatgtgatgtcctcaaaaaagcaaaggcaaaggtgatacaataaaaggtactttggaaaagagaaggatgttgattaattgtgatagctactaattattgatagtatttagttttgtttgttcagggccagccattcttcatgc

SEQ ID NO: 714361 - DNA, 621 bp, Homo sapiens
tcccgggaaggtggggaggggaggagagccgtcaaaaacagctcctttacactgcgctttcttttcccacggcccgactgcccgcatgtcgggccaggacaggagcaccaggccacctgggtggggagcttggctctcttgcttccctggtggaggacgtggacaagttaactcagcctatgggcagctgtctttcctcacctgtaaaatgagtctaataatagtgcacacctcactcagttacgacaaggctgcaaacaagaaaacagggaaaagaggcccagcacagggccgggaacgcactagactgaacgtgaatacaccggtgttgtccagcggkgctgagtgctgggggctggtggccagagcaacagaagtcctgagtcaggacagctacctaatgtgacagcccagggcacattgcaaacacaagccttttgttccacaggcaggagagaggtacccaaacataaagccccaccccacttctgtggcccctcttgtgctgtgtatttgctatttaatgctatgctaccttgggcatggagctactggagaggagcacggaggccctcaaggcacccaggagccttcccctgcagtgtggcccaccagtgccca

SEQ ID NO: 714362 - DNA, 677 bp, Homo sapiens
catatacaattaagctaggtctctccccaaaaaatcaagtgacctacataacatcactaagaagttattatttcttagggggtcctgtggcctccactccaaagccagtgttcaaacagaattgcatgggactctactggtagaagctcctttatctgtccaaagtggaggacctatgttgcaatgcaaagcatagttgagtttatggcaaactgatttaaaataatcttttttatttagtaagttttaattaatagttacctttccttttgccaaaatgaaaaaggtacttccttcctcgccctctctaatgatgtaatctcctttgtcatagtattcctgttgggatgagagagaaagaaaatgtaagagcgggtggagccaagatggcctaataggaacagctccagtatacagctcccagcgtgagcggcgcagaagacgggtgatttctgtatttccatctgaggtaccgggttcatctcactagggagtgccagacagtgggcacaggtcagtgggtgcgckcaccgtgcgcgagccgaagcagggcgaggcattgcctcactcagcaagcacaaggggtcagggagttccctttcctagtcaaagaaaggggtgatggacagcacctggaaaatcgggtcactctcacccgaatatcgcgcttttgggac

SEQ ID NO: 714363 - DNA, 615 bp, Homo sapiens
ggattaaacagatgttgggggaccctgatgactcgcattttattataaaatatatataaaatataaaatattctctggccattcctggctatagatctcaaaaaagaaagaaagaaagaaagaaacctgtcacacataactgcactttaaaatctacaactaacaaatacctctagggagagtcagcagaaagaagacaaatcattttaaagtgagactttaatgaaaagaaacacttttagttaaaggatagatacaagaaatgtacctttcacaaagaacggacttccaaagtgtctgaaaatcgaaacgtttcatccttgtcttcagatctgttccccttcttgagaattgtattgcaatttaaactctasaaagaggcgacaggagctgagctgctcaggcttatggaaagaaaagggaggttctgtggaaactgaatgctgctcactaggaggcaaaggccagtggtgatgtttctctcttatccagcaagcaagaaaaagaaagaccactgtccactgtcttctcaatgacgctatttctactacagtccttcctgggtatctagcaaggaatgggcagtgtccagaatgtttttgagaaaagaaaaaa

SEQ ID NO: 714364 - DNA, 606 bp, Homo sapiens
attcagaaatgcaggtttcttccatcttagggctgtgtcaacttccaattggctatgttcattaacaagccagaaagagtgcataaagatcagctgcaaacaatttttacagttcaggtctgatagtggtaaacatcacttttgctcacatttcactatctagaactatgccacaaggtsacaactaaccagaaagaagtctgagatatactgtctagctctgtaaccagaagagataaaaagccatattacctattaatttaggtcttttaaacatctttccataaatttttacgtttctcaataaagcttttatacacttttgttagagttagctctagatacatatttccgtgctttttgtaaatggcatttttatgcctatgtatcaactatgtttctggtatttaaaaatacactaagttattgtattattaatcttacatccacaactatactaaactctctatttgaatcttttttttaacttttattttaggtccatgtatacatgtgcaggtttgttatataagtaaattgtgagtcacaggggtttggtgtacagattatctcatcatccaggtaataagcatagtacctgatagg

SEQ ID NO: 714365 - DNA, 606 bp, Homo sapiens
attcagaaatgcaggtttcttccatcttagggctgtgtcaacttccaattggctatgttcattaacaagccagaaagagtgcataaagatcagctgcaaacaatttttacagttcaggtctgatagtggtaaacatcacttttgctcacatttcactatctagaactatgccacaaggtcacaactaaccagaaagaagtctgagatatactgtctagctctgtaaccagaagagakaaaaagccatattacctattaatttaggtcttttaaacatctttccataaatttttacgtttctcaataaagcttttatacacttttgttagagttagctctagatacatatttccgtgctttttgtaaatggcatttttatgcctatgtatcaactatgtttctggtatttaaaaatacactaagttattgtattattaatcttacatccacaactatactaaactctctatttgaatcttttttttaacttttattttaggtccatgtatacatgtgcaggtttgttatataagtaaattgtgagtcacaggggtttggtgtacagattatctcatcatccaggtaataagcatagtacctgatagg

SEQ ID NO: 714366 - DNA, 606 bp, Homo sapiens
attcagaaatgcaggtttcttccatcttagggctgtgtcaacttccaattggctatgttcattaacaagccagaaagagtgcataaagatcagctgcaaacaatttttacagttcaggtctgatagtggtaaacatcacttttgctcacatttcactatctagaactatgccacaaggtcacaactaaccagaaagaagtctgagatatactgtctagctctgtaaccagaagagataaaaagccatattacctattaatttaggtcttttaaacatctttccataaatttttaygtttctcaataaagcttttatacacttttgttagagttagctctagatacatatttccgtgctttttgtaaatggcatttttatgcctatgtatcaactatgtttctggtatttaaaaatacactaagttattgtattattaatcttacatccacaactatactaaactctctatttgaatcttttttttaacttttattttaggtccatgtatacatgtgcaggtttgttatataagtaaattgtgagtcacaggggtttggtgtacagattatctcatcatccaggtaataagcatagtacctgatagg

SEQ ID NO: 714367 - DNA, 2623 bp, Homo sapiens
tcaaccggttcagagttagatttgaaggactgtaaaactgagtgtaaggagttttaatatacagagaagtgattctaaagagatgatatagtcaactggtaaatattatgacctcaatttgttttagactgattacaatgggaaaagtactgttttgaaagcccatatataaaatcaatatattattttcaaatgctgaactaagaaaaatagcaataccattataaaaaataaagttggtaaaacacctaccttaataccacaaggttctgaaataagagtcttcggatctaaaacttccacaacagcttctggaataactgctttcttcatgcaggacatcttgaagccatagacatcatcccaaaaagcaattctatcagcatgtttattcacatcactcactgctacaaggctgatagtgcaaatgtcagggtagactgtaacaaacaaaatgcccaacaattaagcattatctccctttcttatggaatataattttttaaagcctaaatataaatatcaaatccatcagtaaggattactagcaatgggagattaatgaaggtatagatcaggaaaaacaaccatgcttcatcttgtagcctcttttaaaaacagatacgcattatcatgatgataaaattaaaacagggattccaatgatagggtttgaattaaaatagggttatataattaaacaattctgaaataaacatatttattgatattaaaacttaaagtatgctaacttaaaaggtactagatctttacttattcctatattcctctaaaaacatgcagaaaaggacaaatcatttaaaaagatatgtagcatgtaagaaaatcatgtaatagggttttatagttatacagaagaccacttcatattactctcatttaatagaaaaatatttataagcataaagtatgtgccagacacatgtgccagtctaatttacagactatggacacatatcactatcctcaataaacttatatttagactattttgaaaaagaaatgcatagttatttgtgaggtaataaatactaagaacaggagcatccaaggtactaagggagctcatggcaaaaccagctaattcagacttggctggagcaggggagaagggataatatataagataagaactgaagcccagtaagttgggagtggggagggaaagtgtattctaggcaaagtgagcagcagtgtgcataaagggtcacaatagatgggatggcccatatacaatctaattgagagagaaataagacacaaggctagaaaggtaagtagagaccaaagactacatgctgagtaaaccaaattagtaaactggacttaattctaagaataatgataatccagtaaaaaattttacatagggtagcaacatgactagattttgattttagacaaaccacctggaatgcaatgtggagaataatgggagggtctaagatgaaaacagagacaaattaagagatagttaaaataaaccaggtgatctgaactaggatattgctgtgggaatggaaaggatgagatgtattcaagggatatttatgaagtagaactcagaggactttgaggctgagtggctgtggggcaaaaggtcaaggatgacagtatttagctttagtaacagcacagattgtggtactaaccattataataggacataaatatrggcagattcaaaaggaacaggagcatttagtgcttaagagataaacaaataaaaatgtctgaaatgtagctgaatacaaaggtctgaaattcaaaaaaggatatctaagttgaagacataaatttggagaccataggcatataaatgaaagataagtaaagggagttcatgagacctagggagaatagataatgaatactagaattcaagggacttgaccgagaagctggagccacaaaagtaagagaaccaagaaggtaagtgttacatgagttaaggaaagtgtgattgaaggagaaactctccactaataacaactaaagaaataacaaaattaactttgtctttccaatatctcaaatatcaacttttagggtactcatgaattaaaaatataaatcacatgttcccatatcagcaaaatgaaacaagtataaatgtaccaaagaaatgcagcaaaaacaaaaacaaacaaacaaaaaccatgagtattaactagctttcaggtgtaaacaatagaaaaattactctctccttcctcctaacgtttatttccacagccttagcaattttattattcaatgacagcagcactaaattattctccaaataaagcccacgataagatttactggcaccaacgcaattgcttccaaacctaactcgtgagatactcagaaaaaactacgtagtactaagtcactgataagaagtttctcaagtcttccctgataggcatgtgagggatgtatgccagctgcaccagaccacggtccattgccatgcaaactctgcccttcctccacaaacaggtaaagcctctggattgtgtttaaattcttgattgatacaaattcttcaaagtaactgatttgttattgaaaatgttaactcagtaagaggatcagctataaggaagtgtattta

SEQ ID NO: 714368 - DNA, 586 bp, Homo sapiens
aggtaacatgcccaagaatggaggtagtttgcctctggagcaacattcttaaccctgtcatatactatatctccatgccttcatgtattgtacataaaattataaatgtctgaggccagcgaatttctgtttgggaacgttctcttacarttttacaattcacattccgtcatcatttactaatgctaagcctcgtggacttagtctatgtgtttgcaaagttatgctgaaaacatagaggaaatatagcaacaccaaatgagtcaatttggcttactgagtcggaattagggatgcttattttgaacagttttattaagtaggcagaaataagaagcaataaagaacagctctcaaaacaagaacttctattggtagactaaaatgtaaaaaatgaggacacatacacaaagacataggtattaacatcttccagggattaaactgtttacatttaactgaaacaattttgtcaaacagaaattccatctgataaaaatgaaaatgtagagcatgatgactacagttagtaatattgtattgtatatgaaaaatttcctaagagaatagattttaggtgctctta

SEQ ID NO: 714369 - DNA, 887 bp, Homo sapiens
tatttttgagatggaatctcgctctgtcgyccagggtggagtgcagtggcgtgatctcagctcactgcaacctccacttcctgggctcaagtgattctcctgcctcagcctcctgagtagctggaattataggcacccaccaccacacccagttaatttttatatttttagtagagatggagttccaccacgttgggcaggcttgtctcaaattcctgggctcaagtgatctgcctgccttggcctcccaaagtgccaggattacaggcatgagccactgtgcctggccgtgattctccattctatgtttcccttccccttgtctctgcctcctgctccccaggatcatattcccaaatcaactacctccacacaagcatggatcttatgctctgttttcagggaacccaggctaagatctaatgaatttgtagtaactaaattctcacctgtccttatctccaatacaggactcagcctcagcaccctaatttagacccctcctcctccctcactattactgggaatcttcagagccagctcacctgttttcatgaggtttcctcatgtgttctttgctctggcacatgctgagtgacactgattgagaagtcacttaaggtgctatcatatcccttgagatcctgaccgtgtcttactctgcacacattcctcctcaaggcactgtcttcccacgttcccaaacctgcagccctgtggaatcaaggcagcactgcattcctggagcgctccctgaatgaagccacacggcaatagtaaaacacatgggaaggaggcttgtccccccgtaccctctgtattagtctattctcatgctgctaataaagatatacccaagactgggtaatttataaaggaaaggggta

SEQ ID NO: 714370 - DNA, 887 bp, Homo sapiens
tatttttgagatggaatctcgctctgtcgtccagggtggagtgcagtggcgtgatctcagctcactgcaacctccacttcctgggctcaagtgattctcctgcctcagcctcctgagtagctggaattataggcacccaccaccacacccagytaatttttatatttttagtagagatggagttccaccacgttgggcaggcttgtctcaaattcctgggctcaagtgatctgcctgccttggcctcccaaagtgccaggattacaggcatgagccactgtgcctggccgtgattctccattctatgtttcccttccccttgtctctgcctcctgctccccaggatcatattcccaaatcaactacctccacacaagcatggatcttatgctctgttttcagggaacccaggctaagatctaatgaatttgtagtaactaaattctcacctgtccttatctccaatacaggactcagcctcagcaccctaatttagacccctcctcctccctcactattactgggaatcttcagagccagctcacctgttttcatgaggtttcctcatgtgttctttgctctggcacatgctgagtgacactgattgagaagtcacttaaggtgctatcatatcccttgagatcctgaccgtgtcttactctgcacacattcctcctcaaggcactgtcttcccacgttcccaaacctgcagccctgtggaatcaaggcagcactgcattcctggagcgctccctgaatgaagccacacggcaatagtaaaacacatgggaaggaggcttgtccccccgtaccctctgtattagtctattctcatgctgctaataaagatatacccaagactgggtaatttataaaggaaaggggta

SEQ ID NO: 714371 - DNA, 2081 bp, Homo sapiens
aacaaacaaaagtccacaccctggaggagcttacattccaatggaaaaacagagtcaaatagcagaaataaatatattctattatatacaacatattgtaggtaatgcaacatgctatagagcaaaaataaagcacaatgagggaatagcaatgatggagtgggcggggctctcttgtacagaatgtagaatcagagagggcatctgaatgaaatgagggaatgagcaatgtgtttaagtctcttaaacacttctacacctaattctaaaattttccagggttgaagacgatgacaaactagggaaaaaacgttaaccatcccaagcaatttaaggggagactatctcagatgcttaaagccacataacaagcagagatttcagcttgaacactaattggattctcaattgtgaccttgaaggaacacactgaactctatttataattgctatgggagttactctatgatttaaagaaagtggcccggtggcccacgacccttttatgtcatcaacttattttatttattcacaaaagcctgcaccttgacctacttagactaggttacttgacttgatatttcattaatttggtcactaaaatttctgaagtatcgtttccccctaactttaagtatcttatacttggccaggcatggtggctcatgcctataatcccggcactttgggaggccgaggcaggtggatcacctgaggtcaggagtttgagacaggcctggctaacatgctgaaaccccatctctactaaaaatacaaaaattagctgggtggcggtgcatgcctgtagtcccagctactctggaggctgaggtgggaggattgcttgaacccaggaggcaggggttgcagtgagtagagatcacaccactgcactccagcctgggtgacagagtgagactccatctcaaaaaaaataagtaaataaacttgatggacttatacatctttttaaatacttcccaaatccatagactacatggctcatggctcaaagagagtaaaatatgtcctagcctgatggttctcattcctttgaatatttggttataacatctaaggtcattttattgatccagatttgtttatgaaaactcacctcaagtttatattaatatgatcatttcagaatatctaaattaatgctcgcttttcaaaatgtctccactaaagtgggtacagtggctcacccctgtaatcccaacactttgggtggtcaaagtggatgtatggcttgagctcaggcatttgagaccagcctgggcaacgtggcaaaatcccatctctacaaaaaaaaaaaaaaaaaaaaaaaattagccaggcgtggttgtgtgtgcctgtagtccaagctactagggaggctgaggtggcaggatcacttgagcccaggaggttgaggctatagtgagcygagatgttgccactgcactccagcctgggcaacagagtgagaccatacctcaaaacaaataaaaataaataaaaactgtctctactaaagtagtataagctgcaaagccaagataatttctctgagggatatttctaaccatattcactttatacagacatactgtaggcaatcgaacttgaataaggaataggaactctcttctttctgacaagacttgacataaacctctataactaaaatagttaagtcgcattgcaaactgatcagtaagtaaggagaaaaacaaacaaacaaacaaacaaaaaacctaggttgaatttgtgtctacacaggtttgcaaccttggagccatagacaatatcatagagcctaggtgtgtagtaggctctaccatctaggtttgtgtaagtatactctaagaagttcacacaatgatgaaatcacctaaggatgcatttcttagaatgtattctccttgttaaatgacacataactatttgaaattgtccaagtgagtaggtcttaattgttctctcacacacacaaaaaaacaatggggtggataaatatgtgagatgatgtataggttagttagcttgattgaaggaatcatctcgcaatatatacatctattgaaacgtcataagta

SEQ ID NO: 714372 - DNA, 1300 bp, Homo sapiens
ggcctttttttttttttttycctgcatgactctcatttggggaatgatcactaatgcccattctgtagatatggggtcagtaacattacaccaaatagaaaatgttaaatacagaatttcatttagaattagcattctgttaattgcacatttaagtaatggttgatgggaagttaggtgcaaattatttagttgagacgtattttaccccaagattcatcttagcaaaggctagcaacactagggttttattttcactgttaattcaacaaagaggaacccaggtaaagagattaaaatatttgccacttaagtctcttgaaaaaatcaaggattggagatggaagaaagaacacacagttaacttaagtagtcaattaaaaccctggttagaaacttaatctattttccattttgccacaatatggtttagaaggtatagcctggtagtcactggggttgcaggaaagcacagaggcataccaatgcacctagccactgccaatatctttttgcatgaattaatcagttgactatgcaaactagataatttcattgatttataatttctatagttttaaaacattctcattttcattctgcccaatcacttgaaaaaaaaaaattgtgtgcatatctctttgagcgtgtatagtagtgtaaacaaactagaccgagagaatttgactctaccacatattttgctttattgaagtgaccacagaccagaataaaattcaaagactgtaacatatttgacatttgcaaaactaaaaggtattgtgatgtttatttgaggctcataaaggataaatgaaatatgcatggaaaggtgctataaattcttgccatgtaatctctcatggtctttaaataattattaagtttttatgctagctgttgcctaaggaggttataaagagatttttgtcacttcactatttttttctttgtctaaagaacaaaaatgtatttttctaaaaaaatgcacatgagaacaccagaaggaactattttacccttaagtgatttaaccttttaactcaggctgtgttaaaatgtaaagaatagtgtgtgatctgtttccatttcccccaagttttgtctcaatttgttcacaaattcatatgaagggacaaagtcaactctatgaacatcgttcaagtcacatcttcacagtggctaaaaggggtgtacaagtgaggaaaaaaattagccctcattgactgccaaaagtctcttctgtattgtaaaaaaaaaatttaattgcattcactgatgacaagtgtgggtgcatttg

SEQ ID NO: 714373 - DNA, 1369 bp, Homo sapiens
tgataaaaaaaagtaacttatgaggtttttctgcttattatcattataatgacaagaaagtaacttaactcacctgaatctctctctttttttttgtttttagacagtctcactctgtctcccatgctggagtgcaatggtgcaatctcagctcactgcaaactctgcctcctgggttcaagcgattctcatgcctcaatctctcaagtagctaggattacaggtatgcaccaccagtcctggatacttttttttttttttttgtatttttagaagagacagggttttgccatgttaactaggctggtcttgaactcttggyctcgtgatccaactgcattggcctcccaaagtgcagggattacaggcgtgagccaccattcaaggcctgaatgaatctcatttataataatgaaatagtatatttcatttattatgtgacacatcttttggattttaacttttgaaatctgaggcttttttttttatatgggatctcactctgttgcccaggctggagtactgtggtgcaatcacagctcactgcagcccctacctcctgggctcaagtgatcctcccacttcagcctcctgcgtaactgggactacaggtgcctgccaccgtgcctggctaatttttttctgtttttttgtacagatgaggtctcactatgttgctcaggctggtctcgaactcctgaccttaagtgatcctcttgcctcaacctctgaaagtgctgggattaaggtgtgagccaccacatcaaggctctgaggcatcttatagccaataaatagcatcgtccaatgtttgctggccaggcagcagtggcgaggtatttgtcatgacttgtgtatgtgcaaaaacaatttgcagaatgggtagcaatggagatgatagagcatttgctccttgaatcccaaggcactatacaggaaggtatgggaagatgaaagataggaatgcttacaatgtggttagagatacaaagaataaatacataaaatgtttaccataaattcatgtttaattcattgtatattctcatctactcccaaaaaggatttgggacaaaaagaggttaggtacttttgtccaaggtcacacagtcaggcagactggaaaatgacctaattcctatcctatgctattcttaaccactctaactcctcattctccaactgcccacgatgctggaagaagcagcacggcacaatatgaagaattcagaaaatgggacgatattgtttgtgctgaagaggaggaggaagtggggttgttgagtcaatggggactcttctcactggagcggactatcaaaagcactctaatggtgaagaaggtgtgaacaaaggcccaagtagaaga

SEQ ID NO: 714374 - DNA, 2069 bp, Homo sapiens
caggcctgtgaaggaattcccgatgcgcgtctatgaaaaggatgggaagggggtggagagaggaggagagtactgtaagcacacttgtgtcatcgcacagagtgaaagtaagcaatgcccattctcctggcttctctacaaaaacgcaattttaaaaggctaaacatttcacttcttgaaaacacataaaaatagcaaggcctgtcatcagagcccaaggaaaacagagggtcattggtctaaatgccatgcatgctcaaagccaaagcaacttgatttcattatacaatatgatgtttgggaacactgttctcagcactttctgactatggagacttctatagatatattttgttaaggaatataaattgtatttggtagttttcctttcatgagtcaaactggtggttaaacaatcaaatgttcaggtaatgtaatttccacagagctctgattctgccacctttcaatgaatagcaagctccactctatggctaaccagttctcatacttaattcttaaaaatctcagtgaccattaaaatttttcacacaaattagatcatatggatttgacatacgtgaaagccagaaagactcatcagaatggattcacagacattctgttgagcagagagaattagcccatgctttccagaaaaggaaatgaagttccactttaaattaaatgctgtgcttactaggcgtctcaaattttaaaagtttaagaaaacaactaataactttgatataggaatgctaacttctaaaatatgttcatggaattaacacaaaacattttatagttcttacatatgctcaaaagtaaacaaagtgtataccgtcttccatagctaaaatatgcatttcatgtcttccatattggattttcaataaaagcctccttatatagaagagttcggtaagaaaaaaatcattttaacttttataaaacttaattaataagcccatgataaattctgaggaaaactgaaattttctctatgtgtacagtaaatgttgagtagcatatatttttaaatgctttatctaatggttatgttgaagatgaagacatttagtccagtctcctatattttatggtgctacacaatgtcaaaaataaagaaaagcacgatgagtttagctaagtatatgttgttacatttgaatgctttaaatacatttgaatgctttgaattcttgcagggcacacagattatcaactggcaagaacattagattttctcaactattctgaattagcaaaaatttactacagcttggtgaggaatatatggaaactatatcatctttgcaattttttaatctaaaattattccaaatatttaaaagtttattttcaaaagtttacactgtgatgtcatgactacttaataataggatggactggaaatatctatgcattctcctgtgtatattcatttctataaagtaaatgacaaaaataaaaacgtttttactgaagtaactttcattcttaaggcgagataaaactgctgcataaacaacctaaaaggaaatgtgatacagctaattagatttatcaagattatcttccttaccactataactatttccagaagaaataaagtgcaatcaagttcatatttagccatgtgacacagtacaacacagagatttacttatgacattaaaagacaacttttaaggagaaaagacttggatttaagcataatttattggataagaataagaacagatctgtaaagtttgaagaaagaaaaaaacgtgacttcaaagtagcaatttttttttcatttattgtgttaagaagagacctgtagttaataaaaacttatttttttcttttttcyttttttgagacggagtcatgctcattgcccaggctggagtgcagtggcacgatcacagctcactgcaacctgtgcctcccaggtcaagagaatctcctgcctcagcctcccgagtagctcggattacaggtgcatgccaccaagcccagctaacctgtatatttttagtagagatggggtttcaccatgttggccaggctggtctcaaact

SEQ ID NO: 714375 - DNA, 625 bp, Homo sapiens
cacatggataatttaaaataggatagaaaaagttttgtgattctgaattgagtaaaataaatgtaaaatgcttactgatagagtacttactaatactttagcagaagatgaaaaaaaaaagactcttaagatggaaaaatgaaatcagtggccgtaaactttagatctacagtgcaaatatacaaccaagaaataaactatatgtacaatctataaaatgtggttttaatgtatactgttccctgtgttctgagcctcagtctgagctcacattatattgccaagtttgtgctatgcaaaatgattgccacagaaaaaaatataagrttcccactgttaccttccagagcttacagtgtagttagggggtgaagattaacacactcaatgcagttttgaacccagttctatattagctctctggggcttactgagaacaataatggaatcctgaaatggaagctgctggttcaggctgggtaaatctacatgtaaagttagacattaaaagatgagaaagcaatggctaggtggcacgcaggagggaaactgagtcctaaacataaggacactatgttaaagcaccattaccaagccagatgcaatggcacatgcctgtagttcc

SEQ ID NO: 714376 - DNA, 455 bp, Homo sapiens
atatatatatatatatataacaaaaaacmaaacagggcatttcctagtctttggctcaaaactgatccccaaaagactcacaagataccaaacagaatgaatgaaaagaccaacactagactcaacagtttaaattccataatatgaaggctaatgagatgatactaaaagtttctagagagaataacaaagttacctatagagaataagaaacagactggcatcagacttcttattggcaatatggaatgctattagataatagagaaatgtctccaaagttctgagggaaaagaatttaacatagaattctgtattcaggcaaaccatcagtcaggtgaaaggtgagaataaatacatcttcaagacatgcaggacccagaaagcttactttccacacaggctttcttaggaagttacttgagggcatgttgggacaaaataagggttactgt

SEQ ID NO: 714377 - DNA, 455 bp, Homo sapiens
atatatatatatatatataacaaaaaacaaaacagggcatttcctagtytttggctcaaaactgatccccaaaagactcacaagataccaaacagaatgaatgaaaagaccaacactagactcaacagtttaaattccataatatgaaggctaatgagatgatactaaaagtttctagagagaataacaaagttacctatagagaataagaaacagactggcatcagacttcttattggcaatatggaatgctattagataatagagaaatgtctccaaagttctgagggaaaagaatttaacatagaattctgtattcaggcaaaccatcagtcaggtgaaaggtgagaataaatacatcttcaagacatgcaggacccagaaagcttactttccacacaggctttcttaggaagttacttgagggcatgttgggacaaaataagggttactgt

SEQ ID NO: 714378 - DNA, 1410 bp, Homo sapiens
caagtgaaaattggggggagagacttatatcttcttacaggacatactcaggtaattagattatcaggtgttcctgtttagccagtggtttctgtcacatttacaattaattattgtactataagtaacttactttcaaaccagcatatagatatctttggttaaataaatgaactacgtgggtgacaccacattttcccatttttgctcctaggtactcagtgtatcatatctaacacaagctatgtgtgaaccttgtagcaggactgccatatacctccactccagttttttacagcacaatgtggggaacaccattcacgcagaaaacaatgtgaaagtcaacccctggtggtgcatagtgtagtgactcctatgggaagatccccaagtgtttcgttgtatacccttcacaaggtataccaagtgtactgatttcaatagacagtgtcatcttaccgtttagtcatgtgatgttttttaaaaaacacatttaatacaatttttttccattgaattcattagccgttattgactttgttgcctaggttaaatttaactataactgaattaaaataccaggttacctagagaaatgccattaccactgtgttgcaacctctctattaagctatggcacctgttattttatgttaatggtcagtaattgctccagatagaatacaagaggatatacaagtactgtgtcctcttaaaataaagagtaaatgtgttctctagtatgtgacagctaattagttaaatgttttttgattgtctttttttaaattggctaacattgttatctctgagcttaaataaaaatatgatttttttttagtccctgggtgtctaagtgtctagttttcagcatatgacatttagytataaaaactaaagtaaacctgttttatacactttttatttattttatacatttgtggggttgggttaggggcagtggaagaaccaaataataattcttaaaattatcccaaaagttttaattgagctgataagtcagtagtgcctggttaccaaaattgagggggtggggcatatttacagtcagttactgtggaattaggcatgcttttctaaaaggtgacttctaagtacccaaagtgcccctgaaagagctgtatgtatatgaagccatccataatctgagtatcattgccggaaatcaaaagatgcagacattcaattggagattcacgtagatattttagaaccagagagtaatggcaaatttttttttcagaattgaagtatgtacattgcaaacaggattgacttaattatgttcatctatatttgagttgtgattccattgtttgattcttatagtgactactttgtgggaagatgttgtattctttaatttttgagacactaataggtttatga

SEQ ID NO: 714379 - DNA, 592 bp, Homo sapiens
aggtccgatacaatgacttgttactgataatccatcatgtctgtctgtatttcagtcacttgcatgtcttctatgaattgcctacttgtatccttattttctttcttattatttatttgaacagtgtgttcacttcctaatactctgttatacatgaatttgctcccaggctgttttcccttttaactgagtattggtatctgttatctataataaagtttttttgtttgtttgtttttgagacagagtcttgctctgttgcccagggtggagtgcagtggcgcgatcttggctcactgcaacctccacctcccgtgttcaagtgattctactgtctcagcctctggagtagctgggattacaggcatgcaccaccacacctggctcatttttgtatttttagtagagacagggttcaccatgttggccaggctggtctggaactcctgacctcaagtgatctgccygccttggcctctcaaagtgctgggattacaggcacacccagcctataataaagtttttataatgtataattagttggtcttacggttgatttttggattttgtcttcccacctcaagattgaaca

SEQ ID NO: 714380 - DNA, 592 bp, Homo sapiens
aggtccgatacaatgacttgttactgataatccatcatgtctgtctgtatttcagtcacttgcatgtcttctatgaattgcctacttgtatccttattttctttcttattatttatttgaacagtgtgttcacttcctaatactctgttatacatgaatttgctcccaggctgttttcccttttaactgagtattggtatctgttatctataataaagtttttttgtttgtttgtttttgagacagagtcttgctctgttgcccagggtggagtgcagtggcgcgatcttggctcactgcaacctccacctcccgtgttcaagtgattctactgtctcagcctctggagtagctgggattacaggcatgcaccaccacacctggctcatttttgtatttttagtagagacagggttcaccatgttggccaggctggtctggaactcctgacctcaagtgatctgcccgccttggcctctcaaagtgctgggattacaggcacacccagcctataataaagtttttataawgtataattagttggtcttacggttgatttttggattttgtcttcccacctcaagattgaaca

SEQ ID NO: 714381 - DNA, 585 bp, Homo sapiens
ctgaggtcaggagttcgagaccagcctggccaacatggtgaaccctcatttctactaaaaatacaaaaattagctgggcgtggtggcacacgtctgtaatcccagctacttgggaggctgaggcaggagaattgctggaacccaggaggtggagtttgcagtgagccaagatygcaccacctcactccagcctgggcaaaagagtgagactctgtctcaaaacaaacaaacaaacaaaagaagcgtgaaagcagaaaatgaaagcgaagtaactgatgaaatctgctatctttatccaactaacaagactctttccttttcacatagctgcccagatttttccagctttgttctgataatgtatggggagtccgaaaggcttgtgctgaatgcttcatggcggtttcatgtgcaacatgtcaagaaatccgacggaccaaattatcagcactttttattaatttgatcagtgatccttcacgttgggtagggttttgattatcacttttgtaaaataatacatttgtgtccgttttaaagcaaacataattttgacctcataagaaataacttataatttaagat

SEQ ID NO: 714382 - DNA, 650 bp, Homo sapiens
aataagtcccaaatgttcctgtgtgtctttaaccacactgttcctcctggcataaatgtatttattccctttctttgtgtgtatacgtgaagggtggttcagtgaaaaaaaagtgttttgagtcaaacagatcccagttttatctcttacttgctatgtgatttagggaaagttatttaagctctctgagccttactttctctgtttataaacatggaaaaatactgcttttctcacagggttagctaaattaatgtatgtgaamgttccagaagccacaggaactcaaataaattgttgattccctttatttcctgaattagaacttaaggcttagggcaagattcatttcttctaatatttgtctcatcagcagtaaatatgttgagaacagaaaagataccaattagtttattaaataaacatttgactacttactgtgtgccataggtagtgttaaattttggagctcaccattagcaaggtgaacacatgcatatgtaattgaaatacagtatggtaagtgctgtgaagaggtatgttcaggatgttctaggacacagaaaaggagtatttgtggcttatactggatggggtgggtcaccagggaggattcttggagaagtgttgctagtgcttgatttttttaa

SEQ ID NO: 714383 - DNA, 650 bp, Homo sapiens
aataagtcccaaatgttcctgtgtgtctttaaccacactgttcctcctggcataaatgtatttattccctttctttgtgtgtatacgtgaagggtggttcagtgaaaaaaaagtgttttgagtcaaacagatcccagttttatctcttacttgctatgtgatttagggaaagttatttaagctctctgagccttactttctctgtttataaacatggaaaaatactgcttttctcacagggttagctaaattaatgtatgtgaacgttccagaagccacaggaactcaaataaattgttgattccctttatttcctgaattagaacttaaggcttagggcaagattcatttcttctaatatttgtctcatcagcagtaaatatgttgagaacagaaaagataccaattagtttattaaataaacatttgactacttactgtgtgccataggtagtgttaaattttggagctcaccattagcaaggtgaacacatgcatatgtaattgaaatacagtatggtaagtgctgtgaagaggtaygttcaggatgttctaggacacagaaaaggagtatttgtggcttatactggatggggtgggtcaccagggaggattcttggagaagtgttgctagtgcttgatttttttaa

SEQ ID NO: 714384 - DNA, 563 bp, Homo sapiens
aggatgtagtacctcatcagtggggaattcttttgcctctactaacctggagcactgggaaaagcacgggagtagggaacatagtggataagaaaaagagggtttattttcctttatactcagtttacagtagtgattccagcaggatgcactattttgttcagaaaaagctgatgctaagaaacttggagctgtggctgacgaccytgggacagagctgaagttctgttgcattctcggggcagtgttcagctcctgtaaatgtagaaagaacagcctgaatcagggtaactctgtatagagctcagttctgtaggtatttttcttctcttttttcttttcttttcttctcttttcttttcttttcctttctttccctccctccttccctccctccctccccttctttctttctctcttctttcttaagcacagtgtgagaaaatgtctctttagctgatgtgagtaaagagatcaagtatctttgaaaaactatgaaagctctaggaaaggctaaggcttcacattcagaatgtcaccttgacagggagctttaaagggag

SEQ ID NO: 714385 - DNA, 563 bp, Homo sapiens
aggatgtagtacctcatcagtggggaattcttttgcctctactaacctggagcactgggaaaagcacgggagtagggaacatagtggataagaaaaagagggtttattttcctttatactcagtttacagtagtgattccagcaggatgcactattttgttcagaaaaagctgatgctaagaaacttggagctgtggctgacgaccttgggacagagctgaagttctgttgcattctcggggcagtgttcagctcctgtaaatgtagaaagaacmgcctgaatcagggtaactctgtatagagctcagttctgtaggtatttttcttctcttttttcttttcttttcttctcttttcttttcttttcctttctttccctccctccttccctccctccctccccttctttctttctctcttctttcttaagcacagtgtgagaaaatgtctctttagctgatgtgagtaaagagatcaagtatctttgaaaaactatgaaagctctaggaaaggctaaggcttcacattcagaatgtcaccttgacagggagctttaaagggag

SEQ ID NO: 714386 - DNA, 563 bp, Homo sapiens
aggatgtagtacctcatcagtggggaattcttttgcctctactaacctggagcactgggaaaagcacgggagtagggaacatagtggataagaaaaagagggtttattttcctttatactcagtttacagtagtgattccagcaggatgcactattttgttcagaaaaagctgatgctaagaaacttggagctgtggctgacgaccttgggacagagctgaagttctgttgcattctcggggcagtgttcagctcctgtaaatgtagaaagaacagcctgaatcagggtaactctgtatagagctcagttctgtaggtatttttcttctcttttttcttttcttttcttctcttttcttttcttttcctttctttccctccctccttccctccctccctccccttctttctttctctcttctttcttaagcacagtgtgagaaaatgtctctttagctgatgtgagtaaagagatcaartatctttgaaaaactatgaaagctctaggaaaggctaaggcttcacattcagaatgtcaccttgacagggagctttaaagggag

SEQ ID NO: 714387 - DNA, 1395 bp, Homo sapiens
tcggtccttaattgacgtaaaagattgaaagaaaaaagttacattctatgactggggaactattcttctctgcccgttagatgtgaacacagcatgtttccccagttgcttttaaatgtcaccttatcaccacaaagagagccagcctggggttgaggccaatagatcagagatttggaaagagcccatgtccctgggaagattactgagtcactgaacaacaaactgtaaagggtgccttacctatggatttcccattaatgcgagttaataaatttcctcattgttagcctataggggcatttatattacttgcagcccaaaacgtccggattaaaaccatttatttgtgatgctcctgtctgacctaatatttatgttgactttcagaacctcttctctacaactgctctgggaatctctgtaagctttgcttcatgtaaatgtgtgcacacactgcacaccaatggagaactttagaaactagaaagctgtgtccaggagggcaggagacttgttagttttgcctactaactgtatcctcaaagcctaggagaatacctctcagcagatgctcaaaaatattagactaaatcaataaatgaataaacaaatggggcaaaccaaaatgagctgtgactcagttgtgcctactcggctttcatagcagctgcctttttagctggtttccctgtggtcacatgctgcctgccacattctcaggctccacgtcaagcaaaatgcaaaggtgagaatggaccattctcctcgcgcatcattgaagtgcaaaggaactgtccccagaaggctcctcagccctggagtcttcccctcaagtctttttttttttttaccagaatctcactgactaaatactctaagtataaaaataagttctaaaaaaaattcaacaaaaatgtagaaaaatatcttctaaaacaagactagaaagtaagaagccattaggaagaaacaatgggtcatttagcaaacataattgcatatgtagacatctaccaagataaattaatatatatttggactgatttatattccaatgatacatttattgtgtgtattaatgagtatgggtagccctaaaagatataattgataaatttaactacataaaatgtgaagatttctctataataaaccacaaataaagtcaacagcaaatggtagaataagaaaaatattttgaaaacatatgacaaatggtaaataaccctactatagaaagtatccctacaatttaaaaaggaaaagattagaaagcatcctaaggacagaaatggacaatttgctgaggaagaaatatactgaatacatgcatggaaaasaggaaatgcgaattaaaacaagaacatataatttaaaaaccaataaattgat

SEQ ID NO: 714388 - DNA, 435 bp, Homo sapiens
gttttggaccagtaagcagatcgccagaccgggaacacacactgtgstgtttctactcagcctgttgccctcttcacagatcctgtttcctttggaagcatcactgaggtgaggctgaattatccaagaagcagccaacaggggagaagaagggccttcagctgatgcttaaatagatctaagtctcttttatatccttctgttaagggcatatatatatatagcatatgtatatattgcatatatataatgaataaataaatatatataattgtttttgagatggagtctccctttgttgctggggctggagtgcagtggcgtgatcttggctcactgcaacctccgcctcccgggttcaagcgattctcctgcctcagcctcccaagtagctgggattacaggtgtctgccaccacatccagctaatttttgt

SEQ ID NO: 714389 - DNA, 586 bp, Homo sapiens
acgccattctcctgcctcagcctcccaagtagctgggactacaggcgcccaccacctcgcccggctaattttttgtatttttagtagagacggggtttcatcgtgttagccaggatggtctcgatctcctgacctcgtgatccacctgcctcggcctcccaaagtgctgggattacaggcgtgagccactgcacctagccaattgctgcaatcttacaatgaaacttgaacaaatgaagaactgcttcttatgaatgagcaaagaaagtgttttttaagatagagtctactcctggtaaagatgctatgaacattgttgaaaatataacaaaagatttaggatattacataaacttaattgataggctggactcagtggctcatgcctataatcccaggctgaagtagaagcagaataaaaccctgtctctaaaaaaattaaaattcatacttaaataaattttaattgataaagcagtggtagagtctgatagaagagatkctaattttgaaagatgttctactgtgagttaaatgctatcacacagcaccacatgctacaaagaaaacttttctttctttttta

SEQ ID NO: 714390 - DNA, 632 bp, Homo sapiens
gaaactgtcgtactagagaagcatcagcaaagagagagagaagtgggtaagtttgaaaataggaagtggacttgatactttttttttttttttttttgagatggagtcttgctctgtcrcccaggctggagtgcagcggcatgatcttggctcactgcaacctccgcctcccgggttcaagtgattctcctgcctcagcctcctgagtagccgggactacaggtgcgtgccaccacgctcaggtaattttttgtatttttacaaatacaaaatacagagatggggtttcaccgtgttagccaggatggtctcgatctcctgacctcatgatccggctgcctcggcctcccaaagcctgggattacaggtgtaagccaccgcgcctggatggacttgatacttcttgaagattgactagaaataggaaagagaagggaagaagtaaaaaatgaccctcccaccccagtttctgagtctgaattctatttctgactagttgatgaccttggcaagttttgctaaacttcattttcattattggtgcaaaaaatcaccctcaagttttaggtgtgcatagatgtatacctggcctcattacataaaggatatgatgtagcttacaagaataaccc

SEQ ID NO: 714391 - DNA, 599 bp, Homo sapiens
tcaagaaatagaatagttccagtgtcctagaaaccccatgtgcctctctccttcatacatccctscctcactcactcccagtgattacagttaccttgattgcaagataatcatttcttgatttcctttatcatttatgtgcacatataaacagacaaatatctctaactgttatcataatttacttgtttttgaaatatataggatcctattatttttattcttgaagttcttgtttctttagtttagtattgagagatgcattcgtattacaacatatagctctagttggatcattttcaataatgcacggtattctattgcccataatgtattcattctactgctggtggatagttgattctttccccagctctgtaatgttgtttggaaatggattactgctacctggtctcattgaattttaaattattttttatagctaccttagcatattttatagtctcatgacctaactcgtctttgtggcttcatcttctctctctttgaacatttcatccatattttatatttcctagctggtgttctaataactgaagtcattagtggtctaagtgtgttgcttgttgtttgtgtgg

SEQ ID NO: 714392 - DNA, 599 bp, Homo sapiens
tcaagaaatagaatagttccagtgtcctagaaaccccatgtgcctctctccttcatacatccctgcctcactcactcccagtgattacagttaccttgattgcaagataatcatttcttgatttcctttatcatttatgtgcacatataaacagacaaatatctctaactgttatcataatttacttgtttttgaaatatataggatcctattatttttattcttgaagttcttgtttctttagtttagtattgagagatgcattcgtattacaacatatagctctagttggatcattttcaataatgcayggtattctattgcccataatgtattcattctactgctggtggatagttgattctttccccagctctgtaatgttgtttggaaatggattactgctacctggtctcattgaattttaaattattttttatagctaccttagcatattttatagtctcatgacctaactcgtctttgtggcttcatcttctctctctttgaacatttcatccatattttatatttcctagctggtgttctaataactgaagtcattagtggtctaagtgtgttgcttgttgtttgtgtgg

SEQ ID NO: 714393 - DNA, 1160 bp, Homo sapiens
tccagcctgggcaacagcacaagactctgtctcaaaagacaaataaacaaacaaaaaagtctttattattattaatgatggatagtggctaatatccatttaatagctaatatcctatgcatggaatgttcctgactttcttctctagtatttattggtggctcaagtgaccactcagggaatgtcaaatacaactgtataccttggtcaatttcttcttgggttccatccaaagactgactctgcaaactgcccctgctggaggtgacggagtttggggtggggtggggtaagggggtgaagaatcatgctatactctgtgaggattacaaccaggagcatgtcttagccaagtcagagccactgcaggcacctcttggctttgcacctattaggactgagtagcgatgtgtgtccaggctggcccgtgagtatccttagtagatcatgtgagtgttgtcactgtgtccatattagactatggaaactccagtattggaatcccatttgagaatgaagtgttgttttcatacaaaggaaaatacagtagctagttcagactattccatgatataagaagcaacaaaccctgcttaaaagraaaaagcccccagaagtgaaatcacaaatgctgcattatcatgggttgcaataaacatgggtgtgtgtagaaagaggctgtggcaacacttttgtctcctgccatgtcaaccgaggtgatggaaaacatgacagcctaaaataattaaaagtaagtggttggaaagaaaagccagtcttggaattagggaaaacaggtgtatggtgccagcacagagtttcattctttttgtgcatgtgattaagatttggattgggaatatcattgtaaagtgaagagcctgagaaatatctagatatatgtgaaccaaactgtgtgcagcttagattgatgcagaaagaacacttttttacacttgcaaatgttttgatacaaattaaatacagaaaatactacgtgttatattgaaggagaaagaaaaatagtctgtggacctcgacccctaagctctgaagacacatgctaataataattggcaaaggtatttgttttactctataaagttaagaagttaaacccacatgcaggtgtctaaaattcgatggatatgcaggtgtca

SEQ ID NO: 714394 - DNA, 1160 bp, Homo sapiens
tccagcctgggcaacagcacaagactctgtctcaaaagacaaataaacaaacaaaaaagtctttattattattaatgatggatagtggctaatatccatttaatagctaatatcctatgcatggaatgttcctgactttcttctctagtatttattggtggctcaagtgaccactcagggaatgtcaaatacaactgtataccttggtcaatttcttcttgggttccatccaaagactgactctgcaaactgcccctgctggaggtgacggagtttggggtggggtggggtaagggggtgaagaatcatgctatactctgtgaggattacaaccaggagcatgtcttagccaagtcagagccactgcaggcacctcttggctttgcacctattaggactgagtagcgatgtgtgtccaggctggcccgtgagtatccttagtagatcatgtgagtgttgtcactgtgtccatattagactatggaaactccagtattggaatcccatttgagaatgaagtgttgttttcatacaaaggaaaatacagtagctagttcagactattccatgatataagaagcaacaaaccctgcttaaaaggaaaaagcccccagaagtgaaatcacaaatgctgcattatcatgggttgcaataaacatgggtgtgtgtagaaagaggctgtggcaacacttttgtctcctgccatgtcaaccgaggtgatggaaaacatgacagcctaaaataattaaaagtaagtggttggaaagaaaagccagtcttggaattagggaaaacaggtgtatggtgccagcrcagagtttcattctttttgtgcatgtgattaagatttggattgggaatatcattgtaaagtgaagagcctgagaaatatctagatatatgtgaaccaaactgtgtgcagcttagattgatgcagaaagaacacttttttacacttgcaaatgttttgatacaaattaaatacagaaaatactacgtgttatattgaaggagaaagaaaaatagtctgtggacctcgacccctaagctctgaagacacatgctaataataattggcaaaggtatttgttttactctataaagttaagaagttaaacccacatgcaggtgtctaaaattcgatggatatgcaggtgtca

SEQ ID NO: 714395 - DNA, 1160 bp, Homo sapiens
tccagcctgggcaacagcacaagactctgtctcaaaagacaaataaacaaacaaaaaagtctttattattattaatgatggatagtggctaatatccatttaatagctaatatcctatgcatggaatgttcctgactttcttctctagtatttattggtggctcaagtgaccactcagggaatgtcaaatacaactgtataccttggtcaatttcttcttgggttccatccaaagactgactctgcaaactgcccctgctggaggtgacggagtttggggtggggtggggtaagggggtgaagaatcatgctatactctgtgaggattacaaccaggagcatgtcttagccaagtcagagccactgcaggcacctcttggctttgcacctattaggactgagtagcgatgtgtgtccaggctggcccgtgagtatccttagtagatcatgtgagtgttgtcactgtgtccatattagactatggaaactccagtattggaatcccatttgagaatgaagtgttgttttcatacaaaggaaaatacagtagctagttcagactattccatgatataagaagcaacaaaccctgcttaaaaggaaaaagcccccagaagtgaaatcacaaatgctgcattatcatgggttgcaataaacatgggtgtgtgtagaaagaggctgtggcaacacttttgtctcctgccatgtcaaccgaggtgatggaaaacatgacagcctaaaataattaaaagtaagtggttggaaagaaaagccagtcttggaattagggaaaacaggtgtatggtgccagcacagagtttcattctttttgtgcatgtgattaagatttggattgggaatatcattgtaaagtgaagagcctgagaaatatctagatatatgtgaaccaaactgtgtgcagcttagattgatgcagaaagaacacttttttacacttgcaaatgttttgatacaaattaaatacagaaaatactacgtgttatattgaaggagaaagaaaaatagtctgtggacctcgacccctaagctctgaagacacatgctaataataattggcaaaggtatttgttttactctrtaaagttaagaagttaaacccacatgcaggtgtctaaaattcgatggatatgcaggtgtca

SEQ ID NO: 714396 - DNA, 663 bp, Homo sapiens
tgctcggccgccgccccgccgtcgccccacccccgcgccgccggtcccgcccggcatcgacccccgcaggcaccgctgaccatcagcccggcgcactcyccttctcgcgaccctcctccacgtggagcacccccctcccctccacactcactctgtttttcgagttcgagggtattctgaaatcctttggaaataacaatatgtggcaaatggcactttacataagacccacttactctccagagctgctgctgcttccactcactgcctgtttacaagcagtgagtcttggcagggaaccctgccactcacttcccctctcctgcgagcgtcggtttacgtgcggtgcgcagactgcggggtttccgttcgctgctgctttgctcgctgccctggcgaaccggaaagatccaaggtgtttgttcacgaaaacatacgcgaacttggtttgggagaaatgggggcgcttaatttttcatgcttccgttactaccaagggttttttcattttctttggtaccttcttgtgtctctctcttggagtggttgtttttgaatcatggcgattttaatttgtctttccttaccctcacattaatccctaggtagaattcgctgctgtagtgtttcagaccgacgctaggggtgtgtctcccgcctctg

SEQ ID NO: 714397 - DNA, 1187 bp, Homo sapiens
  misc_feature 393, 394, 395, 396, 397, 398, 399, 400, 401, 402, 403, 404,405, 406, 407, 408, 409, 410, 411, 412, 413, 414, 415, 416,417, 418, 419, 420, 421, 422, 423, 424, 425, 426, 427, 428,429, 430, 431, 432, 433, 434, 435, 436, 437, 438, 439: n = A,T,C or G
  misc_feature 440, 441, 442, 443, 444, 445, 446, 447, 448, 449, 450, 451,452, 453, 454, 455, 456, 457, 458, 459, 460, 461, 462, 463,464, 465, 466, 467, 468, 469, 470, 471, 472, 473, 474, 475,476, 477, 478, 479, 480, 481, 482, 483, 484, 485, 486: n = A,T,C or G
  misc_feature 487, 488, 489, 490, 491, 492: n = A,T,C or G
gggaaatattagaaatatctcctttaaaaccaagaaggtggccgagtgcagtggctcacacctgtaattccagtactttgggagctgaggcgggtggatcacctgaggtccggagtttgagaccagcctgggcaacatggtgaaaccctgtctctactaaaaatacaaaaattacctgggtgcagtggcatgcacctgtaatcccagctactcaggaggctgaggcatgataatcacttgaacccaggaggtggaggttgcagtgagctgagattgtactactgcactccagcctgggcgacagagggagactgtgtcttaaacaaaacaaaaccaaacaaaaaaaaccaaaaaaccccacaaaaaaccccagaaggagacacatgatcaccnnnnnnnnnnnnnnnnnnnnnnnnnnnnnnnnnnnnnnnnnnnnnnnnnnnnnnnnnnnnnnnnnnnnnnnnnnnnnnnnnnnnnnnnnnnnnnnnnnnntaattttatgtaacgcaatgcaactttatggaatggaaggcaatgatatgcaaacaaagggaagggaacgatagggaagggaagggaaggatagggaagggaaaagaaaggaggaaggagaggaaaggaaaggagaggaggatggagggagggttggaagagggacagaaggagggagggaggttagcagagcagcctgcagatgaggcggacgcctattttacagcactctgacggggtccattagtaagaagagactaacgaagcagctgaattttcacacccatggggtgaggggagttgtggtggtacaaaaacagactccttcatgctctcaactgaatttcctttacaaggaaaaacaagtctcttgagaagttggaaaaacttaaaaacctgatattcattttcatmacagaagcacaaaatcttattatactttaataggatagcattataaactaaaggattctctcttctagccctgttatttatctttaaaagtgggtgggaacaagaacacagatgtgctttctggatcaggctcgcactcgggcccaccgccccgccttgctccagctctctccctgcctggactgcccccacctctaccctgccaagccctctcactctgcagggtgctgggagtcagggccttctgctaagtgcaggtgggtgggtgagcccctctcccg

SEQ ID NO: 714398 - DNA, 1131 bp, Homo sapiens
caggtagagccggactctgcccacagcatgtgctcatttgatacttacaggattccctctctgttcctaggacctattcctgtccagggccgttgaaaaggagtaatgaggttgggcaattggggaagttaggataggctcagcaaaatcttgggaggatgaataaatgtcacttaatcacatccacaggtgacaagcaggcagccatggggaaaaggcactcatagaacagtgacttgtaccatgctgttcttcagcatcttctgctggctgtgcgtgcagggtgatgatggcagcctacaggtatgccttcgggagcaggcagcctcctgtcaatggagaaggctcactgggtcactgttgactccatttttcttcatgaatcctccaggccttgccccgctaccccccacctaacatcccttcagtccactgatcttctccaggatcctgccttattccactcccacccagttttaaacctgggggaccattatctggtttctctgggtgtgggtgctaaagtcgggtggtctagtcttcccccatgctcctcccagtcaatcttgagcataaactctctgtcttgttttcttcagggtggctcctttggattgtcaagagccttttcttctgtcaacaaaacgctccttgcataaattaaaaaaaaaaaaaattggtcttcaaaatttttgaatttggaatttggaaatgaacaaaaaaaatkgacttttttctctttgaagtaccctttgaacaatttttaaattttgtataagtaaaataacttgtgggggtacagtgcagttttgagacctggagatgttgtgtagtggtgaagcctcagcttttaggatagccatcactcaaattacctgtaagtaatttctcatccctcaccctgctctcatccttccacccgcctgagtgtccaatgtctattgtttgaacaatcttaattccccccacccctgcaaatggcacagatgttttgaaggcaataattaagactgaggaattgtaaaaaagaaaagcacaaacgttgatatctcaatatgtgattatatttcattctcattggttctttgtgtggccaaataatttgggagcagaaaactgatatctacaaat

SEQ ID NO: 714399 - DNA, 1535 bp, Homo sapiens
tgtcatcagttttctatagtatataatcctttaattatgaaccacacatttttgttgaatctttctgccaaaaccttgagagttctgagaattggtaaaaattactacagttgtaatgctttacagtgtccagtcactctaatttttggagagcgagcataagcagagtgcttattttcacagacattgcagacagatatttggtttcactattggccytcccactttctagtcatttgaacttggctaagctccttagcctcattgtaagcttttgtttcttcatctctataaaaaggagtcttaatactacctacttacatcagagagtcattgtaatgactaaatgaggtaataaatatatagcctttttagtataatgcttgccatttggtaagtacacggtaaatatttggtattatattaattttagttttagttttagttttgcttttatattaattttaggctaaactggtgttttggagaaaattcaaaatatagtggctccaatacagtagaactatattgacttacaggtccaggctggcaaggtccctacggtccctgatgtcatcaaagggttcagatgtcttctatcctgttaatccacctagcttggcctccagcctggtataatgtcctcttgtatttggtcaagactgggtcactgccacttctttgccccactctggaggaagtccagagcaaatgctttctttctataccagtgactcacgtgtgtagtacatagcaagttgcacatatcacttttgcttactctattggtaagagcagctaaaagctgtaatagaatctgggaaatgtcttttttttctgggcagccatgtgcacagttaaaattcttaatctggaagaaatgctggtatttataggacaagttaccaaacaaattctgcaatagctatttctgctattattactgctagtagcattactattactgcagaattacattatacacctacagtatttgtacagtttcaattacatgcactaaggtaagggaagagtgggcagagaagagaatgaatttttttctgcttcatgtgagatgaaataggaaatatgagtggttctctgctgagtgtgattcttgtgtttaaagatagatatttttaaacaatatacaaaccaatcactttgtctgatggtcaggtagggtaatatcaatatagtacaattttgggagaagattggctgagctggacttactgatagtgtgatcttttgagatgcaccatcctatgagattttcaaagataatttcacctattcctaacttttgtcttattagctgtttggacagtttaacacatgggtaagatttaactaccacagtactagtaaaaaattagtatacatttggaaaactgctgtcactcagctgtttagtttactagttacagcatatcagacagagaaagtttttttagttaagaaatgtatagatgttgaattccttatagctaggttacagaaaaattgatattctagttttgagatagtgaaca

SEQ ID NO: 714400 - DNA, 1535 bp, Homo sapiens
tgtcatcagttttctatagtatataatcctttaattatgaaccacacatttttgttgaatctttctgccaaaaccttgagagttctgagaattggtaaaaattactacagttgtaatgctttacagtgtccagtcactctaatttttggagagcgagcataagcagagtgcttattttcacagacattgcagacagatatttggtttcactattggccctcccactttctagtcatttgaacttggctaagctccttagcctcattgtaagcttttgtttcttcatctctataaaaaggagtcttaatactacctacttacatcagagagtcattgtaatgactaaatgaggtaataaatatatagcctttttagtataatgcttgccatttggtaagtacacggtaaatatttggtattatattaattttagttttagttttagttttgcttttatattaattttaggctaaactggtgttttggagaaaattcaaaatatagtggctccaatacagtagaactatattgacttacaggtccaggctggcaaggtccctacggtccctgatgtcatcaaagggttcagatgtcttctatcctgttaatccacctagcttggcctccagcctggtataatgtcctcttgtatttggtcaagactgggtcactgccacttctttgccccactctggaggaagtccagagcaaatgctttctttctataccagtgactcacgtgtgtagtacatagcaagttgcacatatcacttttgcttactctattggtaagagcagctaaaagctgtaatagaatctgggaaatgtcttttttttctgggcagccatgtgcacagttaaaattcttaatctggaagaaatgctggtatttataggacaagttaccaaacaaattctgcaatagctatttctgctattattactgctagtagcattactattactgcagaattacattatacacctacagtatttgtacagtttcaattacatgcactaaggtaagggaagagtgggcagagaagagaatgaatttttttctgcttcatgtgagatgaaataggaaatatgagtggttctctgctgagtgtgattcttgtgtttaaagatagatatttttaaacaatatacaaaccaatcactttgtctgatggtcaggtagggtaatatcaatatagtacaattttgggagaagattggctgagctggacttactgatagtgtgatcttttgagatgcaccatcctatgagattttcaaagataatttcacctattcctaacttttgtcttattagctgtttggacagtttaacacatgggtaagatttaactaccacagtactagtaaaaaattagtatacatttggaaaactgctgtcactcagctgtttagtttactagttacagcatatcagacagagaaagtttttttagttaagaaatgtatagatgttgaattccttatagctaggttacagraaaattgatattctagttttgagatagtgaaca

SEQ ID NO: 714401 - DNA, 1135 bp, Homo sapiens
tctttcgcttattaaacttttgctccaacctcacccttggtgtccatgctccttaattttcttggtcgtgagacaaagaactctgggtaacacctcaaacaagactgcttcatctagaccatataactggcaagcagcagagtcaggatttaaacctacatccatttaactccaaatcctgaacggtttccaataaacaactttacatttgtgtagcaaattccaggctatgtaagaaaggaggactccayggtgcaggcagagaaaaataccatatattgttcaaaattgtatcacagtgacagttatctactaatatgaataccctaagttattggcatcgctgaaatgaggtgatgaagagtatggctgacaatgcattaaaaaataataagaaacaaagtaacaagaagaccaacaaagcaaagctcagtttaaattaatgaggcctagattatgaatgtaaagaaagttttaaaagtaactattcagagaatcaacaatgagaaatctagtcactaaacttaagcaaaagcattaagtccaaaagtgaatgagaaaaaaatctgtcagaggctgctacaaatgagtaaattacaatttatttaaaacaaaaattatttacaaaagagtaaaatgtttttcagatatttaacaaaatggcacaaaaatagttattaatgcaaagtctaacatttttaataaaaactcagtttttctctaaaagatttttatccttgattatacctagaatcctgataaaaaagcaattcagtgtaaaggctaagaaatatttataaagttaagctactaaaattccacataattaataattacaaaagcaacattctagaagttattggggatggcacttctccaagaaattaaatgagttagtgggatgaaagtaaaaaggaacttgagctggtattagggttgccttgtattgtgtttactccaagcacttcggtttatatcagaaaatgctgagtctagagggtatacacagggcatcttccctaagtatcagttttactatattttgcaaagaatacttttaccttcatacacaagcacataaagcagatcacagaagtctcatgaaacttagcaggggaatctaattctgaaataa

SEQ ID NO: 714402 - DNA, 603 bp, Homo sapiens
taacttagtaaatgctggagccagcaatctggatcaggagcctcagccttaaccagtaaggcatgtaactgttctagtgaaactactgtctcttctttaaatagctcctagattattaccagtatcmctgactattgaatctgacttggaaagagagatgacgacaacaaaagctatattaaggaaaaatgtaacagaattacaggaacagacaaacctagattagtaaaaagtcagaatgttttgttttgttttgttttgttttttttgagacaggatctcgctctgtcacccaggctggagtgcagtagcaccatcatggctcactgcagcctcaaactcctggcctcaagcaattctcttgcctcagcctccctaatagctgggactataggtgtgctggggcctcaccaacttgttgaccaagctggtctcaaactcccaacctcaagtgatcctcctgcctcagcatcccaaggtgctgggcttacaggtgtgagccactgtgcccagccaaagtcagaattttacataattttaaaataggtgtggtggtgcatgcctgtagtcccagatactcagaaggctgaggcagaaggatca

SEQ ID NO: 714403 - DNA, 1290 bp, Homo sapiens
agacacccggaaatacagtgattcttaaggatgcaaaggtttgagaagagctaagcaagactaaaggaatraacagaaaggtgcatatgcctaaccattcaaatcattgtgcatttaagataaggccaggcacagtggctcacgcctgtaatcccattttgggaggctgaggtgggtggatcgcttgagctcaggagtttgagaccagcctgggcaacatggtgaaaccctgtctctaccaacaacaacaaaaatatataaaaattagccaggtctggtggcacttgcctgtggtcccagctacttggaggggctgaggatgcaatgagccgagatcatgccactgcactccagcctggatgacagagtgagaccctgtctctaacaacaaaaaaaaaggtaattcaaatttctagccatgaaagagatggttggataagtccaatatgctcctgtttgcatagagtttattcaaattgggacattataaagttcccacaaccttagtttatggtgataattttaactgttgtaaaggtagtagagtcactgtaagagtgaggttagactaatgtccatgacttctaggactttcatctattggtatacttgtatatgtatgcatagcacatatacaataggcattgcagcattgtttgtaaaggaaaatattggaaacaacataaatatgttactggtagagtaatgtatgatatatccacacaatggaataccatgctgccattaaacaagatagctcaaataatccccaaaagtaaaaaagcagttagaaaacgtggtaggtcatcacatatacatatggtatataaaaaatatatatacatacatgctcccttttgcatgtatctctgaaagatacacaagatattgataactggttgtttctggaggaatgcagtgaggaaattttcactgcatgccctgttgctttttatttccgtgtgcatacttcctattgaaatatcacatatacgtaaacacagctctgcccaactcagtgagtaaactaaatgcactgtgtaattccaccacacctcataaaacaagaatgaaatatttataatagaaatgtaaaggcatatgggaacacagaaaagttgaagattaaatgttgagaggaagagtaacttcaggccatatttcaagaggcattgataatttcagtcattgctatcaaacagactcttaaggttttttgtgtttttttacttttttcttatttttagagatgggggtctctctacgttgcttaggctagtcttgaactcc

SEQ ID NO: 714404 - DNA, 1290 bp, Homo sapiens
agacacccggaaatacagtgattcttaaggatgcaaaggtttgagaagagctaagcaagactaaaggaatgaacagaaaggtgcatatgcctaaccattcaaatcattgtgcatttaagataaggccaggcacagtggctcacgcctgtaatcccattttgggaggctgaggtgggtggatcgcttgagctcaggagtttgagaccagcctgggcaacatggtgaaaccctgtctctaccaacaacaacaaaaatatataaaaattagccaggtctggtggcacttgcctgtggtcccagctacttggaggggctgaggatgcaatgagccgagatcatgccactgcactccagcctggatgacagagtgagaccctgtctctaacaacaaaaaaaaaggtaattcaaatttctagccatgaaagagatggttggataagtccaatatgctcctgtttgcatagagtttattcaaattgggacattataaagttcccacaaccttagtttatggtgataattttaactgttgtaaaggtagtagagtcactgtaagagtgaggttagactaatgtccatgacttctaggactttcatctattggtatacttgtatatgtatgcatagcacatatacaataggcattgcagcattgtttgtaaaggaaaatattggaaacaacataaatatgttactggtagagtaatgtatgatatatccacacaatggaataccatgctgccattaaacaagatagctcaaataatccccaaaagtaaaaaagcagttagaaaacgtggtaggtcatcacatatacatatggtatataaaaaatatatatacatacatgctcccttttgcatgtatctctgaaagatacacaagatattgataactggttgtttctggaggaatgcagtgaggaaattttcactgcatgccctgttgctttttatttccgtgtgcatacttcctattgaaatatcacatatacgtaaacacagctctgcccaactcagtgagtaaactaaatgcactgtrtaattccaccacacctcataaaacaagaatgaaatatttataatagaaatgtaaaggcatatgggaacacagaaaagttgaagattaaatgttgagaggaagagtaacttcaggccatatttcaagaggcattgataatttcagtcattgctatcaaacagactcttaaggttttttgtgtttttttacttttttcttatttttagagatgggggtctctctacgttgcttaggctagtcttgaactcc

SEQ ID NO: 714405 - DNA, 641 bp, Homo sapiens
ttttcaagtctttataaggcaggtatggcagtacagcaaacaagcaacccaaatgtcacaggtgaatgattaaataaattacagtaaatacatgaaatggcttacataattattaaacatgttatcatgacaaacataggaaaatgttcacaatgcagagttaagtgaacagaacatgatacggtaacctcgattttataaaagggaaacaatagaaatgaatacataataaaaaaatactagaagaaaacactccaaattataatacagaggtaggtattttgagtgatgaattatggataatttttatttcatatacttttatctactttccaaattttctgcaaaatatrtattaccacaatactcagaaaaaaaatatagtataaaaaactgaaacaattcaaaataagcactaaaaacctatgttgcagctgggcacagtggctcatgcctgtaatcccagcactttgggaggccaaggcaggtggatcacctgaggtcaggagttcaagaccagcctggccaacatggtgaagccccgtctctattaaaattacaaaacttagctgggtgtggtggtgtgcacctgtaatcccagctactcagaaggctgaactaggagaattgcttgaacccag

SEQ ID NO: 714406 - DNA, 641 bp, Homo sapiens
ttttcaagtctttataaggcaggtatggcagtacagcaaacaagcaacccaaatgtcacaggtgaatgattaaataaattacagtaaatacatgaaatggcttacataattattaaacatgttatcatgacaaacataggaaaatgttcacaatgcagagttaagtgaacagaacatgatacggtaacctcgattttataaaagggaaacaatagaaatgaatacataataaaaaaatactagaagaaaacactccaaattataatacagaggtaggtattttgagtgatgaattatggataatttttatttcatatacttttatctactttccaaattttctgcaaaatatatattaccacaatactcagaaaaaawatatagtataaaaaactgaaacaattcaaaataagcactaaaaacctatgttgcagctgggcacagtggctcatgcctgtaatcccagcactttgggaggccaaggcaggtggatcacctgaggtcaggagttcaagaccagcctggccaacatggtgaagccccgtctctattaaaattacaaaacttagctgggtgtggtggtgtgcacctgtaatcccagctactcagaaggctgaactaggagaattgcttgaacccag

SEQ ID NO: 714407 - DNA, 641 bp, Homo sapiens
ttttcaagtctttataaggcaggtatggcagtacagcaaacaagcaacccaaatgtcacaggtgaatgattaaataaattacagtaaatacatgaaatggcttacataattattaaacatgttatcatgacaaacataggaaaatgttcacaatgcagagttaagtgaacagaacatgatacggtaacctcgattttataaaagggaaacaatagaaatgaatacataataaaaaaatactagaagaaaacactccaaattataatacagaggtaggtattttgagtgatgaattatggataatttttatttcatatacttttatctactttccaaattttctgcaaaatatatattaccacaatactcagaaaaaaaatayagtataaaaaactgaaacaattcaaaataagcactaaaaacctatgttgcagctgggcacagtggctcatgcctgtaatcccagcactttgggaggccaaggcaggtggatcacctgaggtcaggagttcaagaccagcctggccaacatggtgaagccccgtctctattaaaattacaaaacttagctgggtgtggtggtgtgcacctgtaatcccagctactcagaaggctgaactaggagaattgcttgaacccag

SEQ ID NO: 714408 - DNA, 1237 bp, Homo sapiens
tgcctaatgctaaatgacgagttaatgggtgcagcacaccagcatggcacatgtatacatacgtaactaacctgcacattgtgcacatgtaccctaaaacttaaggtataataataaaataaaaaaataaaaaaaagaaagaaagaaaggaaagagagagagagagaaagaaaagaaagaaaaagagaaaaaaagaaagaaaaagaaagaaagaaagaaagaaagaaagaaagaaagaaagaaagaaaaaaagaaagaaaaaaagaaaagagaaagaaacctgaggaaagaatcccccagtttggttgggagcttgaacaagttgacctcttggatctctttgagatttgggagtttgactctatgatcctggccctccctaggtacaaagggcatgttcatttggccctctgtgtaagcaaacccaagccgtaccaggcatcccctayagcatttgactttctccatgggtaggaacgaccgtcacccccccgtctctctactgtcttccattctcactcttcccagcccacgtacatacatggtggtcatcagctggcccatgcagcactgcctcttcctgctcagaaaaggggtgtgcagacctggggccagcccccatgtggactctttcgctccttcacaggtctggggagcagacagcccttctttagcctggaagcctgccaggggatcctggccttactggacgtatcctttcaggtttgtgggtggatgcttgctgttggttgagagcttcactctggagctaggcagagtatatttgaatcccaaccccaatccttgctaattgtgggatcctggacaagccactgagcctcattatgtatccagatgctcatctgaagcatggagagagtgttgaaacttacttggtaggattaacgtgggaatgcaaatgagataatacaggtaaaatgctggggtcagagctatcatctaataggtgaccaatattagccatccatcacaataatctcatttcctgggaatgaggatgaggcagctagaaggtggtggttagtaacagctctccaggtttacaagagcctttacaaaagccttggggccctatgttttccatttaataactgggcggtggctgcccccatgcacagatcaggaaaccagtgctcagggaagttaaacaacatgccacaaactcagctgtcctttctcagccctgcaatttttctaacaaacacactgcctttct

SEQ ID NO: 714409 - DNA, 1237 bp, Homo sapiens
tgcctaatgctaaatgacgagttaatgggtgcagcacaccagcatggcacatgtatacatacgtaactaacctgcacattgtgcacatgtaccctaaaacttaaggtataataataaaataaaaaaataaaaaaaagaaagaaagaaaggaaagagagagagagagaaagaaaagaaagaaaaagagaaaaaaagaaagaaaaagaaagaaagaaagaaagaaagaaagaaagaaagaaagaaagaaaaaaagaaagaaaaaaagaaaagagaaagaaacctgaggaaagaatcccccagtttggttgggagcttgaacaagttgacctcttggatctctttgagatttgggagtttgactctatgatcctggccctccctaggtacaaagggcatgttcatttggccctctgtgtaagcaaacccaagccgtaccaggcatcccctatagcatttgactttctccatgggtaggaacgacygtcacccccccgtctctctactgtcttccattctcactcttcccagcccacgtacatacatggtggtcatcagctggcccatgcagcactgcctcttcctgctcagaaaaggggtgtgcagacctggggccagcccccatgtggactctttcgctccttcacaggtctggggagcagacagcccttctttagcctggaagcctgccaggggatcctggccttactggacgtatcctttcaggtttgtgggtggatgcttgctgttggttgagagcttcactctggagctaggcagagtatatttgaatcccaaccccaatccttgctaattgtgggatcctggacaagccactgagcctcattatgtatccagatgctcatctgaagcatggagagagtgttgaaacttacttggtaggattaacgtgggaatgcaaatgagataatacaggtaaaatgctggggtcagagctatcatctaataggtgaccaatattagccatccatcacaataatctcatttcctgggaatgaggatgaggcagctagaaggtggtggttagtaacagctctccaggtttacaagagcctttacaaaagccttggggccctatgttttccatttaataactgggcggtggctgcccccatgcacagatcaggaaaccagtgctcagggaagttaaacaacatgccacaaactcagctgtcctttctcagccctgcaatttttctaacaaacacactgcctttct

SEQ ID NO: 714410 - DNA, 1237 bp, Homo sapiens
tgcctaatgctaaatgacgagttaatgggtgcagcacaccagcatggcacatgtatacatacgtaactaacctgcacattgtgcacatgtaccctaaaacttaaggtataataataaaataaaaaaataaaaaaaagaaagaaagaaaggaaagagagagagagagaaagaaaagaaagaaaaagagaaaaaaagaaagaaaaagaaagaaagaaagaaagaaagaaagaaagaaagaaagaaagaaaaaaagaaagaaaaaaagaaaagagaaagaaacctgaggaaagaatcccccagtttggttgggagcttgaacaagttgacctcttggatctctttgagatttgggagtttgactctatgatcctggccctccctaggtacaaagggcatgttcatttggccctctgtgtaagcaaacccaagccgtaccaggcatcccctatagcatttgactttctccatgggtaggaacgaccgtcacccccccgtctctctactgtcttccrttctcactcttcccagcccacgtacatacatggtggtcatcagctggcccatgcagcactgcctcttcctgctcagaaaaggggtgtgcagacctggggccagcccccatgtggactctttcgctccttcacaggtctggggagcagacagcccttctttagcctggaagcctgccaggggatcctggccttactggacgtatcctttcaggtttgtgggtggatgcttgctgttggttgagagcttcactctggagctaggcagagtatatttgaatcccaaccccaatccttgctaattgtgggatcctggacaagccactgagcctcattatgtatccagatgctcatctgaagcatggagagagtgttgaaacttacttggtaggattaacgtgggaatgcaaatgagataatacaggtaaaatgctggggtcagagctatcatctaataggtgaccaatattagccatccatcacaataatctcatttcctgggaatgaggatgaggcagctagaaggtggtggttagtaacagctctccaggtttacaagagcctttacaaaagccttggggccctatgttttccatttaataactgggcggtggctgcccccatgcacagatcaggaaaccagtgctcagggaagttaaacaacatgccacaaactcagctgtcctttctcagccctgcaatttttctaacaaacacactgcctttct

SEQ ID NO: 714411 - DNA, 1237 bp, Homo sapiens
tgcctaatgctaaatgacgagttaatgggtgcagcacaccagcatggcacatgtatacatacgtaactaacctgcacattgtgcacatgtaccctaaaacttaaggtataataataaaataaaaaaataaaaaaaagaaagaaagaaaggaaagagagagagagagaaagaaaagaaagaaaaagagaaaaaaagaaagaaaaagaaagaaagaaagaaagaaagaaagaaagaaagaaagaaagaaaaaaagaaagaaaaaaagaaaagagaaagaaacctgaggaaagaatcccccagtttggttgggagcttgaacaagttgacctcttggatctctttgagatttgggagtttgactctatgatcctggccctccctaggtacaaagggcatgttcatttggccctctgtgtaagcaaacccaagccgtaccaggcatcccctatagcatttgactttctccatgggtaggaacgaccgtcacccccccgtctctctactgtcttccattctcactcttcccagcccacgtacatacatggtggtcatcagctggcccatgyagcactgcctcttcctgctcagaaaaggggtgtgcagacctggggccagcccccatgtggactctttcgctccttcacaggtctggggagcagacagcccttctttagcctggaagcctgccaggggatcctggccttactggacgtatcctttcaggtttgtgggtggatgcttgctgttggttgagagcttcactctggagctaggcagagtatatttgaatcccaaccccaatccttgctaattgtgggatcctggacaagccactgagcctcattatgtatccagatgctcatctgaagcatggagagagtgttgaaacttacttggtaggattaacgtgggaatgcaaatgagataatacaggtaaaatgctggggtcagagctatcatctaataggtgaccaatattagccatccatcacaataatctcatttcctgggaatgaggatgaggcagctagaaggtggtggttagtaacagctctccaggtttacaagagcctttacaaaagccttggggccctatgttttccatttaataactgggcggtggctgcccccatgcacagatcaggaaaccagtgctcagggaagttaaacaacatgccacaaactcagctgtcctttctcagccctgcaatttttctaacaaacacactgcctttct

SEQ ID NO: 714412 - DNA, 1340 bp, Homo sapiens
  misc_feature 884, 885, 886, 887, 888, 889, 890, 891, 892, 893, 894, 895,896, 897, 898, 899, 900, 901, 902, 903, 904, 905, 906, 907,908, 909, 910, 911, 912, 913, 914, 915, 916, 917, 918, 919,920, 921, 922, 923, 924, 925, 926, 927, 928, 929, 930: n = A,T,C or G
  misc_feature 931, 932, 933, 934, 935, 936, 937, 938, 939, 940, 941, 942,943, 944, 945, 946, 947, 948, 949, 950, 951, 952, 953, 954,955, 956, 957, 958, 959, 960, 961, 962, 963, 964, 965, 966,967, 968, 969, 970, 971, 972, 973, 974, 975, 976, 977: n = A,T,C or G
  misc_feature 978, 979, 980, 981, 982, 983: n = A,T,C or G
gcacttcaggaggctattttagaactcagtgtagtgaattttgctgctatcaaagaacaagtagtagagatggcatttcactggtgtcagtgtgcagtcatttgattgaaaaccttaatgtgtgttaagagccaacacagagggactactctcaaatttatgaaatgtaaatgactctattggataaataagatggtagagaacaatttacccacaattttttatttactatatcattgatactgaattaactatattaatagttaaattggaaaataggtaagctcagaagatgctgtagagtcacataaaggctaacttctagcattgggccaccargtaggtatttttgaaagggcttgactttgtattttttgctgctaaggaaagataaaacatttcagtagcaaactcaaactccttccctttactggtcctttttctaatactagttatttgcaagtaaattatgccaaggagaactcaaaatagatcagactcagaaagcattgtaagcaaatacatgagataacagagtgaattgaaggttttattcctaggggaccatgcagagtgcatggaataaggcatgggaattgaaagtaatctccttctgcaattccagttgatttccttaatgcatttgacacacaacttttaactgaatctcagtaaagtttatatacatatcagaaaattatcacatttcacaacagtgaaggataccaactgattactactattttctcccctattttgtgaaattgagactgagaatgcaaagctacaagatattgacagcaaaggtgaaaattagaattgagattttttaatttagattttatattcatctattaatgcagtgcttatgactgaagaaattnnnnnnnnnnnnnnnnnnnnnnnnnnnnnnnnnnnnnnnnnnnnnnnnnnnnnnnnnnnnnnnnnnnnnnnnnnnnnnnnnnnnnnnnnnnnnnnnnnnnactctaatagagaatatcaatcaaccataaaaagtctactaaggaattttcttttttttttttttttttgagatggaatttcactcttgtcacccaggctagagtgcaatggtgcgatctcagctaactgtaacctctgcctcccaggttcaagcgattctcctgcctcagcctcccaagtagctgggattacaggcatgcgccaccacacccagctaattttgtatttttcgtagagatggggtttctccatgttggtcaggctggtctcaaactcccaacctcaggtgatccacccacctcggcttcccaaagtgctgggattacaagcatgagccactgcacctggccaggaat

SEQ ID NO: 714413 - DNA, 1516 bp, Homo sapiens
catggtttatatataatctccatgtagaccaattattatttcaccaagcattcatggtgccattactatgaacaaatatagtaactgctagagatggaaagacaaaaataggtataaagcatattctccttaattaagatggttttaacttaatagttgataacttcaaaaacagtagtagtttagtgcacatcttctggagccttggagccttacctgcagagtaagactccaaactctactatagccacttggctgtgagacctttgacacattactgatgctttctgtgctcatgccccttatgtgtgtgtgtgtgtgtgtgtgtgtgtgtgtgtgtgtgtgtgtgtgtgtgtgwagagagagagaaagagagagaagaagaagaaaaatgcttatctcaaaacattgttgggaagattaaatgaattaatacattaacacaattagaacattgctagattcattccaagagttcaataattacttaatgttatatttgaatactgcattttaaatgatgaagcattaaatatgtcatatctcatttattttttcaatagttatctgaaaaaattattgtggttatttttcagaaaatataattgaaacatgggaacttatgaaaggttaaaaaataacaaaacagagtcttaacttttacctctgacttctaataacccattcagtttttttttctcacagttgccactctagttttatcttaggctctgctctctcttctaaactccaattccacagctgctaccagggtatttcactgacaccataaaatcaacctcaatatatggaggttctaaactaaattatctattccccaaatctgtttctcttcttgagttcctcatctgtgaatgagagaaacttttcctagcaaacattttcaaatattgctatcgtctcccattcctttcttcattatcctcacagatatctcattttctagacagccttcatctaactagcatttcttctatcatatcacacttggcaatgccactgaaatattcataatcagaaatttattaactacagtcatagtccattaattatttctcctctgtgaagtctctgcagagactaatccattccccacagtgcttgctgttgggctaatatttattgaaatcaaatatctgtccagcatttcacatagatgcttcatatacattattttctttaattttcacaatccaaaaacgaaatataatttaccaacaagctttagagataagaaaactgaggtttactttcttcaattagcatagttgtaattaaaatacaagcaaggccaattctaaatgtatgtgctacctctgtgttctcccccacctcccgacctttgatcgttttatttccttgctcaaaataacacataggatctcactgcctcacaaattgcatccaaactcattagcctattattttaatattctttgatctactttcaatataccattctaaacccaatttctatttctcacaaacacatttc

SEQ ID NO: 714414 - DNA, 606 bp, Homo sapiens
ggtggtataggcaccagagggaaccttctggtctgcaggttgtgaagaccatgggaaaagcacagcatctgggccagagtgcacagtacagtcctgaatggtttcccttggctaggagagggagttccccaaccccttgtgcttcctcggtgaggcaatgccccaccctgcttcggctttccttccttgggctgcatccactgtccaaccagtcccaatgagatgaaatgcagaaatcacccaccttctgcgtaggaaatgcagaartcacccaccttctgcgtatatcttgctgggagctgcagactggagctgttcctatttggccatcttcgagaataaagcctataaatttatttttaaaaatccattgtgatatgtcaggaggaaagatgtatgcaacgtcaatcattatcttgatcaactcttgcttatcacttaaaacactctatgtgcttagaattaggtgatattttactctacagcgttcattgtctcttatacacttttgacatgctcttcccttacttcttattagtctttttattgtctgtcctcagagttctatacttgaccttttattctctttaaccacttttcataagc

SEQ ID NO: 714415 - DNA, 1832 bp, Homo sapiens
tagagacataattttctcagtcttgggaaaaaatataattaataaaagatattttctttctgaacatgacaaaaatgaaactgagtcaaaatgggcttaaatcagtttaatattgtagtcctagcaaatcatgcaagttggtaaatgaccttgtcaaaacgcataagaccacttagaaaagtactgtttgagaataaaaacagaatgacaagtacattcaactttttctgtatatcaataaataataactatttgttatttagaaaaacaatttgaaggcatacacattaattaaagcagcaaatatttaattggacctcagtagtcacccaaaatatggtaggtaagtacattatagaatattgcagacaaaaattctagtgttttatatagtcttgtacagtatatgataataacataattttagacttccttatattttactatattacccatcttaattaagtccatctataatctttcttagttgtggaatttttaaaatatatacaatagtagaaagtatattttaatgaactttcaaataattgtcatcaaaatgttagaattaatattttcttactcttgtatatttagtatttttatttccatcttttacttttccctttatgaattttaatatgtaatttaaaaatataagttaatttaaattttgctgtttgaaaaactgttacatataatttattacacagcagttatattagggcctttcatattttgagatacattctgaatatatgatttgctctcaaataaacataatttttctatagttaatatcaatttttaaatttatacttaatatggaaaagtattctcctaatatttggttaaatgcctacatcataataatgcaacaatggtaggcaatattcttaaactaatttagtttaaagacaaaacagttgtaactatttaacagttaaattagtataaaaaaattaaaaaaaagaaattgacataaatgaaatggacgactctctagaaagttatttatttatttatttctctattcattttggctgaatagctgtgtgtgtttttgtagaagcatactgatggcaaagtcattaattaataaattttgccatattaaacataaaaatttcaaggaaaagagtccccattttctatacccctgacagaatcatacagatgagtctttcttaagttrttgtctcttctttgaagtatttcaacattctgcccagccttttgctctgtttttgaagtacacacaatgctttattctgcagtgtcctttagccattttgaaataaatataatgacttgaatttatagtgcctttcaggcacagactccatggtatgccatagatattaattgaatttcatgagccatatagtgatatacactaatcccaaaggacacatactatttttaaacactagagactcctagaagatacagatccttagatgtattatttatattttattgggtttcaactggcagacaggttgacctaacaacatagaacaaaacagaatgtgtggttttgcttcctaaatttacattagtgatatccagagctcagattccatgtaaggtactatgtatattattatttttttctttctcagtgttattgcaagatcttaatcattcaccatatactttatatagctttcttgatataaataaatgaatcatagatcatttctgagttaacaaaaatctttattattctgtaccataaaccatcttgatacatcataatcatctactctccatagtttacattagggtttatttttagttttgtttttctctactggtttggatgaatg

SEQ ID NO: 714416 - DNA, 1338 bp, Homo sapiens
ggggagaaaaacccaccgaccctgtggggctggtccctacactaaagaggctcctgatgccagatgccaatcacataaaggagatctaaaggttttttacttctctgatgaagactatttccactcacactattctacttctccttgccttgaaaaaaacatttgtgctgaggcaggcagatcacgagatcaggagatygagacaagcctggccaacatggtgaaaccccgtctttactaaaatacaaaaaattagccaggtgtgctggcaggcgcctgtagtcccagctactcgggaggctgcggcaggagaatcacttgaaccctggaggtggaggttgcagtgagctgagatcgtgccactacaccccagcatgggtgacagagtgagactatgtctcaaaaaacaaacaatttgtgaaccaatcctatctccgtattataattacatcattctcttatgtaccaattgcttacaagctattttacctggctaaatatgcactgtggcagatcagaatgtatttgttaaaagtaaaacagagtaatgaataagaagtacaacttgacttcacattttaggacactgaaaagaaatctcctttttaactcgtgactagctaaataaagcttactaaatttagcaatattactgctaaaaatcttatggaacaggaaggactataatttcaatcctttatttttatatgttgatcctttaacttgtatcctttcccctaagtagtttattctacagataccactagtcaaatcttcaaaacacaaggcttctgattttataagtcattttctcattccaaccctctgttcatagatgaaactcattaaacaaagaacttgtgcctgtcacaagaggttctaaacattatctgagaataaaacagaaataggccacataaggtataaatgttaactgtaacaccaaacaagtatggggagacgtgttagacttacaatcttccctctttttgtggcaggataagaaatggtttacttaagatgcaaaagactgaagcactggcaagtttgtgagcaaagaggcacaattctacactgctggtaaatgaactgacatgtacacaaaactacagttacaacagcactgcttataataatagaaatcttgaaacaatataaacatttaaatattggaaattgtggctgggtgcagcggttcacacctgtaatctcagccctttgggaggctgaggagggtggatcatgaggtcaggagtttgagaccagcctggccaacatggtgaaaccccatctctactaaaaatacaaaaaattagccaggtgtggtggcaggcactt

SEQ ID NO: 714417 - DNA, 1287 bp, Homo sapiens
aaataaaaatacaaggtacccagttaaatctggatttcagataaacaataaataatgtaaaggcaaagaaaatcatgaatgttgagggttagaaaaatcaatgtgatccatcagacatttatttgatgcaaaactgtgttcaaaatacatgccaagtactagagaattaagaaatacatggttcctgacactgaagaggacatagacacatgcaacagtctcaaaaattaacatgtattgaccactattctaagtggtttacaggcattaactcgtttaacactcaccaccctgaattaagcactactgttatccctattgaagacataactggagcatagagaagttcaaagaggaagttgtccaaggtctcagaaaaaacacacacacacataatattcagtgggcctctggtagagcctggatattgttcaagatgggtggatctggaagtgagatttgagctgaacctcgaaggaagatacaacttcaataggtgactattagaggaagaatattctgggcagaggaacagcttggaggtaagagaacataatcaagaaatgggagtaaagttgctggaatattagaaatatagtagtaggaaggaaagattaggcaagttaaccaggcagtgaccatactgtggaggaagtttgccctgttgaatctgcatatatggtgaaccactaatggaactggggtaaatagctggtgtggtggtgcacgcctgtagtcccagctactctaaagactgaggcttgaggaaccctcgagtccaggggattgagtccagcctgaacaacatagctggatcccatctctaaaacataaataaataaaactaaaaaaaactgggttttttagaggcagggtctcactatatcaccaggctgaagtgcagtgcagttcagtgacactatcatagctcactgcaaccttgggaactcctgggctcaagcaatcttcctgcctgggtctcccgagtagctaggactacaggcacatgccactacgcatttttttttttttttttttttttgtagagacaaggtctcactatgttgcccaggctggcctcaaacttctggcctcaagcgctcttcctgccttgtcctcccaaaatactagaattgcaggcatgagccaccatgccagacttaaaaaaaawttttttaagtatttgtgggaagtaaatggacaccatgttgagttcagcttttagaaagatgattttggtaatagtacaaaagatagaggggatgagatgaaaaatcagaggctaca

SEQ ID NO: 714418 - DNA, 570 bp, Homo sapiens
cagatcatcttaaggaacttaatgttttcaccacagccttcagatgaagccaggtgattcaatgacctcattgtggctgctttcattttatagtgtgaaagctcaccttcaggttaaaaaaaacaacaaaaaatacaacactaaaaagtgtatgcaagacaatcaatcatgtagccagaaattgggattttattatacatttaaaagaaaaatcctgaaggattttaatcaagaaagtaagatgacctggctgttgtatgaagaacagatggtacaagataagaagtggaaaaggaaaggccagttaggagkcctaacagaagagacgttcagggttagaatcagaactagggtgaagttcaggaaggatctagacagagaggagagagttgtagttaatggtggtatgaagaatggccataaggttgggtgaagtggcaagactgtgacaaagtattccaggaattggtcctacccactccaccaatcatttccctgacatttttctcacttttaactttttccttcatagcattgcaacaattgtaatgatttatttgcactgtaaat

SEQ ID NO: 714419 - DNA, 560 bp, Homo sapiens
  misc_feature 4, 5, 6, 7, 8, 9, 10, 11, 12, 13, 14, 15, 16, 17, 18, 19,20, 21, 22, 23, 24, 25, 26, 27, 28, 29, 30, 31, 32, 33,34, 35, 36, 37, 38, 39, 40, 41, 42, 43, 44, 45, 46, 47,48, 49, 50, 51, 52, 53, 54, 55, 56, 57, 58, 59, 60, 61,62, 63: n = A,T,C or G
  misc_feature 64, 65, 66, 67, 68, 69, 70, 71, 72, 73, 74, 75, 76, 77, 78,79, 80, 81, 82, 83, 84, 85, 86, 87, 88, 89, 90, 91, 92,93, 94, 95, 96, 97, 98, 99, 100, 101, 102, 103: n = A,T,C or G
gcannnnnnnnnnnnnnnnnnnnnnnnnnnnnnnnnnnnnnnnnnnnnnnnnnnnnnnnnnnnnnnnnnnnnnnnnnnnnnnnnnnnnnnnnnnnnnnnnnnngtacctataatcccagctacttgggaggytgaggcaggagaattgcttgaacctgggaagtggaagttgcagtgagccaagatcacgccattgcacttcagcctgggtgacagagcaagactctgtctcaaaaaaaaaaaaagtaatttacaaaaatatgatattggctgttggcccatgaggggatgggcagattattggaatacactgagcagtccaggagtagtttcagatgtttatttgggctttaatataactttgttataatacattttgaacatttagatcattgtgaaaaaataatctgtaatctcaacaactaggtgttctctggtaatattttggttcacttgtttgtgaacttctctttttttttttaaccatatccttcttcgtaccttttctttttcccttttaaatacttaattttcggccgggtttgtgtgcgtagctcatg

SEQ ID NO: 714420 - DNA, 560 bp, Homo sapiens
  misc_feature 4, 5, 6, 7, 8, 9, 10, 11, 12, 13, 14, 15, 16, 17, 18, 19,20, 21, 22, 23, 24, 25, 26, 27, 28, 29, 30, 31, 32, 33,34, 35, 36, 37, 38, 39, 40, 41, 42, 43, 44, 45, 46, 47,48, 49, 50, 51, 52, 53, 54, 55, 56, 57, 58, 59, 60, 61,62, 63: n = A,T,C or G
  misc_feature 64, 65, 66, 67, 68, 69, 70, 71, 72, 73, 74, 75, 76, 77, 78,79, 80, 81, 82, 83, 84, 85, 86, 87, 88, 89, 90, 91, 92,93, 94, 95, 96, 97, 98, 99, 100, 101, 102, 103: n = A,T,C or G
gcannnnnnnnnnnnnnnnnnnnnnnnnnnnnnnnnnnnnnnnnnnnnnnnnnnnnnnnnnnnnnnnnnnnnnnnnnnnnnnnnnnnnnnnnnnnnnnnnnnngtacctataatcccagctacttgggaggttgaggcaggagaattgcttgaacctgggaagtggaagttgcagtgagccaagatcacgccattgcacttcagcctgggtgacagagcaagactctgtctcaaaaaaaaaaaaagtaatttacaaaaatatgatattggctgttggcccatgaggggatgggcagattattggaatacactgagcagtccaggagtagtttcagatgtttatttgggctttaatataactttgttataatacattttgaacatttagatcattgtgaaaaaayaatctgtaatctcaacaactaggtgttctctggtaatattttggttcacttgtttgtgaacttctctttttttttttaaccatatccttcttcgtaccttttctttttcccttttaaatacttaattttcggccgggtttgtgtgcgtagctcatg

SEQ ID NO: 714421 - DNA, 1070 bp, Homo sapiens
tgagtataaaacattcatggaatgtcaactttagtcccttacagttgacaaactgtcacctttgaatactgcatttaaaaattgaaatcaccgtaatatatcttattccgactttcagctgacttagaaatttcagtcttcaagatcactcagatattaagatgagactataacccatgctcatttccacttctcaaaaaagtctctatgactaagatggtgcaactcaccggtactaatagattaaggaaacttcttttgtttattttttttttttttgagacggagtctcgctctgtcacccaggttggagtgcagtggcacaatctcagctcactacaacctccgcctcccaggttcaagagcttctcctgcctcagcctcctgagtaccttgggattacaagcacgcatcaccaygcccagctaagttttgtatttttagtagaggtggggtttcaccatgttgatcaggctggtctcaaactactgacctggtgatctacccacctcggcctcccaaagtgctgggattacaggcatgagccaccgcacccggcccatattcttaactttatgtaaattaaacaatattttacttaaatgttttttgcctacagttttctgtccaaactagagtaagcttacataattcattttgcatattatccctctgcaacttctgtgtataaactgtgtgtctacattgaatttctctaagtctaataatcatgctcattaactcagattataaaatgaagtgtgaaatttgtttctgtttttttttttattctttttgatggagtcttgctctgtcgcccaggctgaagtacagtggtaccatctcggttcactgcaacctccacctccaggttcaagcgattctcctgccttggcctccccagtagctgggattacaggcgcctgccaccaggcctggctaatttttgtatttttagtagagacagggtttcaccattttggccaggctggtctcgaacacctgacctcaagtgatccccacccgcctcggcctcccaaagtgctgagattacaggcgtgagccaccgc

SEQ ID NO: 714422 - DNA, 1279 bp, Homo sapiens
caaaggatggaggttttttgaggctgattttctgttcacctattttgctggccctacaagctaatccayagttactcatatgtaacagtctcagactgtaggaagtaagctcacaatgcctttgaaaagtgaatcttgagcaagtcattttaatatattgcaaaaagaattactttagactgcactaatcaaaagaaaaaagtcttttaatttattgacatttactgggctgaagttgcctttacactatccatgtggaaaattatgaatgtaggggtcttggtaaatgaactgtccttaaaatttgagcaaattacatgtaggcaaataaatactactagttaaaaatgtttcctctattaacttatagtaaaacccttagccaggattcaatatcagtatgttagtatgctcaagattagaatatttgtttggaagtaaattaaggcatttccttaaaaacagtattgtttataatttagactttcacaaatttaggtaggttctccttcaagtactattctaagtttgaataactctttattctacatttcttactccagcagggcgctgcaaatgttcccgctcctcatatgattttgtgagagtcactgtcttgctctggcagccttacaagtgttccactcagatctctcctcaaaagcacctgctgtggagagcgcagctgactgacagccttcagctgccacacctttggatccactgtggagttcgtgataagccacgcttcccctggctgcttccaggctttgattgagcaggtactagaacctggcctttcctgtctgcaaagatttagctggcaccactagcagaatgcctctctagtcacagaatcccacctagcagagcatccacaagaaaacttactttatagaaaaggaggtacaggaataggccatgtccatgaggtctaattgttttatcatatactgcactatttaggtgaagttggcctcatagagtactggaaaagcctacttaagtcacagcgaaatcagcagctcagagacaataatctgcaaggatggcatgacatctctcagtatttagtataggcactaatcagagatttctacatggcactgtgtctctagtacggcaaatacatggatctaggaaccaaaaggtgaaatcacaaatggctttatttaaaatcactcctaataacccactggagaactctgtgcttcactttccccaactctgggttgagtagaattacaggttttctctcttgcaaaggggtagagcggga

SEQ ID NO: 714423 - DNA, 594 bp, Homo sapiens
caactttcttctgctttaaaataaatcactttttatattttatmtttatatataaaaaactatagttttttatatttccatgtgagttttagatacaactcatcaatttttataaaagtcatgcgtgtatgtgtgggtctatttctaggttttctattctgttccatttatccacgtgtctatccactatgaattaccacacagttgtgattagtgcatcaacataagcctggaaactggattgattcctcccacttcatttttcttttaaaaattgtttatttattcctatgtctttctacataagtttgagaataaacttgtctgcatccacaaaaattttgctggaattttgatagacactggattgaatctgtatataaacttggagatgacaggcatctttactatgccgtcttccaatccatggttatggtatgtgtcctcagttatttagctctttaattatttcattagcattttaaagctttcagcatacaagtcgtatagtcctacatatatatatgacagggtctcactctctctcatctaggctggagtgtagtggtgcaatcacagctcactggatctttg

SEQ ID NO: 714424 - DNA, 594 bp, Homo sapiens
caactttcttctgctttaaaataaatcactttttatattttatatttatatataaaaaactatagttttttatatttccatgtgagttttagatacaactcatcaatttttataaaagtcatgcgtgtatgtgtgggtctatttctaggttttctattctgttcmatttatccacgtgtctatccactatgaattaccacacagttgtgattagtgcatcaacataagcctggaaactggattgattcctcccacttcatttttcttttaaaaattgtttatttattcctatgtctttctacataagtttgagaataaacttgtctgcatccacaaaaattttgctggaattttgatagacactggattgaatctgtatataaacttggagatgacaggcatctttactatgccgtcttccaatccatggttatggtatgtgtcctcagttatttagctctttaattatttcattagcattttaaagctttcagcatacaagtcgtatagtcctacatatatatatgacagggtctcactctctctcatctaggctggagtgtagtggtgcaatcacagctcactggatctttg

SEQ ID NO: 714425 - DNA, 594 bp, Homo sapiens
caactttcttctgctttaaaataaatcactttttatattttatatttatatataaaaaactatagttttttatatttccatgtgagttttagatacaactcatcaatttttataaaagtcatgcgtgtatgtgtgggtctatttctaggttttctattctgttccatttatccacgtgtctatccactatgaattaccacacagttgtgattagtgcatcaacataagcctggaaactggattgattcctcccacttcatttttcytttaaaaattgtttatttattcctatgtctttctacataagtttgagaataaacttgtctgcatccacaaaaattttgctggaattttgatagacactggattgaatctgtatataaacttggagatgacaggcatctttactatgccgtcttccaatccatggttatggtatgtgtcctcagttatttagctctttaattatttcattagcattttaaagctttcagcatacaagtcgtatagtcctacatatatatatgacagggtctcactctctctcatctaggctggagtgtagtggtgcaatcacagctcactggatctttg

SEQ ID NO: 714426 - DNA, 1178 bp, Homo sapiens
  misc_feature 2, 3, 4, 5, 6, 7, 8, 9, 10, 11, 12, 13, 14, 15, 16, 17, 18,19, 20, 21, 22, 23, 24, 25, 26, 27, 28, 29, 30, 31, 32,33, 34, 35, 36, 37, 38, 39, 40, 41, 42, 43, 44, 45, 46,47, 48, 49, 50, 51, 52, 53, 54, 55, 56, 57, 58, 59, 60,61: n = A,T,C or G
  misc_feature 62, 63, 64, 65, 66, 67, 68, 69, 70, 71, 72, 73, 74, 75, 76,77, 78, 79, 80, 81, 82, 83, 84, 85, 86, 87, 88, 89, 90,91, 92, 93, 94, 95, 96, 97, 98, 99, 100, 101: n = A,T,C or G
gnnnnnnnnnnnnnnnnnnnnnnnnnnnnnnnnnnnnnnnnnnnnnnnnnnnnnnnnnnnnnnnnnnnnnnnnnnnnnnnnnnnnnnnnnnnnnnnnnnnntttccaaaaatgaatgtaaagttctttttccaacagaaaaaaaatttaaaaagcaatttgctactaatacgttactacaaagaaatagtgtctttttactccataagttttaattattttacatataatctatgtgtccattttttccctcaagaatagatatttcagaccctacaactgtgttttgcttgacctttggtaaatcaaactgaacattcatgggctgccaaataatttaatcatcagctaattatgtgatattsgtctacatgtcccttttggtaaatgggaagccttttgggtgattgctcagtcaacaaagtattgaataaaattttcaagggctctagtaagttttaagtttatgtaatctaggcatcccattttagtgtagttttgtaaaaaaaaaaaaaaaaaaaaaagtacatttatttcatgtatttacccccaaggtaaaatgtaacaggtttcctcctggacaggagtaaatgtgagaagcattgccttaaagtcagccaggagccaggagtgtctaagaaactgtcattccaaggccagaggcacacagctggacaagaatttaagacaattctttactgactccctcaacacacaatgccttaagcaatggacagagtcctccacagtgactagtggctgagtatttaaaaaaaaaaaaaaaggtggccaagattaacattaaaaaggtgtgacacagctttctctgccttgcctcccctcctcaacaaaaaacaaccaaaacagccaaacaaaaagattgaggctcacatactgaaagtgcctttgcaaaaattatgacagtgagaaaaatctgacataggaaaattatgacagtgatagaaatctgacctaaccagctccatcttgcttctaacttccaaggtgtccttgttcattcctgggtgtaggttgaattaactttgggagggatttagtttatagtttaactttgaaacaaagatgctaacagcccctccctgaaacaaaaccactccttgcctggggaccagactgcctttgtaaaactaacaaattatttacaagatcagaaattat

SEQ ID NO: 714427 - DNA, 1178 bp, Homo sapiens
  misc_feature 2, 3, 4, 5, 6, 7, 8, 9, 10, 11, 12, 13, 14, 15, 16, 17, 18,19, 20, 21, 22, 23, 24, 25, 26, 27, 28, 29, 30, 31, 32,33, 34, 35, 36, 37, 38, 39, 40, 41, 42, 43, 44, 45, 46,47, 48, 49, 50, 51, 52, 53, 54, 55, 56, 57, 58, 59, 60,61: n = A,T,C or G
  misc_feature 62, 63, 64, 65, 66, 67, 68, 69, 70, 71, 72, 73, 74, 75, 76,77, 78, 79, 80, 81, 82, 83, 84, 85, 86, 87, 88, 89, 90,91, 92, 93, 94, 95, 96, 97, 98, 99, 100, 101: n = A,T,C or G
gnnnnnnnnnnnnnnnnnnnnnnnnnnnnnnnnnnnnnnnnnnnnnnnnnnnnnnnnnnnnnnnnnnnnnnnnnnnnnnnnnnnnnnnnnnnnnnnnnnnntttccaaaaatgaatgtaaagttctttttccaacagaaaaaaaatttaaaaagcaatttgctactaatacgttactacaaagaaatagtgtctttttactccataagttttaattattttacatataatctatgtgtccattttttccctcaagaatagatatttcagaccctacaactgtgttttgcttgacctttggtaaatcaaactgaacattcatgggctgccaaataatttaatcatcagctaattatgtgatattggtctacatgtcccttytggtaaatgggaagccttttgggtgattgctcagtcaacaaagtattgaataaaattttcaagggctctagtaagttttaagtttatgtaatctaggcatcccattttagtgtagttttgtaaaaaaaaaaaaaaaaaaaaaagtacatttatttcatgtatttacccccaaggtaaaatgtaacaggtttcctcctggacaggagtaaatgtgagaagcattgccttaaagtcagccaggagccaggagtgtctaagaaactgtcattccaaggccagaggcacacagctggacaagaatttaagacaattctttactgactccctcaacacacaatgccttaagcaatggacagagtcctccacagtgactagtggctgagtatttaaaaaaaaaaaaaaaggtggccaagattaacattaaaaaggtgtgacacagctttctctgccttgcctcccctcctcaacaaaaaacaaccaaaacagccaaacaaaaagattgaggctcacatactgaaagtgcctttgcaaaaattatgacagtgagaaaaatctgacataggaaaattatgacagtgatagaaatctgacctaaccagctccatcttgcttctaacttccaaggtgtccttgttcattcctgggtgtaggttgaattaactttgggagggatttagtttatagtttaactttgaaacaaagatgctaacagcccctccctgaaacaaaaccactccttgcctggggaccagactgcctttgtaaaactaacaaattatttacaagatcagaaattat

SEQ ID NO: 714428 - DNA, 1178 bp, Homo sapiens
  misc_feature 2, 3, 4, 5, 6, 7, 8, 9, 10, 11, 12, 13, 14, 15, 16, 17, 18,19, 20, 21, 22, 23, 24, 25, 26, 27, 28, 29, 30, 31, 32,33, 34, 35, 36, 37, 38, 39, 40, 41, 42, 43, 44, 45, 46,47, 48, 49, 50, 51, 52, 53, 54, 55, 56, 57, 58, 59, 60,61: n = A,T,C or G
  misc_feature 62, 63, 64, 65, 66, 67, 68, 69, 70, 71, 72, 73, 74, 75, 76,77, 78, 79, 80, 81, 82, 83, 84, 85, 86, 87, 88, 89, 90,91, 92, 93, 94, 95, 96, 97, 98, 99, 100, 101: n = A,T,C or G
gnnnnnnnnnnnnnnnnnnnnnnnnnnnnnnnnnnnnnnnnnnnnnnnnnnnnnnnnnnnnnnnnnnnnnnnnnnnnnnnnnnnnnnnnnnnnnnnnnnnntttccaaaaatgaatgtaaagttctttttccaacagaaaaaaaatttaaaaagcaatttgctactaatacgttactacaaagaaatagtgtctttttactccataagttttaattattttacatataatctatgtgtccattttttccctcaagaatagatatttcagaccctacaactgtgttttgcttgacctttggtaaatcaaactgaacattcatgggctgccaaataatttaatcatcagctaattatgtgatattggtctacatgtcccttttggtaaatgggaagccttttgggtgattgctcagtcaacaaagtattgaataaaattttcaagggctctagtaagttttaagtttatgtaatctaggcatcccattttagtgtagttttgtaaaaaaaaaaaaaaaaaaaaaagtacatttatttcatgtatttacccccaaggtaaaatgtaacaggtttcctcctggacaggagtaaatgtgagaagcattgccttaaagtcagccaggagccaggagtgtctaagaaactgtcattccaaggccagaggcacacagctggacaagaatttaagacaattctttactgactccctcaacacacaatgccttaagcaatggacagagtcctccacagtgactagtggctgagtatttwaaaaaaaaaaaaaaggtggccaagattaacattaaaaaggtgtgacacagctttctctgccttgcctcccctcctcaacaaaaaacaaccaaaacagccaaacaaaaagattgaggctcacatactgaaagtgcctttgcaaaaattatgacagtgagaaaaatctgacataggaaaattatgacagtgatagaaatctgacctaaccagctccatcttgcttctaacttccaaggtgtccttgttcattcctgggtgtaggttgaattaactttgggagggatttagtttatagtttaactttgaaacaaagatgctaacagcccctccctgaaacaaaaccactccttgcctggggaccagactgcctttgtaaaactaacaaattatttacaagatcagaaattat

SEQ ID NO: 714429 - DNA, 1178 bp, Homo sapiens
  misc_feature 2, 3, 4, 5, 6, 7, 8, 9, 10, 11, 12, 13, 14, 15, 16, 17, 18,19, 20, 21, 22, 23, 24, 25, 26, 27, 28, 29, 30, 31, 32,33, 34, 35, 36, 37, 38, 39, 40, 41, 42, 43, 44, 45, 46,47, 48, 49, 50, 51, 52, 53, 54, 55, 56, 57, 58, 59, 60,61: n = A,T,C or G
  misc_feature 62, 63, 64, 65, 66, 67, 68, 69, 70, 71, 72, 73, 74, 75, 76,77, 78, 79, 80, 81, 82, 83, 84, 85, 86, 87, 88, 89, 90,91, 92, 93, 94, 95, 96, 97, 98, 99, 100, 101: n = A,T,C or G
gnnnnnnnnnnnnnnnnnnnnnnnnnnnnnnnnnnnnnnnnnnnnnnnnnnnnnnnnnnnnnnnnnnnnnnnnnnnnnnnnnnnnnnnnnnnnnnnnnnnntttccaaaaatgaatgtaaagttctttttccaacagaaaaaaaatttaaaaagcaatttgctactaatacgttactacaaagaaatagtgtctttttactccataagttttaattattttacatataatctatgtgtccattttttccctcaagaatagatatttcagaccctacaactgtgttttgcttgacctttggtaaatcaaactgaacattcatgggctgccaaataatttaatcatcagctaattatgtgatattggtctacatgtcccttttggtaaatgggaagccttttgggtgattgctcagtcaacaaagtattgaataaaattttcaagggctctagtaagttttaagtttatgtaatctaggcatcccattttagtgtagttttgtaaaaaaaaaaaaaaaaaaaaaagtacatttatttcatgtatttacccccaaggtaaaatgtaacaggtttcctcctggacaggagtaaatgtgagaagcattgccttaaagtcagccaggagccaggagtgtctaagaaactgtcattccaaggccagaggcacacagctggacaagaatttaagacaattctttactgactccctcaacacacaatgccttaagcaatggacagagtcctccacagtgactagtggctgagtatttaaaaaaaaaaaaaaaggtggccaagattaacattaaaaaggtgtgacacagctttctctgccttgcctcccctcctcaacaaaaaacaaccaaaacagccaaacaaaaagattgaggctcacatactsaaagtgcctttgcaaaaattatgacagtgagaaaaatctgacataggaaaattatgacagtgatagaaatctgacctaaccagctccatcttgcttctaacttccaaggtgtccttgttcattcctgggtgtaggttgaattaactttgggagggatttagtttatagtttaactttgaaacaaagatgctaacagcccctccctgaaacaaaaccactccttgcctggggaccagactgcctttgtaaaactaacaaattatttacaagatcagaaattat

SEQ ID NO: 714430 - DNA, 641 bp, Homo sapiens
ataggctgcctaattttagtgttccctctattgtttgtattacttttgtatgtgtcaaaagtatcttagagttttctgtttcttaattatgaaaaaaatggaatccttctgaaaatggtcatttgtgtgaagaagatgaactgattttatatagatatactttacagcttttgtccccaaattatkatacaatggaatgacataacatgacattgtatgtaaagcatacataatgcaagggtgtggctaaaatacttagatatattttattgtgttttaatcagcttgaaggagcacctgattttaaaattagagaacttgcaattgcagttggagttcggagaatgtattttaaagatgtcataatgagcttgttttatttatttatttggtcaaaatatgaattatgcatttactgttttgcttgggtggtgaaactgacaatctaattaacaacatgacacagttgacaataataagaccttttgttgtagagtacctcatattttataaagtatatttacatctattatcttttataatttttgattttcgtggatacatagtaggtatatatatttataaggtacatgagacattttgatacaggcatgcaatgtgttataatcacatcagagtaa

SEQ ID NO: 714431 - DNA, 485 bp, Homo sapiens
ttgctttaagatgcctgcatccacttgtaccaaaatagaacaaggcatatacatagtcttaaaaatacagaccaatcacacttcaaattattcctgcaaaaatacttaataaaatattagcaaataaaacacagtattatattttaagattaatacaacacagccaagtgagattcatttcaggaaatattgttattcagcttatgacaagtaaaaagtggggagtgaagggatagtctaaatagattacaccatttgataaaattcagcgtatattcaataaaattcagcatacgttcctgatktattcctatttttggcatctataaaaatgaaaaactaaaggtatcctattaaagtcaagattaaggcaaggatggccactactgctggcttaaggaattgggcatgagcatgacataaaaaaatacatatatatgagaagcagggggagcaaaattatttgcagataatatagagctgca

SEQ ID NO: 714432 - DNA, 2652 bp, Homo sapiens
tacctgctttctttatgttatgctgatattgtgaaattatgttcatatggttctaagatttataagggttcctttatttatttacaaatagacattccgcatataagtgaacaggtctcattacaagtcaaatatggtacacagtgagtgtaagaggcatatgctagcacattttagtttttatctctgccatttaataaagtgagcagttttctcctatcctttcactctgtctactcacaggattcatccattctctcacctccaccttttcccatcacgcctccactcctccatcccatctgctcatcataatggcttcttgatcagcccaaaagtattacaattccttttgcaggcacagatagtagggtatggtgggaatatggctaagggtcaggatatgactctttatttaaaatagaacatagttcatcaggccaggctaatagaagtttcacagctagtttacagagatgtaaaatagatgtggtaaaccatagcaagagataaaattcatcctggaaggagctgagaggatatacagcaagacatgaaaatctaataaaagggtaaaattatcacaattcataaacatgagtttgccactgccccagtgatacaaatagatagaacaaaacaaaattagatctcaagtgaattattattattattattattattattattatttttgagacggagtctcgttctgtcaccgaggctggagtgcagtggcgcgaccttggctcactgcaacctccgtatcctgggttcaagcggttctcctgcctcagcctcctgagtagctgggattacaggtgcccgccaccacacctggctaatttttgtaagattagtagagatggggtttcaccatgttggtcaggctggtctcgaactcctgacctcgtgatccgcccatctcggccaccccaagtgctgggattacagatgtgagccaccgtgcccggcctcaagtgaattattaatatcgagttagctaaataaaagaaaggttgaaacattcaaaacagattttttaccttatactttagttttgctgcatcatagaagtcggcagagtgtgaaaactgtttacctatggtaatatttgcatagctaagaaagcaaagtaagtaatggtgacttcagaattcagaaatttaatttttttaaatttcaaaacaaacgatatgacaaagtattaaaaatatcttacccatatccagttcctttctttcccgggtttgtgtataaattctttccaggtgccttgtatttttctcgaggttttgactgtgcgctgaaaaatgggactggaccacctattgttccatagtagcttcctaagccacatcttaaatacaattttttgatgttttaaaagaaggaggttaaaatggcaaagtttaagtctattttatcataatttttaaacagattgaaaaaaagagaaaaaaatgctagttttaatctaatttcattttcctcattcttcagtcacagattttgacataasatatgtttttaatatttttattattataaacattctacaaaaaatagaactgcataatccttaggaagttagaatcattctcattaattcagttaactgtaacaataaacagagtcttttgtgtttttagattaatttatggatgctttatggcaagttagctaataaatggctaattacttctgactatccacccacaagaaactacacttgcaaaacaaatatttaagactgctgtttccactactgacagaaagtgactcatggaatttgggtgctaattttcttctgtttgctgtagaaaaaattaaccaaatattttcttttcttccattttaatgttaaattttctgggcacacagtatctatgtaaaatcatcaaagtatttactatccagcactttaacaaatttttcttaaaacttccacaataagggtaactattgtcagcaacagtcatagtctctaattcttaagttaccattgaagtaaacaaattttaataatcagaaaaaggtctacaagacacatgaaaccttattactatcaaaacttgacactgttcatacatctgagttaaaaatttcaaaaactagaaagacatcaacaccgattgcttattgtcaataccttcagtctacaaatggtaggaaagcatattttaattaatccctctttatgaacctatataatgaaattctaaaatacaacaaggaaatagagcagggataatgcagataaaggagaactattcacagacaggcataatttacccaaaatgtgatttaacgcaagcactaaaagtcattctatttagaatgtattaaatgcctacggttccgggggtgggtgtggtggctcacgtatgtaatcccagcactttgggaggctgaggtgggcagatcacctgaggtcaggagtttgagaccagcctggccaacatggcgaaacccatctctactaaaaacacaaaaaactagccgggcgtggtggcctgtgcctgtcatcccagctacttgggaggctgaggcaggagaatctcgcttgaacctgggaggcggagattgcagtgagctgagatcgcgccactgcactccagcttggatgacagagccagactccatctcaca

SEQ ID NO: 714433 - DNA, 653 bp, Homo sapiens
ggctgaggtgggagaatcacgtgaacctgggaggtggaggttgcagtgaaccaagattgcgccattgcactccagcctgggcaacagtgtgagactccgttctcaaaataaataaataaaataaaaataaaaataaataaaaattaaaaaaggccaggtgtagtggctcacatctgtaatcycagcactttgggaggccaaggtggggtggatcacaaggtcaggagatccagaccatcctggccaacatggtgaaaccctgtctctactaaaaatacaaaaattagctgggtgtggtggcaggcacttgtaatcccagctacttgggaggctgattcaagcaggagaattgcttgaatccaggaggcggaggttgcagtgagccgagatcgcaccactgtactccagcctggcgacagagcaagactctgtctcaaaaaaaataataattattattattttattagtaagattagcattttatactttttctcctcttaggaacaaagattaatttgagtaggatgttaacacattttgagaaatttgagttattgtaaggaaatgtttgttgtgcaacctattttcttcatttaaacaatataaagacagtagatgaatacatagcataccttcagaaacagcatgtacat

SEQ ID NO: 714434 - DNA, 653 bp, Homo sapiens
ggctgaggtgggagaatcacgtgaacctgggaggtggaggttgcagtgaaccaagattgcgccattgcactccagcctgggcaacagtgtgagactccgttctcaaaataaataaataaaataaaaataaaaataaataaaaattaaaaaaggccaggtgtagtggctcacatctgtaatctcagcactttgggaggccaaggtggggtggatcacaaggtcaggagatccagaccatcctggccaacatggtgaaaccctgtctctactaaaaatacaaaaattagctgggygtggtggcaggcacttgtaatcccagctacttgggaggctgattcaagcaggagaattgcttgaatccaggaggcggaggttgcagtgagccgagatcgcaccactgtactccagcctggcgacagagcaagactctgtctcaaaaaaaataataattattattattttattagtaagattagcattttatactttttctcctcttaggaacaaagattaatttgagtaggatgttaacacattttgagaaatttgagttattgtaaggaaatgtttgttgtgcaacctattttcttcatttaaacaatataaagacagtagatgaatacatagcataccttcagaaacagcatgtacat

SEQ ID NO: 714435 - DNA, 653 bp, Homo sapiens
ggctgaggtgggagaatcacgtgaacctgggaggtggaggttgcagtgaaccaagattgcgccattgcactccagcctgggcaacagtgtgagactccgttctcaaaataaataaataaaataaaaataaaaataaataaaaattaaaaaaggccaggtgtagtggctcacatctgtaatctcagcactttgggaggccaaggtggggtggatcacaaggtcaggagatccagaccatcctggccaacatggtgaaaccctgtctctactaaaaatacaaaaattagctgggtgtggtggcaggcacttgtaatcccagctacttgggaggctgattcaagcaggagaattgcttgaatccaggaggcggaggttgcagtgagccgagatcgcaccactgtactccagcctggcgacagagcaagactctgtctcaaaaaaaataataattattattattttattagtaagattagcattttatactttttctcctcttaggaacaaagattartttgagtaggatgttaacacattttgagaaatttgagttattgtaaggaaatgtttgttgtgcaacctattttcttcatttaaacaatataaagacagtagatgaatacatagcataccttcagaaacagcatgtacat

SEQ ID NO: 714436 - DNA, 653 bp, Homo sapiens
ggctgaggtgggagaatcacgtgaacctgggaggtggaggttgcagtgaaccaagattgcgccattgcactccagcctgggcaacagtgtgagactccgttctcaaaataaataaataaaataaaaataaaaataaataaaaattaaaaaaggccaggtgtagtggctcacatctgtaatctcagcactttgggaggccaaggtggggtggatcacaaggtcaggagatccagaccatcctggccaacatggtgaaaccctgtctctactaaaaatacaaaaattagctgggtgtggtggcaggcacttgtaatcccagctacttgggaggctgattcaagcaggagaattgcttgaatccaggaggcggaggttgcagtgagccgagatcgcaccactgtactccagcctggcgacagagcaagactctgtctcaaaaaaaataataattattattattttattagtaagattagcattttatactttttctcctcttaggaacaaagattaawttgagtaggatgttaacacattttgagaaatttgagttattgtaaggaaatgtttgttgtgcaacctattttcttcatttaaacaatataaagacagtagatgaatacatagcataccttcagaaacagcatgtacat

SEQ ID NO: 714437 - DNA, 2463 bp, Homo sapiens
atctcagctcactgcaacctccgcctcctgggtgtaagagattctcctgcctcagcctcccatgtagctgagattacaggcatacaccaccacgcctggctaatttttgtatttttagtaaggacgggatctcagaatattggccaggctggtcttgaactcctggcctcaagtgatccgcctgtctcggcctcccaaagtgctgggattgcaggcgtgagccaccgcgcccagctggcacagggatatttaaaagtatcctatgcccccatgccagtgattctaatgtgaatggttgagaactactgctttaagacaatctttccaaattataatcttgacaggtttaacaatgacaataaaacatcaacagtaaagaactagtttaagaatgtgacaaggcactgaacctaatataataccagggagtcaagacaatgagaggaaactcatactgagggtgggatatcaactggtggaatccttcagagaatatggcagtaagaatcaaaggtttatattcataggcttgatctagtgatatgcatttagaatctcagacttagtctaagaaaaatctgaaaaacacacaaagattcgggtacatggatattaacctaactgccaacaatagattggttaaaaaaaataggaatatcatatagccataaaaaaatcatgtttttgctgaaaattaaaaggcacaggacaatgcttacaacttataaagggaaaagagcacttgcaaaatggaactaatcagttctttacttggatccatatactgtttcaggtagttgatgatatatcacaaatgacatgtatcattgtttgtgtacacatatatacacacacagatacacatattcatacatatatacatacatatatacacacacacacacacgagagaaagagacaggaagggagaaagagagcgggagatttcttttgggaagaggtttcaaaaatttcatgagactctcaaaacatatctctcaaacaggctgaagaaccatagtacacactaagacccctattttgaaataaatgaataagtactaacatttactgagctcttcaaatgtaaaacacaggcagggtgcagtggctcacgcctgtaatcccaacactttgggaggcagaggcaggaggatcactttgagcccaggagttagagaccagactgggcaacataggaagacccccatctctaccaaaaaaaaaaaaaaaaattagctgagtgtggtggtctgcacctgtagtccagctactcgggaggttaaggtgggaggactgcttgggccggggaggtcaatgctacagtgagccatgatcacaccactgcactccagcctaagcaacagagcaagatcttgtctccaaaaaacaaaataaaataaaacaaaaacatgtaaaaggcactatgctaaacatacatacttactccaatcctcagaacagtattaaataggtaccaatacagtttttctcattttacaaatcctttgtcacatttctataagggtcactgtttttatttattctaaaattgtaatcttttgaaagatcatataccctttgtcccaattctacttctgagaatttattctaaggaaacaatcaagaaagttcaggacaaatttagcttcatgttgtccatttattctaccgttgttcatcacagaaaaataaatggaaaccacttaaatagctattaataagaaatcagttaaataaagaatactaccaaacaaactagtatgtacccatttaaataaaaaatatttaaagatactgaagataaaagttagacaggaaagaacaaattttaactctgctacttactgtacaattttacacaatttaacttatcacttaagtctgtttctcttctgtaaaactggaaaaatacacaacttcccagggttgttatgaagattccacaagacatcattcataaaagcactagtcttcctagacttccgaattagctgagatactctctgaagaaataatactgaggctgagatctgaagggtgagtgaaggtgcaatagcccattccaggcagggscatcgatgagtgaagatctgcttaaaagaccacttaggtgactaccccagatggatagatctcaaggccaaggatggtaagagtggcgacagtgacaacagacagacatttagaagtagcatctataggacttgattattgactgcatgtcggggagttgagaagagggagatgtcaaggatgatttccaggttttgggcaggcacaacaggatgtatggtggtgccatctacagagttgggggttcctggaggaagagcaggtgtgggctgtggggaagtggaaatgctcagtttggaacttgctgagcttgaaatacatatgagctatccaagtggaggcacggttagcagatttgtgggtctggagctcagaagaaaggtctaa

SEQ ID NO: 714438 - DNA, 2463 bp, Homo sapiens
atctcagctcactgcaacctccgcctcctgggtgtaagagattctcctgcctcagcctcccatgtagctgagattacaggcatacaccaccacgcctggctaatttttgtatttttagtaaggacgggatctcagaatattggccaggctggtcttgaactcctggcctcaagtgatccgcctgtctcggcctcccaaagtgctgggattgcaggcgtgagccaccgcgcccagctggcacagggatatttaaaagtatcctatgcccccatgccagtgattctaatgtgaatggttgagaactactgctttaagacaatctttccaaattataatcttgacaggtttaacaatgacaataaaacatcaacagtaaagaactagtttaagaatgtgacaaggcactgaacctaatataataccagggagtcaagacaatgagaggaaactcatactgagggtgggatatcaactggtggaatccttcagagaatatggcagtaagaatcaaaggtttatattcataggcttgatctagtgatatgcatttagaatctcagacttagtctaagaaaaatctgaaaaacacacaaagattcgggtacatggatattaacctaactgccaacaatagattggttaaaaaaaataggaatatcatatagccataaaaaaatcatgtttttgctgaaaattaaaaggcacaggacaatgcttacaacttataaagggaaaagagcacttgcaaaatggaactaatcagttctttacttggatccatatactgtttcaggtagttgatgatatatcacaaatgacatgtatcattgtttgtgtacacatatatacacacacagatacacatattcatacatatatacatacatatatacacacacacacacacgagagaaagagacaggaagggagaaagagagcgggagatttcttttgggaagaggtttcaaaaatttcatgagactctcaaaacatatctctcaaacaggctgaagaaccatagtacacactaagacccctattttgaaataaatgaataagtactaacatttactgagctcttcaaatgtaaaacacaggcagggtgcagtggctcacgcctgtaatcccaacactttgggaggcagaggcaggaggatcactttgagcccaggagttagagaccagactgggcaacataggaagacccccatctctaccaaaaaaaaaaaaaaaaattagctgagtgtggtggtctgcacctgtagtccagctactcgggaggttaaggtgggaggactgcttgggccggggaggtcaatgctacagtgagccatgatcacaccactgcactccagcctaagcaacagagcaagatcttgtctccaaaaaacaaaataaaataaaacaaaaacatgtaaaaggcactatgctaaacatacatacttactccaatcctcagaacagtattaaataggtaccaatacagtttttctcattttacaaatcctttgtcacatttctataagggtcactgtttttatttattctaaaattgtaatcttttgaaagatcatataccctttgtcccaattctacttctgagaatttattctaaggaaacaatcaagaaagttcaggacaaatttagcttcatgttgtccatttattctaccgttgttcatcacagaaaaataaatggaaaccacttaaatagctattaataagaaatcagttaaataaagaatactaccaaacaaactagtatgtacccatttaaataaaaaatatttaaagatactgaagataaaagttagacaggaaagaacaaattttaactctgctacttactgtacaattttacacaatttaacttatcacttaagtctgtttctcttctgtaaaactggaaaaatacacaacttcccagggttgttatgaagattccacaagacatcattcataaaagcactagtcttcctagacttccgaattagctgagatactctctgaagaaataatactgaggctgagatctgaagggtgagtgaaggtgcaatagcccattccaggcagggccatcgatgagtgaagatctgcttaaaagaccacttaggtgactaccccagatggatagatctcaaggccaaggatggtaagagtggmgacagtgacaacagacagacatttagaagtagcatctataggacttgattattgactgcatgtcggggagttgagaagagggagatgtcaaggatgatttccaggttttgggcaggcacaacaggatgtatggtggtgccatctacagagttgggggttcctggaggaagagcaggtgtgggctgtggggaagtggaaatgctcagtttggaacttgctgagcttgaaatacatatgagctatccaagtggaggcacggttagcagatttgtgggtctggagctcagaagaaaggtctaa

SEQ ID NO: 714439 - DNA, 2678 bp, Homo sapiens
gtgaaagaaagatgaagatatcagtcttctcccagagagtgaagaacaggagcatgaagaggctggttcagaaacagaggctgatggccaggaggacctagaagatttagaggaggaggaggacgtgtcagatatgggtggtgacaatcctgaaatgggtgagagagctaaaaactcaagcaaattcagggccaggcgcggtggctcacgcctgtaatcccagcactttgggaggccgaggcaggcggatcacgaggtcaggagatcgagaccatcctggctaacaaggtgaaaccccatctcyactaaacatacaaaaaattagccaggcgtggtggcaggtgcctgtagtcccagctactcgggaggctgaggcaggagaatgccatgaacccgggaggtggagcttgcagtgagcctagatcacgccactgcagtccagctgggcggcagagtgagagactgcatctcaaaaacaaaaacaacaattacttaactttaggatgctccaataatcaaaattgatagtggcttgtgaacagatagattacttgaatagaatagagcccagaaataaacccaaatgcttctgggggagtttggtacattataaacatgacattttaaatcaatgaggaaaagaaatcatttgcagctcaccccaccatacacagcaggaataggaagtcattggcagaataaaaagatggtaagaacagaacagaattgtagaacagtacatttcttgcttccccacttttcaaagtattttttgctttttcacaaatgtaagtgtaattttattttctaaatgtatactaattcttttcttctctttcttagatgaatgacaaaaattacatctttagaaaaagagttgttagaaaaaagccttggctgcatgtgggggaagtgacagcacagaagagaccagagaagagcctcctggaggagagcctgcactttgaccatgctgtccggatgggtgcagtgctcttttctgcaaagtgttcacttctctgctttttctgtggtcccatttcatagaaagatttggggtgatgtttctttccctcaacttttattttgaaaacttgcaaacacagaaaagttgataaaatcatacagtgaacatctgtatgctattcaactggattcactagttaatgttttgtcacacttgttttctgtcttctgcgtatggaagattgtatatgtgccctttttccccctgaatcatttcaaagtaagttggcagtatcagagcatttcactgttaagtactttcgcagatatcttctaggaaccaggacttctcctatataatcacaataccattaatccacccccaaaatttaacatcaatacactaatgatacctactgtatagattataatcagcttccttgcagcaatctgtttagaaggcttgcatcctgtcactgtccactgattaaattttgaactctaacttgaaaccctggtcatctcattgccttctttcttatacccattaagtcaaaaggagctctcattttatttcaacagaaaagagaatggaaaagaggggaagagtccctagtaccttggataaagtatgagcacttactaccatatgtattctagttctgtagttttcaaacttcagggagcatctcaaggcttattaaagcacagatagctgtccttccccactttctgattcaggaggtgtggggctggcccaggaatttgcatgtctaacaagttcccacgtgtttctgatgctgagggtgtaaggactacaatgcgtgaatccgtggtttagtggatccacctaatgaatacatgttgtatttcctttggcacccgtgattacagaggaaacacctttcaactggaaggtatcattaaacagaggataagagatcaggtcagtaagaattaaatttcacttaattgaaatgtcactcaaatgtttagaaataatatgacaggccaggcacagtggctcatgcctgtaatcccagcactttgggaggccaaggcagacggatcacttgaggtcaggagttcgagaccagcctgtccaagatggtaaaacttcctctctactaaaaatacaaaaattagctgggcatggtggtgcatgcctatagtcccaggtactcgggaggctgaggcaggggaatcgcttgatctcgggatatggaggttgcagtgagctgagatgcgccaccgcactccagcctgggcaacagagtgagactccatctcaacataaataaataaataaataaataaataaataaataaataaataagataaaaataaaaataaagggaagatggggcagctttgtgtattgcatgtcctgaaaatgggctgatttctctcaagaggcagggatttaagctctgtagcctatgtgggatacatacaggagaaaaaagaagaaaaagaaaagaaatgtaaatataaataaatgaaaataacacttttccatgattataaaggaaatcacattgtttttgtaataatttggatgacaaaatgtaaagaaaaatctttaattttgccactcaaaacattccggtttgttgcttttcacactttttatgctgtaaacattttaaaaagtagaatcacaatacatggtcttttgtcacttactatattttaagcatgtttctatgga

SEQ ID NO: 714440 - DNA, 2678 bp, Homo sapiens
gtgaaagaaagatgaagatatcagtcttctcccagagagtgaagaacaggagcatgaagaggctggttcagaaacagaggctgatggccaggaggacctagaagatttagaggaggaggaggacgtgtcagatatgggtggtgacaatcctgaaatgggtgagagagctaaaaactcaagcaaattcagggccaggcgcggtggctcacgcctgtaatcccagcactttgggaggccgaggcaggcggatcacgaggtcaggagatcgagaccatcctggctaacaaggtgaaaccccatctccactaaacatacaaaaaattagccaggcgtggtggcaggtgcctgtagtcccagctactcgggaggctgaggcargagaatgccatgaacccgggaggtggagcttgcagtgagcctagatcacgccactgcagtccagctgggcggcagagtgagagactgcatctcaaaaacaaaaacaacaattacttaactttaggatgctccaataatcaaaattgatagtggcttgtgaacagatagattacttgaatagaatagagcccagaaataaacccaaatgcttctgggggagtttggtacattataaacatgacattttaaatcaatgaggaaaagaaatcatttgcagctcaccccaccatacacagcaggaataggaagtcattggcagaataaaaagatggtaagaacagaacagaattgtagaacagtacatttcttgcttccccacttttcaaagtattttttgctttttcacaaatgtaagtgtaattttattttctaaatgtatactaattcttttcttctctttcttagatgaatgacaaaaattacatctttagaaaaagagttgttagaaaaaagccttggctgcatgtgggggaagtgacagcacagaagagaccagagaagagcctcctggaggagagcctgcactttgaccatgctgtccggatgggtgcagtgctcttttctgcaaagtgttcacttctctgctttttctgtggtcccatttcatagaaagatttggggtgatgtttctttccctcaacttttattttgaaaacttgcaaacacagaaaagttgataaaatcatacagtgaacatctgtatgctattcaactggattcactagttaatgttttgtcacacttgttttctgtcttctgcgtatggaagattgtatatgtgccctttttccccctgaatcatttcaaagtaagttggcagtatcagagcatttcactgttaagtactttcgcagatatcttctaggaaccaggacttctcctatataatcacaataccattaatccacccccaaaatttaacatcaatacactaatgatacctactgtatagattataatcagcttccttgcagcaatctgtttagaaggcttgcatcctgtcactgtccactgattaaattttgaactctaacttgaaaccctggtcatctcattgccttctttcttatacccattaagtcaaaaggagctctcattttatttcaacagaaaagagaatggaaaagaggggaagagtccctagtaccttggataaagtatgagcacttactaccatatgtattctagttctgtagttttcaaacttcagggagcatctcaaggcttattaaagcacagatagctgtccttccccactttctgattcaggaggtgtggggctggcccaggaatttgcatgtctaacaagttcccacgtgtttctgatgctgagggtgtaaggactacaatgcgtgaatccgtggtttagtggatccacctaatgaatacatgttgtatttcctttggcacccgtgattacagaggaaacacctttcaactggaaggtatcattaaacagaggataagagatcaggtcagtaagaattaaatttcacttaattgaaatgtcactcaaatgtttagaaataatatgacaggccaggcacagtggctcatgcctgtaatcccagcactttgggaggccaaggcagacggatcacttgaggtcaggagttcgagaccagcctgtccaagatggtaaaacttcctctctactaaaaatacaaaaattagctgggcatggtggtgcatgcctatagtcccaggtactcgggaggctgaggcaggggaatcgcttgatctcgggatatggaggttgcagtgagctgagatgcgccaccgcactccagcctgggcaacagagtgagactccatctcaacataaataaataaataaataaataaataaataaataaataaataagataaaaataaaaataaagggaagatggggcagctttgtgtattgcatgtcctgaaaatgggctgatttctctcaagaggcagggatttaagctctgtagcctatgtgggatacatacaggagaaaaaagaagaaaaagaaaagaaatgtaaatataaataaatgaaaataacacttttccatgattataaaggaaatcacattgtttttgtaataatttggatgacaaaatgtaaagaaaaatctttaattttgccactcaaaacattccggtttgttgcttttcacactttttatgctgtaaacattttaaaaagtagaatcacaatacatggtcttttgtcacttactatattttaagcatgtttctatgga

SEQ ID NO: 714441 - DNA, 2737 bp, Homo sapiens
aggagtagaatgtagtgatgtcacagtcccgctacaaactgtcattactaccacaagaccggcctttggtcttaggacccagtcccctaagtgttcttgcccacttctgtttcctctggttgcagcacaggtttccagctggaaggggaatggggactgtgggacctagaagagagaggtttcaggctgcctgacttccttaccacagaccttgacagtgtgaaaagcctacacctcccccatgagctcgacacgttgacagtgtctctgggtggcaatgggagaacgggtttggtttggttttctcccaggcttctactctccagagagattttaacattttttctcagttctgcacctcagatttgaattctccattgttctgggaccagagtgcccctcagtcactggttctggagtgagatctgcttatcttctgtggaacagatcttgggaaactgaacttagcttgagtcttcctcatctcatctcaacctggggtactttgagtgccacaggataaatatggggcatctttctgaagcatcagtttcccttgattctattgagaggcaaaacattaatgtacttagggatgaaagtcacgtagatttataagcgtatacaagacttctctctgaaatgaggcttgggttgtcctctttctgttaaattcccagatttagcagaaaggctgccttctgccatgaggagacattgatgtaaaggtttgagaggtactggtgtactttttaacactaacagacgtgtgagggtgaataaccctaaaccacatagtgcacagttcctgcctacttaatatttgcttttctacctctgcctctggttttggtccctggcagctgctgatttagggcaaaatcccagagctcagagtcagaagactgagtttaagttccattactgccttttttttcagccatggtatcaatctctctcagtcactaagtgattgtgacaacatttcctacagttggtggcattaaatcagatggtctataagagtatttagtataaactgtaaagcaggatgtgactgtaggagcttgtagttctcatgagtatcactgctcttcctttccacagttgacagaccatcatccccagaccaaccctagtgttggtacagcagcaagcgacaccaaaaagaagaaaataaataatggcactaaccctgagacaaccacttctggtggttgccactcgcctgaggatgtgagtcttggctggccgggctcctggggacagagggcccaaggggtggtggagggtaattgttaagattgtggaagaactgccaggtactggctaagaattctgggtttgaatcctacccctccatctgctagggacatgatttagcgcaaattgcttgagctctttgggcctctcttttcacatccgtaaaatacgagtggtattgttttccttacgtttgtgaagtttaaatgagatttgtcattgtgtttttatgttaatccctcgtccaggacctgctgtaaactctccttcttgggcttgcgtttcctgaggtagagttagagagtatcagaggtttctgttagctctgagagcccgagagttaaaggcccactagaatggaaacctcggggccaagggctcctgtctgccttttctgacctctattcccgctgtgaagaaccgtccctggcccgtatgtgctcaacgtttgctgagtgaatgcacctttctaaatcacaagctggcggaagggtgggcttttctcgcactccacctctgaaggtttctgttactgtcttttcaagagaatctagtttcagactttgagttctgtggctgtgggcaaaaaccaaaaagacccaaatccttcttctttgggagttgaggagagttgaccagttcatgttcccattgggtctgagaactgtgccttttaaatccattcctggcccctgcctatcgcttcctggcctggggaatagagtcaagggggccaccctcagtcaccttcctttgactctccccacagaaacaatagaaccgagctcagctggaagaagtmgtgtgatttctttgctcacgacatgaccgctgggtttgggggcactcagatgtagaggccccaggctcatctcacccactcccagcctggggaagaaggctcacccccaagattccaccccatccccacagggtccctgataaactggtcccatgggtgggcctgttctggggcagtggtgccattctgggggcatgtctcttgctgtggatctctgcctccccctagtaagagctctgttttcctctttctataggaacagaaggcaagccaccaacatcaggaagccctaaggagggagctagaggtgagtggagggtgtgaagttccctcctgccctctggagaatgtttctttgcttctctttcagcatttgcttgtcttttctcccaaaggcccaggttcataccatacgaatccttacatgtcagaaaactgagcttcagatggcactctactacagccagcatgctgtcaagcagttggaaggtgggaatctggcaccccatcatccttcaacctggcactttgacaggcctttagggggagtcctttgggccacatctgaatgtctctcattccaggagaggccagggatctgatcagccgcctgcatgattcatggaagtttgcaggagagttagagcaggctctctctgctgtcgctacaca

SEQ ID NO: 714442 - DNA, 758 bp, Homo sapiens
catgaaaggcctgtgtatactttgctagatatattctcagggttttgttgctattgtgaatagaatctcttttttttttttttttttttgccacggagtctggctcctttgcccaggctggagtgcagtggcgygatctcggctcactgcaagctctgcccctccaggtttaagcagcctgttgcccaggctgcaatgcagtagcatagtcatagttcaatacagcctcaaactcctgggcccaaatgattctctaagctaatatttttaattttttagagatggagtttcattcaaggatcactaaaggccagtgatcctcccgcctcagcttctgaaattgctgggattacaggtgtgattgagccatggagcctggccagacatgggctattgattctcgctgttactcttttccctttccttctaatccttgtattgggaagaaaacagtatggaaattttatttcttcattttattgatacgtagatctctgcttagaagacaattttagttttaaattataaatgtttcgttcattattcatagaaaactagatttgccatgggatatttataagtgttgcacgaatgaagggttttctagtcaaataagttgaaacacattacgttaaacaaacttggacagttttgtttccggtcatttttagagttctaaattatgattctactcaagaggatattgtatgcggtattttcaaaccaactcatcctgcgtcaggttgtggttccccttt

SEQ ID NO: 714443 - DNA, 758 bp, Homo sapiens
catgaaaggcctgtgtatactttgctagatatattctcagggttttgttgctattgtgaatagaatctcttttttttttttttttttttgccacggagtctggctcctttgcccaggctggagtgcagtggcgcgatctcggctcactgcaagctctgcccctccaggtttaagcagcctgttgcccaggctgsaatgcagtagcatagtcatagttcaatacagcctcaaactcctgggcccaaatgattctctaagctaatatttttaattttttagagatggagtttcattcaaggatcactaaaggccagtgatcctcccgcctcagcttctgaaattgctgggattacaggtgtgattgagccatggagcctggccagacatgggctattgattctcgctgttactcttttccctttccttctaatccttgtattgggaagaaaacagtatggaaattttatttcttcattttattgatacgtagatctctgcttagaagacaattttagttttaaattataaatgtttcgttcattattcatagaaaactagatttgccatgggatatttataagtgttgcacgaatgaagggttttctagtcaaataagttgaaacacattacgttaaacaaacttggacagttttgtttccggtcatttttagagttctaaattatgattctactcaagaggatattgtatgcggtattttcaaaccaactcatcctgcgtcaggttgtggttccccttt

SEQ ID NO: 714444 - DNA, 1195 bp, Homo sapiens
tcagattttagccttattaatgaaattccaaaagtattataaratttagtatgtcttgaaattataaatttgtaacagatatttttcaaaatacatgccttcaaacaacttaaatgcaaaaatcattcattcttaataatacctagcagttcatcccttgcttcccagaagtactcatacaaacatgtgaatttaaaaaatagatttttctgttcaaaaaataaagcttctgcccttttaaaaacttgtcaggctttcatttgccaaaatgttgaaaactgcacatattcaaacatagttcccgtaggaacacatattcctcaactctcacacctttgaagacacaggagacgggcaatataaatgttcccttctttccagctgatgttaaatagttaggtttgcttcatgagattatcggaataaagggttaaattttcattttccattactctatctagtaaaattagacttaaagtaggtagaatactaccagaggaattacacagtgattggcaaactggcctaaaataatcaggctttttatttatacttccctttttaaagttgtcatttgacaacagcttccatctttaacagcaggcaaaagaaaatgaggtgccatgctatattaattaaaatattccacaatgaaagaaaatacaaaacctgaaaataacttcagtgctatagacatttaaaaagttacaatggttaaaactctgaataaaaagatcttgagaacaggtacatttcaaagcaatattttacacgctttggaaaaaatagctatttttcaaataacttgatatatggtttacatatttcatgcagtctctgaggttttttttctctacaatactgttttgcattaaagtctctcatgttgtttaccagtaattgtttccttaggctgaaataaaactttgcttgttcattagttttctgtatatcccatttggttttgaaagcagctcttcgtgttttccatattcagtaatttttccttggtcaagaacagcaaccatattagcattcttaatggtggagagatgatgggcaataactaacgctgttcttccatccatcagtggatctagagcttcttgaacaaggtactcattttcagcatccagcgcactggttgcttcatctaggagaagaattttgggattcttcagcagagcacgggcaa

SEQ ID NO: 714445 - DNA, 1521 bp, Homo sapiens
ttctctctactgcctctgagttggagatgtcagagggagccatggcccactgtaaagtaacacaatgtccccacccacaggattagaacccctcccctggaagcagctctgaggggaacagtcacatgtagagagtgcagggcactgtgtccagccgggggaaggaggtcaccaagggggttgacccccctctggccaggtggctgccttctgacacaccagcctctgtctctagcacggtggcccccacacacccagcctgtgaaacctacagccctcaagaaggctttggccaaattaakgagcggctccctctcccaggaggaagcacaggtgaaggatgtggagggcagtagagttgtgtgtgctccgccccctttctccacagtcggatggaaagaagggggctttcagccaggctcgcccaggctggggtctgagtgtcactgtccagctattggcttcttgcttaatgggtgagcccagctgctcccgtgcagctgccgccctagtgagggtgaaccggcaggcgagttacatttctgaaagcctgggaatacagtaaatattaggctgtgggctgctgggccaggaagagttgtttatttttcagggtttgtttatctattgacttgatgagggagggttataggtacaaccagtttaaagatggaaattttgagagagcaggcagggatttagtgctgggtaagcctggtcaaagcggctcttttggggcggccagaatccagtaccaatgtcctcagcatgttcatcagctgctgggggagtgcgggacagcatgaaagcacaggagaactttctggatgatagaaatactctgtatcttcaaaggaggtgggttccatagtaatgttaaatgagttaaaactcatcaaaatgtaaaccagacctgtgcatttcactaatagaaattatacctccaattaaaaacatgttttaaaagacagatgggccggatgcagtggctcatacttgtaatcccagcactttgggaggctgaggcaggtagatcacctgagtcaggagctcgagaccagcctggaaaacatggtgacatcctgcctctattaaaggtataaaaaaaaattagccaggcatggtggcacacgctactcgggaagctgaggcaggagaattgcttgaacccaggaggcagaggttacagtgagcagagatcgtgccattgcactagagcctgggcaacagcgcaagactccatctcaacaacaacaaaaaaaggacagatgaaggttttcaactttcagtaaaggcagaggagcttgttacagattcgcctccccacaagagcagttagaaaaactggataaaaatgtgccccgcccccaatcaaaaacaattgttggaaggtaattggagacctcagtcaggacttgagtgaccaggcctaggaggtgatcctgacagtctgtagtgctttcccacatttggtgattggtcaacagtagagggctaagaggctaagaaactgagtatgaa

SEQ ID NO: 714446 - DNA, 1521 bp, Homo sapiens
ttctctctactgcctctgagttggagatgtcagagggagccatggcccactgtaaagtaacacaatgtccccacccacaggattagaacccctcccctggaagcagctctgaggggaacagtcacatgtagagagtgcagggcactgtgtccagccgggggaaggaggtcaccaagggggttgacccccctctggccaggtggctgccttctgacacaccagcctctgtctctagcacggtggcccccacacacccagcctgtgaaacctacagccctcaagaaggctttggccaaattaaggagcggctccctctcccaggaggaagcacaggtgaaggatgtggagggcagtagagttgtgtgtgctccgccccctttctccacagtcggatggaaagaagggggctttcagccaggctcgcccaggctggggtctgagtgtcactgtccagctattggcttcttgcttaatgggtgagcccagctgctcccgtgcagctgccgccctagtgagggtgaaccggcaggcgagttacatttctgaaagcctgggaatacagtaaatattaggctgtgggctgctgggccaggaagagttgtttatttttcagggtttgtttatctattgacttgatgagggagggttataggtacaaccagtttaaagatggaaattttgagagagcaggcagggatttagtgctgggtaagcctggtcaaagcggctcttttggggcggccagaatccagtaccaatgtcctcagcatgttcatcagctgctgggggagtgcgggacagcatgaaagcacaggagaactttctggatgatagaaatactctgtatcttcaaaggaggtgggttccatagtaatgttaaatgagttaaaactcatcaaaatgtaaaccagacctgtgcatttcactaatagaaattatacctccaattaaaaacatgttttaaaagacagatgggccggatgcagtggctcatacttgtaatcccagcactttgggaggctgaggcaggtagatcacctgagtcaggagctcgagaccagcctggaaaacatggtgacatcctgcctctattaaaggtataaaaaaaaattagccaggcatggtggcacacgctactcgggaagctgaggcaggagaattgcttgaacccaggaggcagaggttacagtgagcagagatcgtgccattgcactagagcctgggcaacagcgcaagactccatctcaamaacaacaaaaaaaggacagatgaaggttttcaactttcagtaaaggcagaggagcttgttacagattcgcctccccacaagagcagttagaaaaactggataaaaatgtgccccgcccccaatcaaaaacaattgttggaaggtaattggagacctcagtcaggacttgagtgaccaggcctaggaggtgatcctgacagtctgtagtgctttcccacatttggtgattggtcaacagtagagggctaagaggctaagaaactgagtatgaa

SEQ ID NO: 714447 - DNA, 1521 bp, Homo sapiens
ttctctctactgcctctgagttggagatgtcagagggagccatggcccactgtaaagtaacacaatgtccccacccacaggattagaacccctcccctggaagcagctctgaggggaacagtcacatgtagagagtgcagggcactgtgtccagccgggggaaggaggtcaccaagggggttgacccccctctggccaggtggctgccttctgacacaccagcctctgtctctagcacggtggcccccacacacccagcctgtgaaacctacagccctcaagaaggctttggccaaattaaggagcggctccctctcccaggaggaagcacaggtgaaggatgtggagggcagtagagttgtgtgtgctccgccccctttctccacagtcggatggaaagaagggggctttcagccaggctcgcccaggctggggtctgagtgtcactgtccagctattggcttcttgcttaatgggtgagcccagctgctcccgtgcagctgccgccctagtgagggtgaaccggcaggcgagttacatttctgaaagcctgggaatacagtaaatattaggctgtgggctgctgggccaggaagagttgtttatttttcagggtttgtttatctattgacttgatgagggagggttataggtacaaccagtttaaagatggaaattttgagagagcaggcagggatttagtgctgggtaagcctggtcaaagcggctcttttggggcggccagaatccagtaccaatgtcctcagcatgttcatcagctgctgggggagtgcgggacagcatgaaagcacaggagaactttctggatgatagaaatactctgtatcttcaaaggaggtgggttccatagtaatgttaaatgagttaaaactcatcaaaatgtaaaccagacctgtgcatttcactaatagaaattatacctccaattaaaaacatgttttaaaagacagatgggccggatgcagtggctcatacttgtaatcccagcactttgggaggctgaggcaggtagatcacctgagtcaggagctcgagaccagcctggaaaacatggtgacatcctgcctctattaaaggtataaaaaaaaattagccaggcatggtggcacacgctactcgggaagctgaggcaggagaattgcttgaacccaggaggcagaggttacagtgagcagagatcgtgccattgcactagagcctgggcaacagcgcaagactccatctcaacaacaacaaaaaaaggacagatgaaggttttcaactttcagtaaaggcagaggagcttgttacrgattcgcctccccacaagagcagttagaaaaactggataaaaatgtgccccgcccccaatcaaaaacaattgttggaaggtaattggagacctcagtcaggacttgagtgaccaggcctaggaggtgatcctgacagtctgtagtgctttcccacatttggtgattggtcaacagtagagggctaagaggctaagaaactgagtatgaa

SEQ ID NO: 714448 - DNA, 1112 bp, Homo sapiens
tatgagccattgcgcccagcccctttatgacctatttctttatgaatatggcttgtctgttcattactgatataattatgcaactttcattagtatatatgaatgtttatgcttgcacaaaaatgtatgttattattgcctattttattgcataaagtgacctatgaagtgttctgtgttttcatatgtttctcaaataaattccctttaaaaatgtaaatacatgtaaatgtaaaaaaaaaagtaaataaatatcttttaaagaatttttaaattatattttccggaattacatttttggaattctgctctttcaggattatgattttcaggttttagactttatggattttgaccttttgggacttcagcattatgacattcgggattatggcattaaaaattgtatctcctgggactatgatcggctcccaatgtcaatagtgccacttttgagaaacctgatctaagctcaaacttgttgggacatakctcagccttgaaggaaagttattttggattttgatggatatttaaatatgtatatatctgacttttagtataaattagcagtctatgctgtgccttttcctttgtgagattttcctggcaatgctagtccttttagcttaatgaaataagaccaagttttaaagggttaataataaatgagaggaaatagctcctttatatatgtaggattattacacagctggcagcatagttccatcaagtacaaatgatactatccaaacacaatcagaaactgattaccagatctttaatcctaacagaatcaccttgacatgaatgttgagtataactcctggccagctataaaatttgcaagacctagtgcaaaatggtaatgcgggactcttgttcgaaaagcaggaaacaagtaccctgaaaggtacctacaatgcttttccctttcttccaaggtttctctctctctctttctctgcttattgtgatgttatttgctatttaatattctaagtaaagaaaaattaaaaatttaaatgattagcatgaattttaccatttatgtcgtgcaatgcagattttaaatgcaaatagcagagcattcagctgagatagggaatgaa

SEQ ID NO: 714449 - DNA, 1409 bp, Homo sapiens
ccctggtgagccaacagaaaaataaaaccaaaacaaccaaacaaaagacagattactactgtttttcatartaatccaccatattataattttaataaagatgtaggtcatttttccacttaagtttttgccttctaatagaatataaaaggcatattattttagtttttaataggatcaaagattctataactaaatatacaatacattatttctgtatcactttttgttctttgagatttgttacagacaactcagtattaccttttaatttttgagagattttcttaatacaaccacgattttctattctactaattccagttttgctaattgtctataagctgttctttgtcagtcagagattttttttactgcatacgaaatgcctgctattaaaatgtttagctttggctaataaataataactcaattatattattatcacataagcaggcttcaaaatacccttactgatcctacatactttgaaatgttgttgtcatgaggtccacaagtcattactgttgcttatagtgtaattttctatcactctaatattgaaattttaaaatcattattgcaaatttcaacactcagtatgacttctgagtaataataatcgtatgcattaccatcatcaaggttcccaaagaatttacacagagatgaaagcttttcacatgaataaatatcaaagttagaattccaatagttctgtactattcaaagcataatcagattcattttaaactttgcccaatatcactgtgataaatattaaatattaatatttaatattaaagcccttttgtctctataactaaatcacttaaacactagggtaagctgttctattacttataacaaatttctggcatgactgtggtgctttatttccagtgttgttgaagtgcttactgttaatcaataaatttagattctcaagttgaacttagcaagtcacctgtgagattctaatttccacactgaaaaaagaccttttgatcctcattttcttcacctttttgcaacttttgcagttatatttttctaccattttaaaactgtcatctcatggctttcttgatgacggagtcttttcctcctcctgcctctgaacataccccactttttcctccctctgttcttcccaggaagtcaaaaatcttgaagtcacattagaccctgctttcactcatctcaccctcaaattgtcctccaagttcagactgtctatgtcctagaggtctaataaatccttcccactcttaatttccactgctacagttcaagacttcaacctttctgagtttatgaccatgatgtcatccttactgattttactgaccttactcttggcctgcttacttcaccacctacaatgctgattgggtgatctcaaaaaa

SEQ ID NO: 714450 - DNA, 1251 bp, Homo sapiens
tgggtctaaggaaactttttggattgatggagatattctaaaactggattgtggagatagttgtatacttgtataaatttactacaagtcatcaaactgtgcactttccatgggtgcattttatgttttgtttcataaaagatgctattttccttagcatgtatattgggccccttttcattaataacatatctggattagtgactttaaaaataaatatttttataattaatttataaacaaaacatttttaaatttaaggaacaaaataattaaggagaattttggtaatttagatttttttcataaaatgttattgagcaatatgtgcatataactatattttccttgataatttaaataaaattatttattattattacttttcattttcttgaataaggtcctgtgtaatgtcaaattgtaatttgataataaaaattaccttcagaaaatttctaggaaggtttcttttctctaataagtatcattttaagagtataactgatataaaaagcttgcacattactgctattcatcaataaacttcaaatgaaataagatcttgattgtaaatagctagataccatcttgttcctgtttacattttgcattttaagaccaagatttgcaattaatcttgcaattagaggaagttgccctgcctgcctatgaaaaagatatttttgatgggtaggaaataatttaatgattaagaagaaacagtcatgggaattcctgagaggtcttaggaagacactgcctgaaaaatgcctaaaaggaacaagacccccataatattttttaaaaattaaactatcttttaatctatttgcttttataagcagaaagcaggaaaaaaatcatatctataatattaaccaactgtatttttcagtgttaaagacagagaagacaaattaaaaagaatacatgctttggagaatgtcagtggggtagagaagcaagaatgcagactccaggggatattacaaaggaggggtgctgttggcctggagccacccttctcccagaattcccctcaaccatccattgctggagttcccygcactggcccacgctgcccccccccccacccctgtcaccccctgtctctcggggccaacagggccatctgatgcttgctgccatgacatgcccactgccccagcttccaaaatgatcacttcgaacatcctctttattcagtttttgccttagtgaccctttccagctaagtgttgtgagaaa

SEQ ID NO: 714451 - DNA, 643 bp, Homo sapiens
ccttagtttccaaccttttggccacattgctacttatatgtatttcattaaagcaacctaaaacagatgtatttgatatatctgttttaaagggtttagttagaattagcttatctaaaagtgatctagtctattatgttctgaatctaatcayatagttcagattccaaaagaatctgaagtgaccctgtgacaacatgaaactacattaaatgaatatatattttgtctaaatgacatccttggcttactttcagaactttaaaaaatcttttcaaagcctgacaacgtcaggtactgattgagatgatctagtacgtctgatatgctcatgtaaagtatttagatgctgttttgttattgtgaattcaatagtgccttgtgagcatctgaacctagtactccctctaaagagtgtggaactgggtttgtgttgacagcacatcgctgaacagacatcccaaactgctctttccggcactagggagtgggcagcataatccctttattacgcaaagagcatatcaaattcaagtaccaaaatgcttccaaatagatttaggccaacactttctttgataggatgagacatggaaaaagatcctatttctgcaagaagcccattttaaatttattactgaat

SEQ ID NO: 714452 - DNA, 1165 bp, Homo sapiens
taatattacctcaaatttagcagcttaaaatatcacgtatttatgatctcacaatttctatgcagtgggagtctaggcatggctttaccggggtctctgtttagagtctcacgaggatgtgattttggtgtcagctggggctgccatgtcatctgaggctctactggaaaagacctgtttccaagctcacacaggctgtaggcagaattcagttcctcatggttgtagcactgagaacttcggctttcactgattgttggcagaggccaccctcagcttccagatgctgggcatagttccttgacacatggggttcccaacatggcttcttcaaagccagcaagagggaccagcaggctctacaatcttatataattaatcacatcatcatgcccattcaatcatgtccatcccatcatctcagctagaagtaagtcataggttttgcccatactccaggggaagaaattacacaagggagtcaccaggagataaaggtcttggggacatcttaaaagtctgtccagcatgcaggagatggtgacagaaacccatgaaggaaaagatgagtgatgatgtgtagttgtagcaattagtcgggggtattaagaaagccagcccacrgcttgccatagggtacctacttctgtcattgacttgataaactggtaagtagaatgacagattcaagccaaagggtgagaagttttaaagctctataagatttgtgcactttaggtatgttacaattcaataaaatagccctggagttttttactgtttcttacagtttctctttaagaagccacagcttatttcctcctgtgaatggtatgctggtggtgtaacctaatttttaacactcttagaggcctgattattttccttgttttaaataacaaaagaaattctaatttagttcttattcaaccaaaacaaaacaaaaatcccaatttaaaaatattgctaccccctgaagagactggaaaagtcaagcatggttgtttcattttaatgcttgatctcctaaataagctgacaaagaagtgatgtattttgattgaatttatcaaatttttattattttttggtaccagttatttcagggcaattatggctctataattccataaacatgttctgatgtaaacaactgtgagaactg

SEQ ID NO: 714453 - DNA, 777 bp, Homo sapiens
  misc_feature 677, 678, 679, 680, 681, 682, 683, 684, 685, 686, 687, 688,689, 690, 691, 692, 693, 694, 695, 696, 697, 698, 699, 700,701, 702, 703, 704, 705, 706, 707, 708, 709, 710, 711, 712,713, 714, 715, 716, 717, 718, 719, 720, 721, 722, 723: n = A,T,C or G
  misc_feature 724, 725, 726, 727, 728, 729, 730, 731, 732, 733, 734, 735,736, 737, 738, 739, 740, 741, 742, 743, 744, 745, 746, 747,748, 749, 750, 751, 752, 753, 754, 755, 756, 757, 758, 759,760, 761, 762, 763, 764, 765, 766, 767, 768, 769, 770: n = A,T,C or G
  misc_feature 771, 772, 773, 774, 775, 776: n = A,T,C or G
tgaaagaagttctatcataggtaaaatgctgtcgaacattatcccatgctatagagaagtattttctgaaaggaggagttaatacagaaaatgtcaccgttgtcttaagaaattgtcacagccatcccagccttcagcaagcaccaccctgatcagtcagcagccgtcagcatcaagtcaataccctccaccagaaaaaaaaattatgactggcttaaggttcacatgattataggaatttttagcaacaaaatattttaattaaggtatatacagtaatgtttagacatgacgatattgaatacttagtagactaccatacagcataaacatagcttttatatacattcggaaaccaaaaaagttttggctaactttattgtaattttcactttattccagttgtctggaacttggcctcctctatccccaatgtatctctgtagtagagaatgacatcctgacatacagtgaagtgagttgagaaaagtacaatacatagacctgtatcaagaaaacttagaaaacacaaattgaaaaataattcagaatagaacaaaaaaaatacattcttttagaatcttattttaaagatttatgccaattcmaaatgaagaagtattgataaatttatgtcaaatttaaggtaactcaatattcattatatatgatttttnnnnnnnnnnnnnnnnnnnnnnnnnnnnnnnnnnnnnnnnnnnnnnnnnnnnnnnnnnnnnnnnnnnnnnnnnnnnnnnnnnnnnnnnnnnnnnnnnnnnt

SEQ ID NO: 714454 - DNA, 648 bp, Homo sapiens
taggaacctttaaaatcaatccattttgttctcaaatatggttcatttaaataaattatatgaggaataagagacaaagtgagatacttttttgattattctataacataaaatgccaattattatatgtgtctttgctagactgtgctaacatttttgagaaataaatgacctctatgctaggtattctctctgtgataataatgtttatgataagaggagaatcatgtttataatatatttactgaggccaggcgcagtgactcatgcctgtaatcccagcactttgggaggccgaagcaggtggatcaacggaggtcaggagttcaagascagcctggccaacatggtgaagccttgtttctactaaaaatacaaaatttatctgggcatggtgatgggcacctgtaatcctagctactttggaggctgaggttaatcacttgaacccgggagacagaggttgcagtgagctgagatcacgccattgcactccggcctgaacaacaagagcaaaaatccatctcaaaacaaaacaaacaaatatatatatatttactgagaacaagttgtaaaagtgtatggataacatgctctactaaactatatacaaatgtaaaaagaatcttaaaggatctgtgctagcat

SEQ ID NO: 714455 - DNA, 604 bp, Homo sapiens
cacaggtacacacataacttcctactattccgtcatgggtaaatggaaaatcaggcatattgagggaaaacttacgagtaagaaagtatcagggcacatgttatctatgggctctcattagaccagattgacttaaagtagctatggctgtactggatgttccacagaaagagcttttggggaagaaacatcctaataaaggaaatgacaggcagaaaatgttgcaaygaaggtgaaataactagaacttgtcaaagtctttatcaaagtctttttttaaaaaaaagttgaatctccaggtctaaccctctagtatcagccagctcttcagtgagtggctgtagatctgctaaagggtttcttgttggttatcaaaactggagataaggggcctccagggtcatttgatttgcctcttggcattgttataacttagtctgatcaaattccatgtcaacatagataagcagctaaataattactacagttaactgatgtaacatgtgatagttcaaagcaggaaaaatgtaggtcaacgaggatttagtgataagccagaaactggtatgagggtaggagtagctagtgtataaatagtacagca

SEQ ID NO: 714456 - DNA, 618 bp, Homo sapiens
gtacctagtgacagatgagttgaaaaaaaacctatttgatattttagtagtagtatgggaaatacaaataatataggactggcctagtttgaaaaatggagctatttctcatgcacatttctacaattagcaaatgattctcaaagtaggtcacagccccaaagaaagaaaacaaatgcagagtattgccactgatttgacctgtggcttcacagtaaaattcaaatcaaagatgttctgtaagatcttgatgagacctgggaaaagtttagagttacttcatagatgctcttaattaaacaaactagcccataaagatggtatagtcatgacctgtaaactcattcaaactgtagaaactctaagaatgctaagtatgatctcatagtagctttacaatggttccaggtcttggaatataaatatgggtgtggttaataaagaggagtattgataatataagaktgccataaaagtgttaaaggaattataccagcttacattgacagaaagataaatacccaaaatgtgtgtatacatacatacgtgtgtgtatatatatttacacacacacacatacatagttttaaatatattaaaaacatatgatgtactgtt

SEQ ID NO: 714457 - DNA, 614 bp, Homo sapiens
catcagtttgtatgcatagcacattacaatgaaatcatctttcttctatggtaaggaattgaccacctaaatagcatgcacttccgtaattatataattaattactttatatattttagggaagtgatatttgtttagagccacttgttttcaaatcattttcctagtattggaaataaaaaacaattcagaaaagggaactgtcctcatgaacttagagtgctttagaaagatgcaatcatataatcaagtagtgatgtttgagctgagtcttagaagataaacaggtacttgcctatctgagrgaaaagaaacatagtcctcaaagaaagagcaacagaagcaaaagcattatgaagtaaaacatctggtcactcattttgcatccctaaaatcatgcacaatgcctataatgcagaatacatacaatattgaaagtaatcaatgttttaataaataaatgaattcaaaaatgattgctataaaaacacctgtcagagtgccaaaattttaagacctcaatattcaatgcattaactaacttctacatattaatttgaactaaactaactttatttaatatataacatattatatatgtacatatatattac

SEQ ID NO: 714458 - DNA, 620 bp, Homo sapiens
tcaattagtaatagcagggttttaattaagctgagtataaggttgarcaaggaaaaccacaaaagcatcaattatttacattactacatagttgtacaaaactgaaaattgactttcggaattgccactggatttccttttgttttagtgactggtcttgcacaatcattttgtatctacgggaaaataaagagtgcatcttctacatgaaaagaagtccttccattaaaatttaagactgtgatatgaataatagggtaagagaaaggattaatacagtaaactatgcattatgttgaaaaaacagtaattgtgaacaaacaagtctgggaattaaatctttcttaaatttgattgcaggctcagattattttaaggaaattttaaatagcttctgaggtttacttatatttgacagttaattgctgattacttttccttattatcaaattgttactttaaaatataagctacagttcttttatgcatgggagtatacagttctagcttatcattaaaacatttttgctttatctccctaaaccacaatgtcacttttggtgccaagactattaggctactactttctcttaacttaagagtgagctgaaatactgtta

SEQ ID NO: 714459 - DNA, 620 bp, Homo sapiens
tcaattagtaatagcagggttttaattaagctgagtataaggttgagcaaggaaaaccacaaaagcatcaattatttacattactacatagttgtacaaaactgaaaattgactttcggaattgccactggatttccttttgttttagtgactggtcttgcacaatcrttttgtatctacgggaaaataaagagtgcatcttctacatgaaaagaagtccttccattaaaatttaagactgtgatatgaataatagggtaagagaaaggattaatacagtaaactatgcattatgttgaaaaaacagtaattgtgaacaaacaagtctgggaattaaatctttcttaaatttgattgcaggctcagattattttaaggaaattttaaatagcttctgaggtttacttatatttgacagttaattgctgattacttttccttattatcaaattgttactttaaaatataagctacagttcttttatgcatgggagtatacagttctagcttatcattaaaacatttttgctttatctccctaaaccacaatgtcacttttggtgccaagactattaggctactactttctcttaacttaagagtgagctgaaatactgtta

SEQ ID NO: 714460 - DNA, 620 bp, Homo sapiens
tcaattagtaatagcagggttttaattaagctgagtataaggttgagcaaggaaaaccacaaaagcatcaattatttacattactacatagttgtacaaaactgaaaattgactttcggaattgccactggatttccttttgttttagtgactggtcttgcacaatcattttgtatctacgggaaaataaagagtgcatcttctacatgaaaagaagtccttccattaaaatttaagactgtgrtatgaataatagggtaagagaaaggattaatacagtaaactatgcattatgttgaaaaaacagtaattgtgaacaaacaagtctgggaattaaatctttcttaaatttgattgcaggctcagattattttaaggaaattttaaatagcttctgaggtttacttatatttgacagttaattgctgattacttttccttattatcaaattgttactttaaaatataagctacagttcttttatgcatgggagtatacagttctagcttatcattaaaacatttttgctttatctccctaaaccacaatgtcacttttggtgccaagactattaggctactactttctcttaacttaagagtgagctgaaatactgtta

SEQ ID NO: 714461 - DNA, 620 bp, Homo sapiens
tcaattagtaatagcagggttttaattaagctgagtataaggttgagcaaggaaaaccacaaaagcatcaattatttacattactacatagttgtacaaaactgaaaattgactttcggaattgccactggatttccttttgttttagtgactggtcttgcacaatcattttgtatctacgggaaaataaagagtgcatcttctacatgaaaagaagtccttccattaaaatttaagactgtgatatgaataatagggtaagagaaaggattaatacagtaaactatgcattawgttgaaaaaacagtaattgtgaacaaacaagtctgggaattaaatctttcttaaatttgattgcaggctcagattattttaaggaaattttaaatagcttctgaggtttacttatatttgacagttaattgctgattacttttccttattatcaaattgttactttaaaatataagctacagttcttttatgcatgggagtatacagttctagcttatcattaaaacatttttgctttatctccctaaaccacaatgtcacttttggtgccaagactattaggctactactttctcttaacttaagagtgagctgaaatactgtta

SEQ ID NO: 714462 - DNA, 621 bp, Homo sapiens
tttcccttgtaagtatgagctgagacaaacatgaagcaccaaaatagcactgtactttgggtgggggaacctgcatttcaactgctccttgtaatacatccttcgtcccccttaatgcatcttttctttttccgatgtcacctttgtaaaagaagctgttcaaagatgtatagtttgttttgttttgttgagatggagtctcgctctgtcgccaagctggagtgcagtggcaccatctcggctcackgcaacctctgcctcccgggttcaagcgattcttctgcctcagcctccggagtggctgggactacatatgcccgccaccacgcccggctaattatttgtattttagtagagatgtggtttcaccatgttggccagggtggtctcgatctgctgatctcgtgatctgcccgcctcggcctcccaaagttctgagattacaggcgtgagccaccacacccagccagatttatagttttaaataactttccagatataatcttttctggtaaataaaactaagagatagggctaaaggacaaaaacagactaacaatactacaggaatttgactttttatgtagttggtcattatgggatgtctgtcacatcagaatt

SEQ ID NO: 714463 - DNA, 1311 bp, Homo sapiens
tactctattaaatgctgtctagcaatacaagagaacaaactactcttatatgtaataatacagataaattccaaaaactcatttttaatgaaataaatcaaacaagtatttctatttttataaaattctagaaggcaaaattatatttactggaagcagatcattgattgcctagggctaggagtacaaagagacatgaaacatttgggagatggaaatgttctataagttgattttcatggtggggatatgcttatatacatttgtcaaaattcattgaactgtgtatttaaaaatggatgaattagaatatgcaaaktacacctttagaaagctgctaaaaataaataagcacaataaggaaggtatagaacatacttgagaatacataactcttttgctttcttgaaattatgcttttttttatagtctctttatcctgtttagtgaatacagatattcactaattctgctttgactctctaatgatctcttacagtcactttgtataagatgatgttcttacgtgcattttgaactgtatggcttatcacttcattatggtttatcacttcagtactaatctttttcctgagacacaggcccacattcccaatagctttctagacattcctacttatgtgttccagcacatagttacatgtttttgcaaggtaaaaaaataggatttaatatcaatacctccaaattggaaaaattattataactttcccatactgaaccttagctaatagtaggtactgtgaagattagtgaacatttcctcatctaatttttacaaaaatggttcatttgttattaactttttttttcacaaatgacatatctgaaactcagagaagttaaacaagttttccaaagtaatacaactagtaagaggttgagataattatcaagttcttaagcctggaatgtactgtagttatttatttatttattattgctattattactgagacagagtctctgtcacccaggctgaagtgcagtggcatgatctcggctcactgcaacctccaccttccgggttcaagtgagttcaagcaattcttgtgcctcagcttcccgagtagctgggattacaggtgtgctccaacataccaggctaatttttgtatttttgttagagaccgcgtttcaccctgttggccaggctggtcttgaactcctggctcaaatgattcacctccctctacctctcaaagtgctaggattataggcatgagccatcaccccagccaatacactgttacttttaaagaagaccatacagggttgaattttgagcaa

SEQ ID NO: 714464 - DNA, 1311 bp, Homo sapiens
tactctattaaatgctgtctagcaatacaagagaacaaactactcttatatgtaataatacagataaattccaaaaactcatttttaatgaaataaatcaaacaagtatttctatttttataaaattctagaaggcaaaattatatttactggaagcagatcattgattgcctagggctaggagtacaaagagacatgaaacatttgggagatggaaatgttctataagttgattttcatggtggggatatgcttatatacatttgtcaaaattcattgaactgtgtatttaaaaatggatgaattagaatatgcaaagtacacctttagaaagctgctaaaaataaataagcacaataaggaaggtatagaacatacttgagaatacataactcttttgctttcttgaaattatgcttttttttatagtctctttatcctgtttagtgaatacagatattcactaattctgctttgactctctaatgatctcttacagtcactttgtataagatgatgttcttacgtgcattttgaactgtatggcttatcacttcattatggtttatcacttcagtactaatctttttcctgagacacaggcccacattcccaatagctttctagacattcctacttatgtgttccagcacatagttacatgtttttgcaaggtaaaaaaataggatttaatatcaatacctccaaattggaaaaattattataactttcccatactgaaccttagctaatagtaggtactgtgaagattagtgaacatttcctcatctaatttttacaaaaatggttcatttgttattaacwttttttttcacaaatgacatatctgaaactcagagaagttaaacaagttttccaaagtaatacaactagtaagaggttgagataattatcaagttcttaagcctggaatgtactgtagttatttatttatttattattgctattattactgagacagagtctctgtcacccaggctgaagtgcagtggcatgatctcggctcactgcaacctccaccttccgggttcaagtgagttcaagcaattcttgtgcctcagcttcccgagtagctgggattacaggtgtgctccaacataccaggctaatttttgtatttttgttagagaccgcgtttcaccctgttggccaggctggtcttgaactcctggctcaaatgattcacctccctctacctctcaaagtgctaggattataggcatgagccatcaccccagccaatacactgttacttttaaagaagaccatacagggttgaattttgagcaa

SEQ ID NO: 714465 - DNA, 571 bp, Homo sapiens
tgaggttctgagtgaacataaattttgggggacrctattcaaccccctgcacaccctcagacataaggaagagatgcaggcccttactctgtctcccactcttcaaacagcttcacagatcacaaacacaaaaatatgtccacacatgccaggggcacaaacaaaaatgtgtatgtattaaagaacgcatgagcacctctgtatctcagggtctggcacgcagcaccatcacagcacaacctgtgagcctaaacatctcttctgtgactcaaacaaattaagccccaaggaaatgtttttcctaatctactgctctatgttcctaggacagaaggcatctatctacaaatgccatgattatgtgggttggcagagagtggttctgaatgcaaaaagagtgtaagtggcaaaaacagttaagaaagagaagacagagtttccctcaggggtaagacctgggcgtgcagcaaattcaggttctctggcactgtagtggtagtcgccggcccaagttagaggccagctgagaagtcttcgtgcctcagatttgctgacctacagaatgcttcag

SEQ ID NO: 714466 - DNA, 571 bp, Homo sapiens
tgaggttctgagtgaacataaattttgggggacactattcaaccccctgcacaccctcagacataaggaagagatgcaggcccttactctgtctcccactcttcaaacagcttcacagatcacaaacacaaaaatatgtccacacatgccaggggcacaaacaaaaatgtgtatgtattaaagaacgcatgagcacctctgtatctcagggtctggcacgcagcaccatcacagcacaacctgtgagcctaaacatctcttctgtgactcaaacaaattaagccccaaggaaatgtttttcctaatctactgctctatgttcctaggacasaaggcatctatctacaaatgccatgattatgtgggttggcagagagtggttctgaatgcaaaaagagtgtaagtggcaaaaacagttaagaaagagaagacagagtttccctcaggggtaagacctgggcgtgcagcaaattcaggttctctggcactgtagtggtagtcgccggcccaagttagaggccagctgagaagtcttcgtgcctcagatttgctgacctacagaatgcttcag

SEQ ID NO: 714467 - DNA, 571 bp, Homo sapiens
tgaggttctgagtgaacataaattttgggggacactattcaaccccctgcacaccctcagacataaggaagagatgcaggcccttactctgtctcccactcttcaaacagcttcacagatcacaaacacaaaaatatgtccacacatgccaggggcacaaacaaaaatgtgtatgtattaaagaacgcatgagcacctctgtatctcagggtctggcacgcagcaccatcacagcacaacctgtgagcctaaacatctcttctgtgactcaaacaaattaagccccaaggaaatgtttttcctaatctactgctctatgttcctaggacagaaggcatctatctacaaatgccatgattatgtgggttggcagagagtggttctgaatgcaaaaagagtgtaagwggcaaaaacagttaagaaagagaagacagagtttccctcaggggtaagacctgggcgtgcagcaaattcaggttctctggcactgtagtggtagtcgccggcccaagttagaggccagctgagaagtcttcgtgcctcagatttgctgacctacagaatgcttcag

SEQ ID NO: 714468 - DNA, 629 bp, Homo sapiens
ccttgttgtactgtgacctttgtaaacaatggccttcagtaatttaaagaagcatacaataaaaaaaacaacatccaatgacaaaagaataccaggcttattaacctgccaggcaaagagatacaccagtagaataaaatcagtgattcactaagaatgcaaatcagagatatctaaccaytagaaaggggggaagtatatgttactgatgcttagttatgccaatgaagattgaaaagaagctctctggttaggaagggaggagtccaggattctgtgcacaaataattatttaataaaacaggaatcattgttctctggtcaggccagtgaggttctggcatagtgatgtcactcaaatattattatattttaagagattttgttggttataatggttgtgttaaaacacagagtcagctttaatatctcctatacaagtaggtagaaaaatttactttacatctgtaaattaaaattcaagttatatatccctaacacatttaccatacaattgtactgaggtaataagtaacacatttcaaaacctgcatttagaaaaaggaggagtgggaaacacaaggccatcattagtctgggaagaaattgaaggttccttttgctggcag

SEQ ID NO: 714469 - DNA, 629 bp, Homo sapiens
ccttgttgtactgtgacctttgtaaacaatggccttcagtaatttaaagaagcatacaataaaaaaaacaacatccaatgacaaaagaataccaggcttattaacctgccaggcaaagagatacaccagtagaataaaatcagtgattcactaagaatgcaaatcagagatatctaaccattagaaaggggggaagtatatgttactgatgcttagttatgccaatgaagattgaaaagaagctctctggttaggaagggaggagtccaggattctgtgcacaaataattatttaataaaacaggaatcattgttctctggtcaggccagtgaggttctggcatagtgatrtcactcaaatattattatattttaagagattttgttggttataatggttgtgttaaaacacagagtcagctttaatatctcctatacaagtaggtagaaaaatttactttacatctgtaaattaaaattcaagttatatatccctaacacatttaccatacaattgtactgaggtaataagtaacacatttcaaaacctgcatttagaaaaaggaggagtgggaaacacaaggccatcattagtctgggaagaaattgaaggttccttttgctggcag

SEQ ID NO: 714470 - DNA, 875 bp, Homo sapiens
ttaatgtttagttcatatctccagattagtcattagtgtttagttattgtcagtataataaacatttaagtaattttcaaaggcttctgaatttccatgatgtgtagatgtaacacmtatttgttcaaactcttgccattaaatggactaattacttccattaaaataacactatactaaaaatatttgttcatattcccccaggcattggtgcttttatttctgtaggttgtattactaagtgtggtttttctagatcaaagagtgtgaatttgtaattttaatatatactgtaggcttttttccaaaaaatgttatagcaatttagattcaaattgatgcccattttactgtagtattgtgtgcaatggcaaacacttaaatttatcaattctaaagtttgaaataagaaaattgtggattttaacttgaatattctaaatcagaagtgcagtgaattctattatcatggtttttcataatttaagcttcttctctagcaatatattactcattaaaaaaaagaaaagaaattaaagttgcaccagatgaagtaaacaggcaaggaagacttttctcaagactattgcaatagggaagaggcagtaggcagtgacgtcaactttgctgaaacaaaaggtgagagggtttttaagcaacaggaggagctaatggaaaagtactagaggacattagtggggaggttggtcaaggtgattaggccatctctgttgctgattggtgcttattgaagttaggctcttacccactcacagaaactgggagacagaggccctgtcgttcttgatgattacatttcatagggattctcccaggttcttgggaaagttgttcctgccatgtaaagctggcaa

SEQ ID NO: 714471 - DNA, 602 bp, Homo sapiens
tgaattgcgataaattctcgtcttactgaattgcagcttggttttttgcctcttattaattgacagtggaattatgattgctccaatagttcaaccaaaataggcattactaagaatattgagtaaggtttgtgagttagttttttttcttatctgaatagttacttatttttggattttataattatttgaatatttttcatccttgatttttgcaggcacagaccacatcaagcaattttaaacaatgtcagagcttctgtacgtctttatctagtccttagagatcacaaatcagaagagggtgagggactgactatacaaatgggaaatggccagactatatataaacataaaactttgacctgcaacctgcaactacctccccagaatatcaattcctgatctacaataaacaaccctgttataagtcatgaagaggactcaaatatgccaccccaaaatatgtcacttttgcacaaggattatttcaagctgaaagcaactgagaaagcagacacaaaaagagctctttaccttttctcatctgcctaaaatcagagcataaatttcrttttgtgaaggtatctccctttccatca

SEQ ID NO: 714472 - DNA, 1253 bp, Homo sapiens
gtatggaagatttacattaacagccccactcttccccattccttacatccatacactttgccatgtaacatttcaatgctctcccactgttggtaacatgtaattccctgacgctgagttcaactgagtgacttgctttggtcaataaaattagaccagattcagagcccaggctccaagaggccttgcatgtttctacttgtcctcttgaacctctcccttcactgtataaagaatctgcttaattgatcccatggacccatgggagccctttgatcccatgagcaggataaggaacatttggagtggaactgctcagctaaacccagcctagaccaagtcacccccagggaacacagagatttataagaaacaataactgtctgttactttaagtggttttttatctagcaayagctagctgatacacagacataacaatttgcatttccctatggcttggtaagtatcttctacctttgttggtacaattaggccaacaaggattaaaatcaacaaagaatgtgtacatggatgttatccttactgctatgaatatcaaactattgcttgaggattgaggtccagtaataaaacagcagctatttctccaaaaaaatcctctgtgacttttcaaatgaaatgagggctttcctgccaatcccacaagtcaggaagataaaattgggcatggatctttcccttgctgctgcagaaactcttcatccctgtcagagatggcagatccattgctacaaccagggggccgtgctgaaagttcagagctggttttggaaatgacacagtctacttcattctggataagggcacagtctgtcataacaggttattttaaaggtcaccctagatttaaccaggacatcttgttcctttcttttatcctccaaatttttctttgaaaagctgttgcatatctctggcctttctattttctctaccagacaaaacctattactaagtggatgttaattaagccacagggccaagacattgacaattcaaaatgaaaactatgactgcatatggcattgtatcctgcccccaaatgctgtgctcttaaagggagactcttgaaatgaaaactcgtgcacctataaatgcgaagagtgacttgagtgctataaaacaaagtgcactggttaacacaccgtcagctttgttatgtcaggacagaaataaaaatctaatagtaaatagtcaacagatgtcatagcaccggagaaaataaatgc

SEQ ID NO: 714473 - DNA, 663 bp, Homo sapiens
tcagtggcgcgatctcgactcactgcaagctccgcctcccgggttcccgccattctcctgcctcagcctcccgtgtagctgggactacaggcgcccgccaccatgcccggctaattttttttgtatttttagtagagacggggtttcaccgtgttagccaggatggtctcgatctcctgacctcgtgatccgcccgtctcggcctcccaaagtgctaggattacaggcgtgagccacygcgcccggcccatggcttcattcttgaagtcagcgagaccacaaaccaaccgaagaaactgtggtctcaatagtgtgctgctgcatatatagcatgaagacatcctgccagtggcgttcatgctccactcagccttgtgtttgtatcactttcctagggctgccttaacaaagtgtcacagactgggatggcttaaaacaacggaaatgtgttctctcatttggagttctggatcaggggctcatgggacacattccctctgaacccaatagaacccttccctgcctgttcccagcttctggcggcttgttagaaatcttctgcattccttggcttgaagccgcatcactccagtctctgccctcagtgtcacatggtgctcttcctgtgtgcccacgtcttctaaggtcattagtcatgttgga

SEQ ID NO: 714474 - DNA, 624 bp, Homo sapiens
tcctgttcgtcctcttgctcctgcatttaggacaggtacccacctgggcgtgacgcatttcgagtttcgtgtgaacagtgattgatagtgccctgcgtggtgatccctcccatttctagttttgtgtgaacattgattgatagtgctgtatgcggcgatccctcttggtgtttctttgcaattgaaattaaagggttagtgggtgaagaggggcacaggtggacttttcagggtctggaaatgttctgcttctcaatctgggtgctggtggcctggttcacttcggagatctcatctagctgcacgcttcaagcttgtgtgctttccaggatgtaggttatactccagtaaaaaggtaaacaacacaaccacagccatgctggctgaaaagagaagctggaggcaccagggcccctgcttgtggcaatgggtttggccgttccttgggcaggagccaggtcctggggtgctcccaccgatggccagtctggggcagcggctttgctcctggcacctctgggcagggacctgggactcaggagcaatgacatctctgaaaggactctgcaaactgtgaagtgaggtacacacatgtcagactgcaaaytgttaagtactgtgcac

SEQ ID NO: 714475 - DNA, 1567 bp, Homo sapiens
tttaatggcacagagtccaggaaggaagtcatgagcaggcctgttcccatctagctggctgatttctccagggagctaactggggggctgctgcctctcctggccttaccctcgctctgcccccaggagctcttggcttaatggtccctgttattttaattggttgcaatacttccctgtccctctctgactggcttagctaattgtgttctaaatctgcctcttctggtggagttggtggaatgaaggcagtttagtgaaagattcttcagcttcagagagtggtgggaacaggggagagggctgggtggcagtcttggagaagccagaggggaggggaagatggtgccggacaggtaaacagggtcgggcaggggctgctttgcctggcatggacagagcctcctgagatgggagagctgtcctgaccctgaccacccacagaaagaactccaggcttccagggctcctcctgaccctcccaaagctctagaggagagatcgtttggttctgtagttgaattttcaggcccaagaatctgtgagctttgggggcacttacacaggaaagcatcatctcttctaagctgtaccagatgttgattattacgtcttgtgggccttgaggggtgggtgggaatactacagtagatttacacatttgatgaaagcatgcatcccaattggagaaacgttaaaatgtgggggatgtgcattcgaaatgaagaaatagggtatttagaatcaaggctgttgtgggaaatcaaggctgggcagctgctcccagcctcctcactcaccatagccccttccgtgcgggaaggtagattaaatatccttggactcaataaacggtttattcgggatcccagtgcgcagaaggcagggctcgtgtgcctgcagattcgtaggtctcatgttcctcttaacccctccgtggcggacagagctttagcagtcactgcactccacacacggccatggaattggagcgtgagatcaaacatgttccctggccttggtgtgtaggagggtgtgtgtccttatggacaaataagtcaaatggcgaggaaatcccggggcaatccctgctgtaacagagacctaactgccgcagatggggccacaaagggaggcacagtccacccmagagaaggcttccaggaggaggtgtcgtgtgagaggggccccgaaggctgagtagaatttcctcatccgagacaagggaggagggcagtgcaggccgaggggacagcagcaggggcaacgcttggaggtgggaatgggaggcttttcccctgtctcatccatctttgtccagcattcataaagccagcccaggctctgtttcaggtgctggtggcacagaagtgaacaaaacagaaccattgtccacaaggtgcttttattttaacaattattattattgtttttggagatggagtcttgctctgttgcccaggctggagtgtagtggcgtgatctcagctcactgaaacctccgcctcccaagttcaagtgattctcatgcctcagtctcctgagtagctgggataacaggtgtgcg

SEQ ID NO: 714476 - DNA, 1540 bp, Homo sapiens
tggctagtgctataccattggctagtattagacttagagtaggtactcagtaaacagtaaaaattgagataaatgaaagggctctcaaatagactccagaaatggtccattcctactgtgctgaagtagaacttactgtgtagggtagtgatggtacatgccatctgatggattgctcttatagaagctgcacaaaaggttctgtggcttatcagctgcagagctgccttggaacctgcttgaactctacagtgtttacctttctgaataagagttacgtttgggcttatggaagaactaacaatctagggaaatttggttaccaagtattgcatgatgagtgtgcatctccaggtaaatgcaaagtgtattcagtgtatatttccagctaagtccaaattcgtactggacatggttatggatcagagatgtatcagttcttagcacctatagactcatttaggaattagtttgataatttgatgtcagccatggcactgtattggttaaatccattagtcatgtatgtattggctcttagggatcttaggtgggcatgggtaattcgttccataatctaatctatggagctgttcttatatttgaggggtctcttaggatcatcaggactcttctgggtcctggtttattctggggcactcttgagaagtagatagttgttgttgggtaatctactaacctaggccatttctgcattctgagtgcttgtgtatagatatatctgaagtgtctgcaagtatgggtatgttttaaggtatcaaaactcracattattctgtaggaaaatgtagggtgcagtataacacagtgattaagaccttttttcctgacatacctatatcacttaaacttttacgcttcagtttcctcaatttctgtgccatgggaatccaataatacctacctttatgccactgtgtaggttgggcattgtacatttgcaaggagtaccactcacctagtagtccatataactggcactcaaaagttttgaagagcacaatgtgcataccacaatgggcagaactgtttgcttatgagattagtgagtcactgcatgcagagtgcctagtgcagtgcttgacattcaagaagtacacaagtgatgatcttcattgttatagaaaggtctacactgttcttttaggatgactggatgggatgagatgtatgatataggctataacaagattttcaagtgatctaacaggtgggtaagggattgcaaatatgatctagtccataaatcattgctggagtctatatttagaagttagctagtataccagaaatctcagaccaaactgtacaggggtataaatacagccacttttcatgtatttggaagcaattttctatctccagccttcatttctgaaatttcagtcctttgggatgtaaatgttactaggagtaagggaataaaccaaggaggcctctgacatagtggtttcaaagactttggtaacatggaattgactttttcagttcttccagaattttaatggctctcaatgaa

SEQ ID NO: 714477 - DNA, 2935 bp, Homo sapiens
atcacttgggcccaagaaatcaaggctgtagtgaggtatgatcatgccattgcactccagcctgggtgactgagcaagactctgtctcaaaaaaaaaaaaaaaaaaaaagaaagaaagaaagaaaaataaaatactccctcccatttgcaataaccaaaaatgcctttgggaagagggatgagattaggggtggggagcaaaattgactttggttaaaaatcactggtctattattatctcagcatataaaaatctccactcctatcaaggacaaacagmtgttttgatttttgttgttgttgttgttgttgttgttgtttgtttttttgtttttcgttttttttgacagagtctctctctcttgcccaggctggagtacagtggtgcgatctcggctcactgcaagctctgtctcccgggttcacgccattctcctgcctcagcctcccgagtagctgggactacaggtgcccaccaccacgcctggctaattttttgtatttttattagagatggggtttcactgtgttagccaggatggtctcaatctcctgacctcgtgatccgcccgcctcggcctcccaaagtgctgggattacaggcgtgagccacctcgccctgccttttttttcttctttttttttttttaatggaactttgaaactccaagcccagtctaagttcctggaaatggtttcaaattatgcttagcttctacaataataatttactggccaccagggggtctcttgcttgtgatctacaagacaaaatgtctggcacagtcagtcatcctgggtcctattactaccttgcaattaactctttgtgtctcagtttcatcatttctcaaatgggagcaatagtaccttccctaccttctgtacgggtgattataaggaaacaacgaaaggagatggaaaagtgccttgaaagttaaaagaaaatgtaaccagacataactaagtcattacggtcttttcagaaactggaaacacattaacaaacaaccctgtgtgtttgatgcccttttctacttctaactacatagaatttgtgttgctggtataggagaggcaccatttgccatcaaaaaaaaaaaaaaaaaaaaaaaagccagtcatttacttctgctaatgcagagaatatttgtgatctggttctatgaaaaatgctgcaggcgatcactgacttcagactgtcaatttatagattacccctttttagcaaaccatagcccatacccttcactgatgtccccagcactgccgcagtgcctgtggttgtcaaaaaaccacaaacaaaacccctgaatctttttagagattctatggatttattagtgaagggagggaaaaagttgtaaagatcataaacagtttaggagagagcagttcaaattactttgtaaagtaaagatgttataatgactgggttagcttgagaattttggaaccccaaagagattccaagagagagaagaggagaaagtaaagttagaagattgctaaaatcaacttcatttatttgaaaattttccagagtacaagaaagtcaaaatgttcatcatcttcctcctccgcttcctgcaataagcagctcccaccactatcccaaatcattaagatgtccttccatggtatgggtgtgccacaattggtgtaaacagtcccttattgatgtggattgtttttagttatttttttttttcaaaaaaaaatatgtaaaactggagtaaacagagtcaaagaaaagcattatttgtatttatattttcttttcttttcttttttttttgaggcagagcctcgttctgtctcccaggctggagtgcagtggcgcgatctctgctcactgcaagctccacctcccgtgttcacgccattctcctgcctcagcctcccgagtagctgggactacaggtgcccaccaccatgcccagctgattttttgtatttttagtagagatggggtttcactgcgttagccaggatggtctcgatctcctgacctcgtgatccgcctgcctcagcctcccaaagtgctgggattacaggcgtgagccaccgcacccggcccagtatttatattttcttaggatacattcttggttgtgaagcttctggatcgaggggcatacacattttttaagttttcacttttgataataattttttgagcaatttcttctctttaattatcacagtaccatcttgctgttctagatataactgtaccacttagcacttgagcacgtgcctaatgatattcgatatgcattctaattttgaaattccccaaaggaatgtttacatgatcttcaaatctgaaaaatctctaactataaggatcacaactattactgttttctgccatcttttacaggattaccatttgtgctttatacttctttattaaatatgccatgtttatttcaaataatcaaaagagaaactgttaaagtgttttttctgcaactctatcccctgaaaatgagcttcttcagttgctcggctcagttgctcattctttcatcttattcaatcaccccttctagcttccatccctcaatataattatttatgtctgcaattttattaggcaattctgttaagaggccagactgggttttacatatttttaaataaattaaaaagaaaagttttactgtacctactatacaacagcaaagaaagacaattctaactagccatgtgtctcacagaaaccactttcaaaagtgtattgctatgcataaacttgtgacctttttcttgcctgctggggataacctttagctcaatctctatttatttctctccgtaaataccaaacaaccaagagcgttaattttatcatccaatgtgcatctcattatattttattatttgcaatagtgtctacaaatagctttatagaagacataaatatgca

SEQ ID NO: 714478 - DNA, 670 bp, Homo sapiens
caaatctatgtacagcatttttaaaatctgtgttcaactttataaaactgattttcattccaatgcagtgtctctacttatgttccacaatcaattcacctgatacttatatctgcctaagcagaaaaggcactaacaaatcagctaaaatattttaaaatgcaatttgcgaaaatactataagatacgtagcctatgtacaaaaatacatacttaagactgtatagctaaaatgaaatagagataatattttctggaacctgctatctgtgggctgcaaaatccttaatatcagaagtggcttgatattaatatatactcctattatgtacccaaaaaaactaaaaacaaaacatgtaagasttaaacatagaaagaactaaaattaggaaaatgagaggggaaaaaggaagtggcttgaatatcaatgacacatttatttccctatctgcctctctaactccaaacataaataaagaaaagtaatttttaaaagagcccagtattctcagctcgagttaatatttaactttaaactttattcactgaacccctgcataatgtgatatttgagaacccggtcagcaagccatatcatggcctgaaaatgtctggcctctccacgcaacattcagaatctcaaactatttagtaaatacaaaatactgac

SEQ ID NO: 714479 - DNA, 990 bp, Homo sapiens
taattttttttttttttttttttttttagtagagacagtgtttcaccatattggccaggctggtcttgaactcctgacgttgtgatccacccacctcagcctcccaaaatgctgggattacaggcatgagccaccgcgcccagccaatatgccaattttattcgttatcttcaagtctgaacattctctggaaagatttgaagccaatggaatagaaatgttggaaagagttatgatacatggctatctttttatgctayttaaaattacttaacccatttcctttaaaacaagagcctatgctgtggcaaattggtagttacttttttattattgtgaacgctgtttataggtgttgcaatattagctctgcaatgacttggagaaaagttgatccataaaaacaaaagcataagaaagaaataaacagtaggcacttttagtctatctcaccatatgattctttattataaaatattaattcctagtgaatgtaacttttttacttcacagaatcaaacaaatatttaaccacatttttaggtaagtttttctatatgatgtgggtaaatatacatctcaaattttgcaaagttatttttaaaggcgattaacattaaaatatcttaaatatacatcaaataagtaaagaatgaaagtttggtattgctcttagttgatgtctatttacttctcagtcattgagccaatgttttaaagttacttactacattccatatcaggcattaacaaatatcacaaagtttacattatttgtatcaccatgttattagtctcatttcacagattatgagattggaatttaagtaatttagcaaagttgtcatagagaaacaggatttgatcacaacacttatgttgccaaattcagtagacattaaccctaaccaatgcaactgttgcaatccttactatactgattcaaaataaccatttagtgttgaataatgcaagtaaggggcagttttg

SEQ ID NO: 714480 - DNA, 1127 bp, Homo sapiens
tttagtcataacaatatttctacaataatatataatatagatgattttgaaatttacactggccttagattctatctttttaaataaggtttgacctgtactctgagaatttaatgatttaaaattaaacatgatatttattattagtgattctcccrccttagcctcccaagtagctgagattacaggtgcttgccatgatgcctggctaattttttgtatttttagtagagacaggctggtcttgaactcctgaattcatgatctgtctgccttggcctcccaaagtgctgggattacaggtgtgagccaccacacccggccttattattgtcttaatggccattataaaaaacatactatttgcaaattatgttttgacttttgcttagtgtatagaaagctctagagaacattgccacgcatcctatgtcatcacactaacaagacaattctagatattatacaaaatcatagtttttcttgaacttaccagggagctaaagtcacagatatgcaattagcctaaaatttcagaaaggatagatacgacataagtagaggcccagtttacttaaccggaagcaggatgaaggtaggattgtggtagttctatttttttttttattggggaacctccataccgttttccataatggttgtactaattttcattcccacacacaatttataagagctccattttccctacctcctcaccaacacttgttatctttcatcttttcaaaaaatgctattctaacagatgtgaggcaacatctcattgtggttttagtttgcatttccttcatgattagtgatcttgagcactttttaaattgtacctgttttccatttatatatcttttgagaactgtcagtttagctcctctgcccattttttaattgggttgtttattttcttgctattgttatggttgcttttattttgaatattaataccttatcagatttgtggagtacaaatattttctatattctgtgggttgtctttttctttgttgtttcctttgctgcactgaagctctttagtttgatggcatctcatttgtctatttttgctattgttgcctatgtatttggagttatatccaaaaacttgacca

SEQ ID NO: 714481 - DNA, 1127 bp, Homo sapiens
tttagtcataacaatatttctacaataatatataatatagatgattttgaaatttacactggccttagattctatctttttaaataaggtttgacctgtactctgagaatttaatgatttaaaattaaacatgatatttattattagtgattctcccgccttagcctcccaagtagctgagattacaggtgcttgccatgatgcctggctaattttttgtatttttagtagagacaggctggtcttgaactcctgaattcatgatctgtctgccttggcctcccaaagtgctgggattacaggtgtgagccaccacacccggccttattattgtcttaatggccattataaaaaacatactatttgcaaattatgttttgacttttgcttagtgtatagaaagctctagagaacattgccacgcatcctatgtcatcacactaacaagacaattctagatattatacaaaatcatagtttttcttgaacttaccagggagctaaagtcacagatatgcaattagcctaaaatttcagaaaggatagatacgacataagtagaggcccagtttacttaaccggaagcaggatgaaggtaggattgtggtagttctatttttttttttattggggaacctccataccgttttccataatggttgtactaattttcattcccacacacaatttataagagctccattttccctacctcctcaccaacacttgttatctttcatcttttcaaaaaatgctattctaacagatgtgaggcaacatctcattgtggttttagtttgcatttccttcatgattagtgatcttgagcactttttaaattgtacctgttttccatttatatatcttttgagaactgtcagtttagctcctctgcccattttttaattgggttgtttattttcttgctattgttatggttgcttttattttgaatattaataccttatcagatttgtggagtacamatattttctatattctgtgggttgtctttttctttgttgtttcctttgctgcactgaagctctttagtttgatggcatctcatttgtctatttttgctattgttgcctatgtatttggagttatatccaaaaacttgacca

SEQ ID NO: 714482 - DNA, 619 bp, Homo sapiens
agggttctttctctggctgtcacacttaactgttctctgcagcatttgtaccagagttaggtcctagttgctcctctctgcctagcttgtgcccagtacagtcctgtgatagaaaaattattattccacagtattcttcagagaggctttgagaacctggaagtaataaaccaacagagctgataggtgttgacctgcgaatagcatttccctacctctgcacctgttcaccgakgcctccaggaaccctttctttggtctaaaggagagctaatggtacatttcttatggaagcatcctgagccttgagacacatgtccacgggtctagcccaggatggggtacatagaagagctcgggaaaagtttattgactgaagggaagaatgaaggtatgaatgcaagccgaatgtctctatcattaattgctgagctcactgcagcgaggaatttaagcattttattttcaaaatagattctctgcttggatgttcgagctgaggctagacaagattaaagaccattcagccctagaaagtctggtttaattggtctgggaaggaacctggcaatggcatttttaagacgctcccctggtgattctgatacgcggtcagggc

SEQ ID NO: 714483 - DNA, 634 bp, Homo sapiens
tggtgtgttatagttctttgttcccccatagatttcctggacagctaaatagggcttgagtcaatmattttttttaagaagaaattaagcataaaaccaaaccaaaccaaaacaagaaaacgacaatggcaataggcatagtgttgtgcagcagatctctagaactaattcattttggttaactgaaattttgtacctgctgaatagtaattcccagttaccccctctttttagtccctagtaactaccattctactctctgcatttaagagttttactgttttacattcatcatacaaaagaatcatacagtattggtgtaaggttcttgtatcagttcgaacaccaagagtgcgccagcagacaacacaaggcagtgtggagcaacatgctgttttttttttttttttttgagacggagtctcgctctgccgcccaggctggagtgcagtagcgccatctccactcactgcaagctccgcctcccgggttcgcgccattctcctgcctcagcttccccagtagctgggactacaggctcccgccatcatgcccggctaattttttgtatttttagtagagacagggtttccccctgttagccaggatggtctagatctcctgacctcgagat

SEQ ID NO: 714484 - DNA, 634 bp, Homo sapiens
tggtgtgttatagttctttgttcccccatagatttcctggacagctaaatagggcttgagtcaatcattttttttaagaagaaattaagcataaaaccaaaccaaaccaaaacaagaaaacgacaatggcaataggcatagtgttgtgcagcagatctctagaactaattcattttggttaactgaaattttgtacctgctgaatagtaattcccagttaccccctctttttagtccctagtaactaccattctactctctgcatttaagagttttactgttttacattcatcatayaaaagaatcatacagtattggtgtaaggttcttgtatcagttcgaacaccaagagtgcgccagcagacaacacaaggcagtgtggagcaacatgctgttttttttttttttttttgagacggagtctcgctctgccgcccaggctggagtgcagtagcgccatctccactcactgcaagctccgcctcccgggttcgcgccattctcctgcctcagcttccccagtagctgggactacaggctcccgccatcatgcccggctaattttttgtatttttagtagagacagggtttccccctgttagccaggatggtctagatctcctgacctcgagat

SEQ ID NO: 714485 - DNA, 543 bp, Homo sapiens
gagggtcacctccagggcaggggctggggcaggacatttggggctgcrtctgtccaccctggaagtctttccagagggaccacctgagggggatgctaccagcaagtgggggccctggcacctcctctccagtgccattcacaggtatccagagatctggagtttactgtggggcctcggaggacagggtgctaggatctgcttctataaaagaagactctgggtccctcctccggaccccggccgcgtaccttgtagtccatctgctcggagcagttgaagacgtagaccatggtgcccagggctctgcccaggtccttggtcgtctcagtcttgccggtcccagcggggccggcaggggctccacccatgatgagatggagggactgggtcagggtgatatagcacctgcaagtgaccacaggtaagcgtgtgtgccagcgaccccatggcctccctgcttttatttttttgagacagagtctcactctgtcacccaggctggagtgcagtggtacaatcttggctcactgcaacctctgc

SEQ ID NO: 714486 - DNA, 543 bp, Homo sapiens
gagggtcacctccagggcaggggctggggcaggacatttggggctgcgtctgtccaccctggaagtctttccagagggaccacctgagggggatgctaccagcaagtgggggccctggcacctcctctccagtgccattcacaggtatccagagatctggagtttactgtggggcctcggaggacagggtgctaggatctgcttctataaaagaagactctgggtccctcctccggaccccggccgcgtaccttgtagtccatctgctcggagcagttgaagacgtagaccatggtgcccagggctctgcccaggtccttggtcgtctcagtcttgccggtcccagcggggccggcrggggctccacccatgatgagatggagggactgggtcagggtgatatagcacctgcaagtgaccacaggtaagcgtgtgtgccagcgaccccatggcctccctgcttttatttttttgagacagagtctcactctgtcacccaggctggagtgcagtggtacaatcttggctcactgcaacctctgc

SEQ ID NO: 714487 - DNA, 543 bp, Homo sapiens
gagggtcacctccagggcaggggctggggcaggacatttggggctgcgtctgtccaccctggaagtctttccagagggaccacctgagggggatgctaccagcaagtgggggccctggcacctcctctccagtgccattcacaggtatccagagatctggagtttactgtggggcctcggaggacagggtgctaggatctgcttctataaaagaagactctgggtccctcctccggaccccggccgcgtaccttgtagtccatctgctcggagcagttgaagacgtagaccatggtgcccagggctctgcccaggtccttggtcgtctcagtcttgccggtcccagcggggccggcaggggctccacccatgatgagatggagggactgggtcagggtgatatagcacctgcaagtgaccacaggtaagcgtgtgtgccagygaccccatggcctccctgcttttatttttttgagacagagtctcactctgtcacccaggctggagtgcagtggtacaatcttggctcactgcaacctctgc

SEQ ID NO: 714488 - DNA, 993 bp, Homo sapiens
aggtggaggatcacttaagcccaggagtttgagactgggcaacagagcgagaccctgtctctcaaaaacattaagaagtgtcagaataacaccttgaaaaacatatattttacaagataaaatgctctagtttacagaagcattgaaggtggacagaatctttacctgattagttcctcaattaaaacagcagtattaatagaattaaaatgtaaaatctcacaaagtttgctttaatgttatgggtcgacaatggcccagatctttaaagttctttttgtttgtttgttttgaaacagactcttgctctggcacccagtctggagtgcagtggygtgatctcagttcactgcaacctccgcctcctggattcaagcaactctcctgcctcagcctccctagtagctgggattacaggcgcccaccaccacgcccagcatttttgtattttagtagagatggggtttcaccatgttggccaggctggtcttgaactccggacctcaagtgatccacccactttggcctcaaagtgctaggattacaggtgtaagccactgcacctgctttaagatctttaaagttctgtccatgttagaactcagaattattttaaacacattcagattgaacacagtctcctttctcatcaaaatagcatggaagccaatgaatggctattgccggcttatggtgactttaactttactctagaattaagatcctgaccgctatgctcctttttgtaattgagtgagagaactttccaagagttgatttgttaatttttcctactattaaaaggctgaaagaagaggccataaagttcacaatataaacatgccaacaattcttgtaagttatcctgataagcacttttttatcctgacctttggaaaccagcctgagaacaaatagtacacaaagcagcaagatggggaagaactgtggataatgtccaagtcacccttcctcctgttactgaaggtaaca

SEQ ID NO: 714489 - DNA, 632 bp, Homo sapiens
acttagaaaatctgagtaaaagagaaatagagacttaaggaaaagaactgtattaaatactcaaatcaattacttatatggaagagaaaagcaaagaaagatgtgcctagatctgtgcagattatctctatctatcatctatctatctatctatctatctatctatctatctatctatctgtatctatcatttctctagtttatataaactaaaaatttctgaartaacagttatataagagataaggagaaaaagatatacttttcttttcttgtgttcccagattgcctattcttgaaatttaataaaatcattagggatacacaattaataaaactataaaatactctggtttgggtaaatatttattgatttgggtaaattatatattgtatattatataacattgttacaaactacaaattccctcataatttgcactcattaaactgacttaaaatagctgtctgcatggttgattcaattacatgattcaactacaagagacaaattcactctttcatacttgtatatgctttacattctaaaacactgcatacaacttaaagagaaaattttgacttaacttttcattttttataaatagaaaagtttttttgcctcattttca

SEQ ID NO: 714490 - DNA, 632 bp, Homo sapiens
acttagaaaatctgagtaaaagagaaatagagacttaaggaaaagaactgtattaaatactcaaatcaattacttatatggaagagaaaagcaaagaaagatgtgcctagatctgtgcagattatctctatctatcatctatctatctatctatctatctatctatctatctatctatctgtatctatcatttctctagtttatataaactaaaaatttctgaagtaacagttatataagagataaggagaaaaagatatacttttcttttcttgtgttcccagattgcctattcttgaaatttaataaaatcattagggatacacaattaataaaactataaaatactctggtttgggtaaatatttattgatttgggtaaattatatattgtatattatataacattgttacaaactacaaattccctcataatttgcactcattaaactgacttaaaatagctgtctgcatggttgattcaattacatgattcaactacaagagacaaattcactctttcatacttgtatatgctttacattctaaaacactgcatacaacttaaagagaaaattttgacttaacttttcatttwttataaatagaaaagtttttttgcctcattttca

SEQ ID NO: 714491 - DNA, 1215 bp, Homo sapiens
cattaatgacagcaagatgcatatatatattaaattaataaatgccaataagctgtagattccttcatcatgttttcatctgatatcatcaatttttttgtttcaaatacatataagaggttttttagctgcagaaaaatttctattttctctgattcagcaaaaccatatacagtggtttagaaagaagtacccaagaggcagctaaagaaagcagtaccttagcaaaacaaggtttatgtgcttatctcagaaacaaggcacagatctcacttatagtctaaaagacacacttaaaagcattagagggtaaaacctctccactggagcaatgtcctactactaaatgactttcatcatttctcctcggagatgggaaacttttcaaagtttaaaatgctagtaatactaacaaagcaacgaaaaaggcagcaataaatatgctcaagcgtaaatacatctgagagagaagaaaatgttccaggaagaggcttaggaatgctccctgacagaatctctttcttctaatctatgttcactcttgcatgctaaatactgtgttcaataagggacacaggtttggactcactaatagcctttctttgttattctaaatttattctataactccgtagcagagaagaaccaattgtgtggtctggccttaggcagcattcatcccatcctagtcatgggggagtcctgaggagggrggtgttgttttttaatgttgttgctgtagctgtaatttccatgtaggtataaaacttaatttagaacatttcaaggcatcacatcttaaacacttcacttcattgaggcatctacaacattcataggaagattgctttcagtttaactcattataaaatattagaagcgatctacaattaccactaatttttaacacgaaaacttattatgttgagcatttaacataaagaactgtaatccatcagttttggtattcttgacatccctgattatttaaaataaaacaaatttttatttttttagacactgggaaaaaaatccctctgatggctctctttacaccttaaaactacatgtactttaataatataaggcaacttcatttaagtagtctatcatatttcagtattttaaacattgttaaagaatataagtcaggttcactagaatgcagtggattgtatgattgagacaaacaattctgattttaaacaaaattca

SEQ ID NO: 714492 - DNA, 615 bp, Homo sapiens
ctattcattgtgcacagtagggaagctggggttagaaaaacatcagtaaattttactcttcttagcctaacatgaaaagtaggtaatggaaatggcagttgttggttgctttgaaatactagtatgctgaatgagctcaatagccattttttaacccaaaataagcttagttgattctttaaaaagactttagagataaactttagagataaacatagatgttaacatgttaagcaactgagctgtaaagccaaaacctaaggtagcagaagtagaaataggaagaattagcgaaacatatttaattactcattacattcaaccatagaatttaaaagaattagtatcatttaatacttttgttgaaatagaattataataatgattcatttactttgcaaagaataggaacacttttacactgttggtgggactgtaaactagttcaaccattgtggaagtcagtgtggcgattcctcagggatctagaactrgaaataccatttgacccagccatcccattactgggtatatacccaaaggactataaatcttgctgctataaagacacaagcacacgtatgtttattgtggcattattcacaatagcaaaga

SEQ ID NO: 714493 - DNA, 615 bp, Homo sapiens
ctattcattgtgcacagtagggaagctggggttagaaaaacatcagtaaattttactcttcttagcctaacatgaaaagtaggtaatggaaatggcagttgttggttgctttgaaatactagtatgctgaatgagctcaatagccattttttaacccaaaataagcttagttgattctttaaaaagactttagagataaactttagagataaacatagatgttaacatgttaagcaactgagctgtaaagccaaaacctaaggtagcagaagtagaaataggaagaattagcgaaacatatttaattactcattacattcaaccatagaatttaaaagaattagtatcatttaatacttttgttgaaatagaattataataatgattcatttactttgcaaagaataggaacacttttacactgttggtgggactgtaaactagttcaaccattgtggaagtcagtgtggcgattcctcagggatctagaactagwaataccatttgacccagccatcccattactgggtatatacccaaaggactataaatcttgctgctataaagacacaagcacacgtatgtttattgtggcattattcacaatagcaaaga

SEQ ID NO: 714494 - DNA, 615 bp, Homo sapiens
ctattcattgtgcacagtagggaagctggggttagaaaaacatcagtaaattttactcttcttagcctaacatgaaaagtaggtaatggaaatggcagttgttggttgctttgaaatactagtatgctgaatgagctcaatagccattttttaacccaaaataagcttagttgattctttaaaaagactttagagataaactttagagataaacatagatgttaacatgttaagcaactgagctgtaaagccaaaacctaaggtagcagaagtagaaataggaagaattagcgaaacatatttaattactcattacattcaaccatagaatttaaaagaattagtatcatttaatacttttgttgaaatagaattataataatgattcatttactttgcaaagaataggaacacttttacactgttggtgggactgtaaactagttcaaccattgtggaagtcagtgtggcgattcctcagggatctagaactagaaataccatttgacccagccatcccattactgggtatatacccaaaggactataaatcwtgctgctataaagacacaagcacacgtatgtttattgtggcattattcacaatagcaaaga

SEQ ID NO: 714495 - DNA, 615 bp, Homo sapiens
ctattcattgtgcacagtagggaagctggggttagaaaaacatcagtaaattttactcttcttagcctaacatgaaaagtaggtaatggaaatggcagttgttggttgctttgaaatactagtatgctgaatgagctcaatagccattttttaacccaaaataagcttagttgattctttaaaaagactttagagataaactttagagataaacatagatgttaacatgttaagcaactgagctgtaaagccaaaacctaaggtagcagaagtagaaataggaagaattagcgaaacatatttaattactcattacattcaaccatagaatttaaaagaattagtatcatttaatacttttgttgaaatagaattataataatgattcatttactttgcaaagaataggaacacttttacactgttggtgggactgtaaactagttcaaccattgtggaagtcagtgtggcgattcctcagggatctagaactagaaataccatttgacccagccatcccattactgggtatatacccaaaggactataaatcttgctgctataaagacacawgcacacgtatgtttattgtggcattattcacaatagcaaaga

SEQ ID NO: 714496 - DNA, 615 bp, Homo sapiens
ctattcattgtgcacagtagggaagctggggttagaaaaacatcagtaaattttactcttcttagcctaacatgaaaagtaggtaatggaaatggcagttgttggttgctttgaaatactagtatgctgaatgagctcaatagccattttttaacccaaaataagcttagttgattctttaaaaagactttagagataaactttagagataaacatagatgttaacatgttaagcaactgagctgtaaagccaaaacctaaggtagcagaagtagaaataggaagaattagcgaaacatatttaattactcattacattcaaccatagaatttaaaagaattagtatcatttaatacttttgttgaaatagaattataataatgattcatttactttgcaaagaataggaacacttttacactgttggtgggactgtaaactagttcaaccattgtggaagtcagtgtggcgattcctcagggatctagaactagaaataccatttgacccagccatcccattactgggtatatacccaaaggactataaatcttgctgctataaagacacaagcacacgtatgtttattgyggcattattcacaatagcaaaga

SEQ ID NO: 714497 - DNA, 615 bp, Homo sapiens
ctattcattgtgcacagtagggaagctggggttagaaaaacatcagtaaattttactcttcttagcctaacatgaaaagtaggtaatggaaatggcagttgttggttgctttgaaatactagtatgctgaatgagctcaatagccattttttaacccaaaataagcttagttgattctttaaaaagactttagagataaactttagagataaacatagatgttaacatgttaagcaactgagctgtaaagccaaaacctaaggtagcagaagtagaaataggaagaattagcgaaacatatttaattactcattacattcaaccatagaatttaaaagaattagtatcatttaatacttttgttgaaatagaattataataatgattcatttactttgcaaagaataggaacacttttacactgttggtgggactgtaaactagttcaaccattgtggaagtcagtgtggcgattcctcagggatctagaactagaaataccatttgacccagccatcccattactgggtatatacccaaaggactataaatcttgctgctataaagacacaagcacacgtatgtttattgtggcattaytcacaatagcaaaga

SEQ ID NO: 714498 - DNA, 1196 bp, Homo sapiens
gggtggattccttgtgaatggcttggtgccatcctcgtggtaatgaatgagttctcttctggttctcacaagacttccccaaagaactggatgttaaaaagaatctggcacctctcacctctctctctctctcacttcctctctagccatgtgatctctgcacactggctcccctttaccttctgccgtgagtggaagcagcctgaggccctcatcagaagcagatgttggtgccatgcttcttgtacagcctgcagaactgcgagccaaagaaacctgtttttttcatagattacccagcctcaggtattcttttatagaaacagaaatggactaaggcaaacattctgagttttcagatagcagtttgcctaccaagatagatttttctcagagcagagtgtgaactctgagagcttttgtcaacttttcacacaaactgcagttgcaacatccattaaaatcatgggtctttccattgagagtgacacattaaagtgacatcatgcattttcagaarggatcaggaaattatacatttcttcttatgcaaattaccagagaagctgagaaaaaaaacacaaattgaagataaattttaagggctttctgaatcttagtcaataattgttagtcttcttttactttgcaatgtaaacaaggtttacaaggtttttgctttcatgaagcttatgtgttcatgaggagacatacaataaacaaattgtcaatttatgtatgtatgaatatagatgcaaatatgatacatatattgtatatatacacatgcacatacagatatacacatatctaccaatgtatatcatatgtatgcatatctattgtgtgcatatgcatggggattgtataccagacagcagcaaatgatttgcaaaaaaaaattaaatgaacaacgggaaataacacatgctttttttttttttttttttgcagaaagcatatctcatgtactacacggagggagcagtgagaaactatgggaaaggcaaaggccatcttgctccttcaatgggccttgtctgctcatctctgtggcaggatgcttattgatagtcaacagaaagttactctttatcttttcccttttattctgccttcagagagcagaaactgtgtcactctttcgtgcaagtgaagattcgctattcccagcgttttccaaacctacatcccat

SEQ ID NO: 714499 - DNA, 2081 bp, Homo sapiens
ttcatagcagtctcagatggctatttatatttctgtgggatcagtggtaacatactctatgttgtttctaattgtatttatttggatcttgtttcttttcttccttattagtctcgctagtggcctatcttattaatttctttaaaaaaccarctcctggatttattgatctttcacatgattttcctgttttgatcttcttcagcatagctctgattggggttatttcttgtcttgtgctagctttggggttagtttgcttttgcttctctatttcttttagttgtgatattaggctattaatttgaaaattttctaactttttgatatgggcacataaacaatacttctaagcacattttaataattgtatattaaattaaaccaaaaaaattaagagagatgatagacagatacagattctgcaatatatccactgcggatatcccagtggatgaaaaaagttttgcctctcattcttgagtatgaagacagataatatccaagtaaatatataagttaataatacatacataattcaaaatctctgttactggacatataagctgctgctcattctttgttattctttataagactgatgtgaaccttcttaggcttatttgtttgtgagcatttctgattccagcaaccatccctcccacacccccatatatcctcaggacaaatggataaaaaggcaagaaatttttaaaagcttataacatatataaccaaatatcctcctgagacatttgtatcagttgtctgtgccactttaccttttctcctttgtatataagactgttcatttatataaaacatccccattttgtcttaccctgaaaaatccccttggcttttttgctatattgttagtcatttgaagagctatctgattcatccacctgcccaacatccttccatccatccttccatacatccaacataaagcacactgcaaggtactgtgatatatagaaactgttgatgggctaacttgttttaatagttcaggctggtcttgaactcctgacttcaagtgatctgcctgacttggcctcccaaaatggtgggattacaggtgtaagccaccacaactggtgcccgtcattcttaattactttaaatacataaataaatagtaattggtaagtttactaaaatgttcaaacttacttgtgtgcacaataataatttaagattacatttataacttaccaaaataattgagtaagctgacaaatttgagtcaaaacaataatccttcttccaaccaccttaaaatttgtgaaccccaaagctttgtctgcagatctctctcttctcactcttttcctcataatttttgtgaagccacagggcttcaactataagctacatgatggattctaaatgtacttatataggctataatcctacttatggggaaatactaggtttttctggaaaaaggtgttaaagtcaagaagaagacaagaatgccttctatgcctactgttgtttaatattgtgttgaaggtactagtcaatgtactcaagcaggagaaagccagtggaggcataacaattggaaaggaagaagtagaactatccctatttgatgataatatagttgtatatctggagaagctgtaataattaatgaaaaatatggtaaggtagcatatataaaactaatatattgatatccattgtgtttacatacacaaatgcaaactaattagaagagataatgaaagaaaagataatatttacaatagccactgaaaatataaaatacatagcaaaataaattgaacaagaaatgtaaaaactatatgacaaaaacttaaaatgctcctgcaattcacaaaagcagatctgaacaaatagacataccatgcttttggataagaaccttcaacagcataatctaaggattaagacatgaatatctttgagaggaggaaggacgttattctgcctaccatactgtttctgaagtttacatattaaaaggagcaataagagataggaaacccttgaaaaaggagaaaaattatataagaacataatataaaacattaataattaaacga

SEQ ID NO: 714500 - DNA, 626 bp, Homo sapiens
ttttgggtggacacaattcatcccatgagactctctaatgaacttccatttaagtagagagacccaatagaatccttgaatagatgttccctaaatgcatatgagaagtggatttgagcagtgcaaagggtggactatgaataatacagagatgcaccactcagtttccctttcagttgtgaggtggtcagcataaacttcctgccatcaactcctgaagggttgggctcatctatagagagccaagttttctgaggtcatacctttataggataggctgcatatggtgacagagcaagacaggggtatagaagcttggccactttgacctgacatgaacaattatgatcaacaatatttcctccagagctccccttcacattggctaagkttttgtcagggatgtgctgcagtttgacttctccctctgttcaatcctacgtcctcccttggaatcccaataaatcttggaaactcaaactccatctcaagtgtctgcttctagagaacccaactggtgacactttgcctcccatctttagatatactggctgtattaccattctaggccttactgatatttccagaaaattagttgagcaaaaatggaaataattgaagattaa

SEQ ID NO: 714501 - DNA, 1807 bp, Homo sapiens
caagaactactggagttagttgttatttcttcctataaaaagctaagttttcagaaatgttaaataagtatttaaagaggcactccttattgaaaattgtgaagcatgttccttcatcttccttcatcttatttacaaaacaaagtctctttttgtataggggaaaaatcagcaattaagacattttcttttctacatattttttagtgcatgtgtgaccrataatgggaatgaaataagacatataatttaagtggaatactatgatttaattgtagtcacgctttaaaacaacttggtgacaaaccacagtatttgatataaacaacttttaaactcagcatagtcttgtatgtatctaaaatgtgtatacttataaattcggcagtgttttcacaccttccgtgagatgagaggtttaggagaaaccttatctcacaaataaaacaatcctaaatactttccaattcaagaacaaaaactggcttgcctattaaccacattgagctacataattactgccttgctaatataaatgtaaacacatttaattcaaaattgatgacttcaaacacaaactaaatttgttattatcatataaagtggttctttctaataatataccaagcattgtgatcaaatgatattttcagagagtaatgctccagctcagctcctcactgatatgtatacttagagctcacttaaacttttggggtttgttttgccactttgaaatatggggaaagtaattcaagccttccatacaccaggggactgggagaatgtgaaatgccatgttttcatgtacccaataaccatttcctgaacacttgttcagatccagaaaccgcctagacgtttgggataaaacaatgaacaggagctagatgatccctgtaccacatgaagcatgcactcaagaagaaataggcaatgattttataaactgtgagaaatagcaaaataattaacatggccataaaatcatgtccatgggattttttttattcaagtgtttttctgtttgtgcacatgtgtgcacgttggcaggtatggggattaagtcatctttcatttaattgagaaaattttaaattataggaaagaaattttttgtgtcagaagtttgaaaattctctttgaaaatggggtggaatattatgtaaaattcattaacagttacatgaaaaatgtacagagttcctgggtcttacaattttatcaggataattgataaccaacacacaatctcttggactggtaaaaatgctgatgtctttttcttaaagaattctgtggtgtctccttccacactgactggcaggcgttcttcgctgtccttactttttctctgtaacttttgttctgtgacagctgcttgtggagggaatctgacgggcccagcaggtgttattttgtcacccaactacccacagccgtatcctcctgggaaggaatgtgactggagagtaaaagtgaacccggactttgtcatcgccttgatattcaaaaggtaccgtctcttgcagaatacctctttttagtaggatttttaattccatacctaaaaattacttcttttatgacctcatagtctctaatgttatatctaggtaagtgctagattttgtgtctaatggagactacaccaggctgcaaaatgacataaatggaaatacagtattttgctttggggcattctacttaagatgcacttgaattatttttaaatactgtttgtcttgcacacaatgtgtcccatatgagaaggcttaaacagaatgttcgttaaaaataataaaaa

SEQ ID NO: 714502 - DNA, 1807 bp, Homo sapiens
caagaactactggagttagttgttatttcttcctataaaaagctaagttttcagaaatgttaaataagtatttaaagaggcactccttattgaaaattgtgaagcatgttccttcatcttccttcatcttatttacaaaacaaagtctctttttgtataggggaaaaatcagcaattaagacattttcttttctacatattttttagtgcatgtgtgaccaataatgggaatgaaataagacatataayttaagtggaatactatgatttaattgtagtcacgctttaaaacaacttggtgacaaaccacagtatttgatataaacaacttttaaactcagcatagtcttgtatgtatctaaaatgtgtatacttataaattcggcagtgttttcacaccttccgtgagatgagaggtttaggagaaaccttatctcacaaataaaacaatcctaaatactttccaattcaagaacaaaaactggcttgcctattaaccacattgagctacataattactgccttgctaatataaatgtaaacacatttaattcaaaattgatgacttcaaacacaaactaaatttgttattatcatataaagtggttctttctaataatataccaagcattgtgatcaaatgatattttcagagagtaatgctccagctcagctcctcactgatatgtatacttagagctcacttaaacttttggggtttgttttgccactttgaaatatggggaaagtaattcaagccttccatacaccaggggactgggagaatgtgaaatgccatgttttcatgtacccaataaccatttcctgaacacttgttcagatccagaaaccgcctagacgtttgggataaaacaatgaacaggagctagatgatccctgtaccacatgaagcatgcactcaagaagaaataggcaatgattttataaactgtgagaaatagcaaaataattaacatggccataaaatcatgtccatgggattttttttattcaagtgtttttctgtttgtgcacatgtgtgcacgttggcaggtatggggattaagtcatctttcatttaattgagaaaattttaaattataggaaagaaattttttgtgtcagaagtttgaaaattctctttgaaaatggggtggaatattatgtaaaattcattaacagttacatgaaaaatgtacagagttcctgggtcttacaattttatcaggataattgataaccaacacacaatctcttggactggtaaaaatgctgatgtctttttcttaaagaattctgtggtgtctccttccacactgactggcaggcgttcttcgctgtccttactttttctctgtaacttttgttctgtgacagctgcttgtggagggaatctgacgggcccagcaggtgttattttgtcacccaactacccacagccgtatcctcctgggaaggaatgtgactggagagtaaaagtgaacccggactttgtcatcgccttgatattcaaaaggtaccgtctcttgcagaatacctctttttagtaggatttttaattccatacctaaaaattacttcttttatgacctcatagtctctaatgttatatctaggtaagtgctagattttgtgtctaatggagactacaccaggctgcaaaatgacataaatggaaatacagtattttgctttggggcattctacttaagatgcacttgaattatttttaaatactgtttgtcttgcacacaatgtgtcccatatgagaaggcttaaacagaatgttcgttaaaaataataaaaa

SEQ ID NO: 714503 - DNA, 1807 bp, Homo sapiens
caagaactactggagttagttgttatttcttcctataaaaagctaagttttcagaaatgttaaataagtatttaaagaggcactccttattgaaaattgtgaagcatgttccttcatcttccttcatcttatttacaaaacaaagtctctttttgtataggggaaaaatcagcaattaagacattttcttttctacatattttttagtgcatgtgtgaccaataatgggaatgaaataagacatataatttaagtggaatactatgatttaattgtagtcacgctttaaaacaacttggtgacaaaccacagtatttgatataaacaacttttaaactcagcatagtcttgtatgtatctaaaatgtgtatacttataaattcggcagtgttttcacaccttccgtgagatgagaggtttaggagaaaccttatctcacaaataaaacaatcytaaatactttccaattcaagaacaaaaactggcttgcctattaaccacattgagctacataattactgccttgctaatataaatgtaaacacatttaattcaaaattgatgacttcaaacacaaactaaatttgttattatcatataaagtggttctttctaataatataccaagcattgtgatcaaatgatattttcagagagtaatgctccagctcagctcctcactgatatgtatacttagagctcacttaaacttttggggtttgttttgccactttgaaatatggggaaagtaattcaagccttccatacaccaggggactgggagaatgtgaaatgccatgttttcatgtacccaataaccatttcctgaacacttgttcagatccagaaaccgcctagacgtttgggataaaacaatgaacaggagctagatgatccctgtaccacatgaagcatgcactcaagaagaaataggcaatgattttataaactgtgagaaatagcaaaataattaacatggccataaaatcatgtccatgggattttttttattcaagtgtttttctgtttgtgcacatgtgtgcacgttggcaggtatggggattaagtcatctttcatttaattgagaaaattttaaattataggaaagaaattttttgtgtcagaagtttgaaaattctctttgaaaatggggtggaatattatgtaaaattcattaacagttacatgaaaaatgtacagagttcctgggtcttacaattttatcaggataattgataaccaacacacaatctcttggactggtaaaaatgctgatgtctttttcttaaagaattctgtggtgtctccttccacactgactggcaggcgttcttcgctgtccttactttttctctgtaacttttgttctgtgacagctgcttgtggagggaatctgacgggcccagcaggtgttattttgtcacccaactacccacagccgtatcctcctgggaaggaatgtgactggagagtaaaagtgaacccggactttgtcatcgccttgatattcaaaaggtaccgtctcttgcagaatacctctttttagtaggatttttaattccatacctaaaaattacttcttttatgacctcatagtctctaatgttatatctaggtaagtgctagattttgtgtctaatggagactacaccaggctgcaaaatgacataaatggaaatacagtattttgctttggggcattctacttaagatgcacttgaattatttttaaatactgtttgtcttgcacacaatgtgtcccatatgagaaggcttaaacagaatgttcgttaaaaataataaaaa

SEQ ID NO: 714504 - DNA, 619 bp, Homo sapiens
ggtagagacagggtttcaccatgttggtcaggctggtctcaaactcctaactttgggtgatcctcccacctcagcctcccaaagtgctgggattgcaggcgtgagccaccgcacccagcctctctctctaacaatgtggtttgtatccaactagaaggtgaggttcttatttaaattagatcagtttaataaatcaatttccaatttggatagtataaagacaactgaaatgcaaatattagcaatatggggaaatacaacttcacttagcatatttaatcctatgaaagggtctaaataagattgataaaataatttacagaagtgcagaaaacaactgctcaaatgcacacaaattattctttcctttcccccaaatctctagtctactctgattatagctgggaggacactgatcaycaccatggttcaaaagaaataacaaggttcaattgtcagttcagctcaatacatggatatccacctctacacattatttaacctttcctggggtcagatttcttgtctctaaaatgggaacaatacaacacggggctcttgtgaagatgaaacggtttaaagaatttgaaagattacatgtaataatatgatgatgata

SEQ ID NO: 714505 - DNA, 867 bp, Homo sapiens
gccccaaggtgagaggtctccttatccttctcagaacagtccttactcatcccatccacattccgctctaaggttccaagattctgtgagtcacaatgctcctcaagtctggaatctttttccacctgctcttccccagtgcaaagtcaggatttccaggaaggcctagctcagctcacctctggaaaggtctccaagctgtgtgatctggggaatcgtggaggggttttgagctcaggtgtcttctgccagctggactctgagaccctggcctgctggggcgaggatgaggctctgatgtggtctggtcaactctgggttggccatctgcaccacagggctctaacaagggcctgctataggccatgagaaccactgtaagtgtccttgttcggcaaatacttactcatcccctgctgtatgcccggcaatgttccaggcacaggaattcatcggagagctagagaggacaagatgttgtcatggagctgcagcaactgaacgaaaaaccatgagagcccacggagggctttggragggatgagggatggccttttcgaagagaggcactggagttgaaacctgaatgggacaagatcaggtggaagaggcttccagacagagggggcagctctgtcaaaaggtcccaaagaaggagaaatctcaatgtgtttaagaaacaggtggggcttctgcctcacactcattctaaaaccttcaaccccacagcttctgctttaggcaatggggacacctgggaaacacagtaagtttctgctccccggaacactaagtcctcacgtgggaatcccaacaaagatggctcagaaaatgaagggacacctgaaaccagggctgggaggggtg

SEQ ID NO: 714506 - DNA, 669 bp, Homo sapiens
tggaatatttgggaagaaagctctgaaaggaaaaaatgagaacagatgtcatgttgaaataattatgtataaatccatttaatctttgaaataaaaatgaaaaatgacccttatgaaaagaaactctttaatgaacgccatctgcaagttaaagttagcttcagtcaattttctgtgaagtgctgtccttaataatgaagggttttctatcattaacagagccaaacagccatktaaattaaactagagtatacaatattactaagaatataaagttttgtaactacaagcttttatttaaggtatgcagattccataccaatattttatgtaggaagactaataacacttgtttaaatttttaacttcagccatactcttatagatttctaaaatattagttataatacatgatttttctaataaagttttatttgaaagaaaacacattggccaggcatggtggctcacgcctgtaatcccaacactttcgggggctgaagcgggtggatcacaaggtcaggagttcgagaccagcctgaccaataaggtgaaaccccatctctactaaaaatacaaaaattagctgggcgtggtggcgcgcacctgtagtcccagctacttaggatgcagaggcagaattgcttcaacccaggaggcagacggagg

SEQ ID NO: 714507 - DNA, 614 bp, Homo sapiens
atgtgtgtgtttcactgaagaggggaggaaaggaaagtagatattttgggaaaagaaaaccagtatttttaaggacctaatgttaaatctttatagcaactctataaaacaaatgtttatgttcccatttgacagacagatgaactagaacttgaagaactcggtaaggtcatgtggggattcatgtgtatgaagtgtttactatgaggaggacagtcagctacacagaagaatgtgacccttatgaggctaatcagatattatctccatgggtctcgctgggacctttaagaaaagtactttctctgttcctgtgttagtttgctaaggataatggccttcagctccatccatgttcctgcaaaggacatgatctcattctttttttatgactgcatagtattccatggtgtatattaccacattttctttatccagtctatctttgatgggcatttaggttgattccatgtctttactgttgtgaatagtgctgcagtgaacatacatatgcakgtgtctgtctttacagtaaaacgacttttattcctttggatatataccaagtaatgggattgctgggctgaatggtacttctgtcttcaagtctttga

SEQ ID NO: 714508 - DNA, 614 bp, Homo sapiens
atgtgtgtgtttcactgaagaggggaggaaaggaaagtagatattttgggaaaagaaaaccagtatttttaaggacctaatgttaaatctttatagcaactctataaaacaaatgtttatgttcccatttgacagacagatgaactagaacttgaagaactcggtaaggtcatgtggggattcatgtgtatgaagtgtttactatgaggaggacagtcagctacacagaagaatgtgacccttatgaggctaatcagatattatctccatgggtctcgctgggacctttaagaaaagtactttctctgttcctgtgttagtttgctaaggataatggccttcagctccatccatgttcctgcaaaggacatgatctcattctttttttatgactgcatagtattccatggtgtatattaccacattttctttatccagtctatctttgatgggcatttaggttgattccatgtctttactgttgtgaatagtgctgcagtgaacatacatatgcatgtgtctgtctttacagtaaaacgacttwtattcctttggatatataccaagtaatgggattgctgggctgaatggtacttctgtcttcaagtctttga

SEQ ID NO: 714509 - DNA, 642 bp, Homo sapiens
tattaattcttatataattatagctattaatctactaatagttactgtggttaaaaytgcatagacttcagagtcaaattgaggtttgaatcctggctcacactctctcaaagcctttatacctttatcttaaaataaagattataacactaaattgacttgcttactgcaagggacaaaagagagaagtgtggagagctgttagtatggaagttggtttaagtaagcacttaaaccagcccagtatcatcattttaaattataaggaatgataaaaatttgaccttaatagtgaaattcataatttcccaatcaaatgggtatccagtttatgataaattgtggatgggaaagtcaaaaataaaacaagcaaacaacaaatgtttatgttttctatctttaaaaagttgtatttgacatttgctgcgagtcctttttgtaaagattgagtgattgattgagattcacatagttgctcaaatgctttaataattccaccttgactgattcatttcataggatatttgtgtattagctcaaccctttacgaatataagaggatcataattttacactaatcaacagtaaaattagtaatttttttcaaagcaatatcctttgaccaggagcttcaaattattt

SEQ ID NO: 714510 - DNA, 642 bp, Homo sapiens
tattaattcttatataattatagctattaatctactaatagttactgtggttaaaactgcatagacttcagagtcaaattgagrtttgaatcctggctcacactctctcaaagcctttatacctttatcttaaaataaagattataacactaaattgacttgcttactgcaagggacaaaagagagaagtgtggagagctgttagtatggaagttggtttaagtaagcacttaaaccagcccagtatcatcattttaaattataaggaatgataaaaatttgaccttaatagtgaaattcataatttcccaatcaaatgggtatccagtttatgataaattgtggatgggaaagtcaaaaataaaacaagcaaacaacaaatgtttatgttttctatctttaaaaagttgtatttgacatttgctgcgagtcctttttgtaaagattgagtgattgattgagattcacatagttgctcaaatgctttaataattccaccttgactgattcatttcataggatatttgtgtattagctcaaccctttacgaatataagaggatcataattttacactaatcaacagtaaaattagtaatttttttcaaagcaatatcctttgaccaggagcttcaaattattt

SEQ ID NO: 714511 - DNA, 642 bp, Homo sapiens
tattaattcttatataattatagctattaatctactaatagttactgtggttaaaactgcatagacttcagagtcaaattgaggtttgaatcctggctcacactctctcaaagcctttatacctttatcttaaaataaagattataacactaaattgacttgcttactgcaagggacaaaagagagaagtgtggagagctgttagtatggaagttggtttaagtaagcacttaaaccagcccagtatcatcattttaaattataaggaatgataaaaatttgaccttaatagtgaaattcataatttcccaatcaaatgggtatccagtttatgataaattgtggatgggaaagtcaaaaataaaacaagcaaacaacaaatgtttatgttttctatctttaaaaagttgtatttgacatttgctgcgagtcctttttgtaaagattgagtgaktgattgagattcacatagttgctcaaatgctttaataattccaccttgactgattcatttcataggatatttgtgtattagctcaaccctttacgaatataagaggatcataattttacactaatcaacagtaaaattagtaatttttttcaaagcaatatcctttgaccaggagcttcaaattattt

SEQ ID NO: 714512 - DNA, 592 bp, Homo sapiens
taatgttctcaaatatatcagtactcaagccttcgaatccaaaattaaaagcctaaataaatgaaagttgctagcaagctagttggctaacattttaatacctaatactagatctgccactactctgccaggcccttgacaaactacttgattcctttaagttgtattgtaatgaacttaaagtcatatcatgatattctttatagctccaggttgtcaaatagtgcaattctgactttactctaattcagtacttctgactagccaataattctgaaatagaaatyatcctgggatacaatatattatagtggctaaaatctggccttcatagacagacacgtctgggtctgtacacctcctaagaatagaagactttctaagccacagttttctcatctgtataatgtggatagaaatgccaaagctaaacctcatttgttatgaggattatgtagaatcatatttataaagcatcttgcagaacagataattaataaaacataaaacagagctgggcacggcggctcacgcctgtaatcccaacactttgagagatcgaggcaggcggatcacctgaggtcaggagttt

SEQ ID NO: 714513 - DNA, 1952 bp, Homo sapiens
ggcctcctgagctcaagcgatcctcccacctcagcctcctgagtacctgagactacaggcacatcccaccaaaccccaataatttcttctgyattttttgtagagatggggtttccccaggttgtccaggctggtctcgaactcctggattcaagacatcagcccacctgagcctcccaaagtgctgggatttcaagtgtgatatttatcatagactctaaaaatattaaagtgactgctattaaaaatatgaagctattaatgttatttcccagaatcatttacatgtgggcaagtcttgttcaccttgtccagttgtttttttccaccattagtttcttgttcaaatgcattatctgataatgtcgttatatgaatgtactcttgacaaaggcgctaacaaagctgcaaatgaacacagtttatacctggtgtcggtagtcaacaggctctgtgttcttcattaaatggtgaccaaaccggaggtgttgccgggaattacagtgcctcttctttccaggaactgtcttctttcacctcaagaagcaaaggctctctttcattttgttttgctctcaagagcttctttcacagggaatataaacacacaaaaatcttgtgtatctttagacatttttttttcaattgtccagaaaattattctctgaagagtagcttccttgctttgaagatgcagctcttttgaccttaactcttttcattacccactttttggcagtgacccccctaaaacaagaaaaacgatgaagatgaacaacctgaactggactcctgccaagtccacaaaccgattttgcaagtgagatgactcatcgccagaagaattgtagacctattgaccttagcatttatttattttttatattttgagacagggtcttgctctgtcacccaggtggagtgcagagatgcaataatagctcacctcagcctcccgagctcaagtgatcctcccacctcagtctcccctgtagctgggaaccacaggtgccaccactacaccctgcttattatctttttaaatttttttttgtacagatagagtctcactatattgcctaggctgacagagtatttttttccttaattattctttattctcaaatgcagtgaacagtcacagtagcccaccatagggggttcattttcagacattacagtaactaggggaattttattaaggagccagcagctaaaccattattgttattattcttcttctttaaaccaaactacagacttattcagatttcatcagtcttcccatcagtgctgtctttctggtccatgatccaatgtaggattccacatcacagttagtttttatcactctatgtcctctcccactctgtgatggttcctcagtatctctttgtcttccaggacctgacacttttgaagagtattggacagctattttgaagaatgtcctgcaattctgcctaatgtgtttcaatgaataaatgttacacgtgcattgttggccaagagtaccacagaaatgataagcccttcttagtgtatcaaatcaggtagtgtgggatgtcaatatgtcttattactggtgattttaatcttgatcacttggctgagatggcatcttccaggtgtttccatttttaaaattactatttttcctttagcaatgaatgggtatcttgagggtgataattttgcactaggcacatataatctttctcctcaaagttttacccatgaattttggctttcattggcacatcttgcctgcaacaattattactgtggtatcctattggtgaattcatatttccatcttctttctacatttattcattgggagagctgttatttcccattcattcattcattcattcatccatttctttatgtcatagactcatagaggcttattgtattctcttggtaaaaataatctattaattttttta

SEQ ID NO: 714514 - DNA, 1952 bp, Homo sapiens
ggcctcctgagctcaagcgatcctcccacctcagcctcctgagtacctgagactacaggcacatcccaccaaaccccaataatttcttctgcattttttgtagagatggggtttccccakgttgtccaggctggtctcgaactcctggattcaagacatcagcccacctgagcctcccaaagtgctgggatttcaagtgtgatatttatcatagactctaaaaatattaaagtgactgctattaaaaatatgaagctattaatgttatttcccagaatcatttacatgtgggcaagtcttgttcaccttgtccagttgtttttttccaccattagtttcttgttcaaatgcattatctgataatgtcgttatatgaatgtactcttgacaaaggcgctaacaaagctgcaaatgaacacagtttatacctggtgtcggtagtcaacaggctctgtgttcttcattaaatggtgaccaaaccggaggtgttgccgggaattacagtgcctcttctttccaggaactgtcttctttcacctcaagaagcaaaggctctctttcattttgttttgctctcaagagcttctttcacagggaatataaacacacaaaaatcttgtgtatctttagacatttttttttcaattgtccagaaaattattctctgaagagtagcttccttgctttgaagatgcagctcttttgaccttaactcttttcattacccactttttggcagtgacccccctaaaacaagaaaaacgatgaagatgaacaacctgaactggactcctgccaagtccacaaaccgattttgcaagtgagatgactcatcgccagaagaattgtagacctattgaccttagcatttatttattttttatattttgagacagggtcttgctctgtcacccaggtggagtgcagagatgcaataatagctcacctcagcctcccgagctcaagtgatcctcccacctcagtctcccctgtagctgggaaccacaggtgccaccactacaccctgcttattatctttttaaatttttttttgtacagatagagtctcactatattgcctaggctgacagagtatttttttccttaattattctttattctcaaatgcagtgaacagtcacagtagcccaccatagggggttcattttcagacattacagtaactaggggaattttattaaggagccagcagctaaaccattattgttattattcttcttctttaaaccaaactacagacttattcagatttcatcagtcttcccatcagtgctgtctttctggtccatgatccaatgtaggattccacatcacagttagtttttatcactctatgtcctctcccactctgtgatggttcctcagtatctctttgtcttccaggacctgacacttttgaagagtattggacagctattttgaagaatgtcctgcaattctgcctaatgtgtttcaatgaataaatgttacacgtgcattgttggccaagagtaccacagaaatgataagcccttcttagtgtatcaaatcaggtagtgtgggatgtcaatatgtcttattactggtgattttaatcttgatcacttggctgagatggcatcttccaggtgtttccatttttaaaattactatttttcctttagcaatgaatgggtatcttgagggtgataattttgcactaggcacatataatctttctcctcaaagttttacccatgaattttggctttcattggcacatcttgcctgcaacaattattactgtggtatcctattggtgaattcatatttccatcttctttctacatttattcattgggagagctgttatttcccattcattcattcattcattcatccatttctttatgtcatagactcatagaggcttattgtattctcttggtaaaaataatctattaattttttta

SEQ ID NO: 714515 - DNA, 1952 bp, Homo sapiens
ggcctcctgagctcaagcgatcctcccacctcagcctcctgagtacctgagactacaggcacatcccaccaaaccccaataatttcttctgcattttttgtagagatggggtttccccaggttgyccaggctggtctcgaactcctggattcaagacatcagcccacctgagcctcccaaagtgctgggatttcaagtgtgatatttatcatagactctaaaaatattaaagtgactgctattaaaaatatgaagctattaatgttatttcccagaatcatttacatgtgggcaagtcttgttcaccttgtccagttgtttttttccaccattagtttcttgttcaaatgcattatctgataatgtcgttatatgaatgtactcttgacaaaggcgctaacaaagctgcaaatgaacacagtttatacctggtgtcggtagtcaacaggctctgtgttcttcattaaatggtgaccaaaccggaggtgttgccgggaattacagtgcctcttctttccaggaactgtcttctttcacctcaagaagcaaaggctctctttcattttgttttgctctcaagagcttctttcacagggaatataaacacacaaaaatcttgtgtatctttagacatttttttttcaattgtccagaaaattattctctgaagagtagcttccttgctttgaagatgcagctcttttgaccttaactcttttcattacccactttttggcagtgacccccctaaaacaagaaaaacgatgaagatgaacaacctgaactggactcctgccaagtccacaaaccgattttgcaagtgagatgactcatcgccagaagaattgtagacctattgaccttagcatttatttattttttatattttgagacagggtcttgctctgtcacccaggtggagtgcagagatgcaataatagctcacctcagcctcccgagctcaagtgatcctcccacctcagtctcccctgtagctgggaaccacaggtgccaccactacaccctgcttattatctttttaaatttttttttgtacagatagagtctcactatattgcctaggctgacagagtatttttttccttaattattctttattctcaaatgcagtgaacagtcacagtagcccaccatagggggttcattttcagacattacagtaactaggggaattttattaaggagccagcagctaaaccattattgttattattcttcttctttaaaccaaactacagacttattcagatttcatcagtcttcccatcagtgctgtctttctggtccatgatccaatgtaggattccacatcacagttagtttttatcactctatgtcctctcccactctgtgatggttcctcagtatctctttgtcttccaggacctgacacttttgaagagtattggacagctattttgaagaatgtcctgcaattctgcctaatgtgtttcaatgaataaatgttacacgtgcattgttggccaagagtaccacagaaatgataagcccttcttagtgtatcaaatcaggtagtgtgggatgtcaatatgtcttattactggtgattttaatcttgatcacttggctgagatggcatcttccaggtgtttccatttttaaaattactatttttcctttagcaatgaatgggtatcttgagggtgataattttgcactaggcacatataatctttctcctcaaagttttacccatgaattttggctttcattggcacatcttgcctgcaacaattattactgtggtatcctattggtgaattcatatttccatcttctttctacatttattcattgggagagctgttatttcccattcattcattcattcattcatccatttctttatgtcatagactcatagaggcttattgtattctcttggtaaaaataatctattaattttttta

SEQ ID NO: 714516 - DNA, 1952 bp, Homo sapiens
ggcctcctgagctcaagcgatcctcccacctcagcctcctgagtacctgagactacaggcacatcccaccaaaccccaataatttcttctgcattttttgtagagatggggtttccccaggttgtccaggctggtctcgaactcctggattcaagacatcagcccacctgagcctcccaaagtgctgggatttcaagtgtgatatttatcatagactctaaaaatattaaartgactgctattaaaaatatgaagctattaatgttatttcccagaatcatttacatgtgggcaagtcttgttcaccttgtccagttgtttttttccaccattagtttcttgttcaaatgcattatctgataatgtcgttatatgaatgtactcttgacaaaggcgctaacaaagctgcaaatgaacacagtttatacctggtgtcggtagtcaacaggctctgtgttcttcattaaatggtgaccaaaccggaggtgttgccgggaattacagtgcctcttctttccaggaactgtcttctttcacctcaagaagcaaaggctctctttcattttgttttgctctcaagagcttctttcacagggaatataaacacacaaaaatcttgtgtatctttagacatttttttttcaattgtccagaaaattattctctgaagagtagcttccttgctttgaagatgcagctcttttgaccttaactcttttcattacccactttttggcagtgacccccctaaaacaagaaaaacgatgaagatgaacaacctgaactggactcctgccaagtccacaaaccgattttgcaagtgagatgactcatcgccagaagaattgtagacctattgaccttagcatttatttattttttatattttgagacagggtcttgctctgtcacccaggtggagtgcagagatgcaataatagctcacctcagcctcccgagctcaagtgatcctcccacctcagtctcccctgtagctgggaaccacaggtgccaccactacaccctgcttattatctttttaaatttttttttgtacagatagagtctcactatattgcctaggctgacagagtatttttttccttaattattctttattctcaaatgcagtgaacagtcacagtagcccaccatagggggttcattttcagacattacagtaactaggggaattttattaaggagccagcagctaaaccattattgttattattcttcttctttaaaccaaactacagacttattcagatttcatcagtcttcccatcagtgctgtctttctggtccatgatccaatgtaggattccacatcacagttagtttttatcactctatgtcctctcccactctgtgatggttcctcagtatctctttgtcttccaggacctgacacttttgaagagtattggacagctattttgaagaatgtcctgcaattctgcctaatgtgtttcaatgaataaatgttacacgtgcattgttggccaagagtaccacagaaatgataagcccttcttagtgtatcaaatcaggtagtgtgggatgtcaatatgtcttattactggtgattttaatcttgatcacttggctgagatggcatcttccaggtgtttccatttttaaaattactatttttcctttagcaatgaatgggtatcttgagggtgataattttgcactaggcacatataatctttctcctcaaagttttacccatgaattttggctttcattggcacatcttgcctgcaacaattattactgtggtatcctattggtgaattcatatttccatcttctttctacatttattcattgggagagctgttatttcccattcattcattcattcattcatccatttctttatgtcatagactcatagaggcttattgtattctcttggtaaaaataatctattaattttttta

SEQ ID NO: 714517 - DNA, 1435 bp, Homo sapiens
tgaggtctccccagccttgctgaactgttagtcaattaaacctctttcctttataaattacccagtctcaggtatttcttcatagcagcatgagaatggactaacacrgtacatacaattacaggttgctagtcccttttttcccttcagtgctttaaggatttcactcttccatagtttctgatgagtagtctgaccattcctaactttgtgccattattttctcatttttttctgactctcccttctgggactccaattacaaatatcccagacttcctaactttggcaggtcaagagatcgagaccatcctggtcaacatggtgaaacccagtctctactaaatatacaaaaaattagccaggcatggtggtgggcgcctgtagtcccagctacttgtaaggctgaggcaggagaatggcttgaacccgggagggggagcctgcagtgagctgagatcgcgccactgcactccagcccgggcgacagaccgagaatccgtatcaaaaaaaaaaaatcattcaaaagattactgatgcttgtttcatttttttttaatttttcaactggtaattaatttattaaaatagttgacttatacgtctacaatggtgacttccatctcaactcctggctcaatactgatggaagtaatctgcttaacaatctcagaaggactgagcaagtcaatgagtcgcttgtggattctcatctggaaatgatcccatggcttagaaccttcaccacatggagttttttcttgtagtgattctcaaagtcttagtaggcatttgaactggtcttttcactttgagattcttttcctttgctcctctgatcaagtcagcacacaccttcgccagggattttacattgcagcttgttagagtgattcgaattcggtgaattgccatcttcggctccgtgggtgtttttccggtatccttaaaagccatcactgctgcgcggcttcctgacctacttgttccggcaagagtgaacagtggtgagtcaggagcaggtgcgggcggatcagagctccacaacacctacgaccacctcttcttcaaagaggtgtttcatgttttaaaatcttaatttccttctgtttcattttggataaaatctgtcttcaagtttggtgcctttttttttgggccaatatctaatctaaagttcatcctatccagtatgtttctcatttcaaatattgtattttctatctgcagagtttgatttgtatttgaaaacgttttttaatctttctcattgtcttaaacatttggagtatacttataataattgttttactgttgttatctgttacttctatcatctatgaaattactatatctgtttctattgattgatttgattactattctggttgggaggcaatattttccctacttctttgcttacttggtaattttt

SEQ ID NO: 714518 - DNA, 635 bp, Homo sapiens
catgtgcctgtagtcccagctactggggaggctgaagcaaaaaaatagcttgaacccgggatttggaggttgcagtgaaccgagatcatgccmctgcactccagcatgtgcaacagagcaagacactgtctcaaaaaaaaaaaaaaaaaaaaaaaaaggatgggctttaaaataagaagtaggcagatggggcaaaaaagtgagaccccatctctatgaaaaaaaaaaaaacaaacaaaaaaaaacagctgggcacagcagcatgcacctgtagccccagctactcaggacactgaggcaaaagtatcccttaggagtttgaggctgcagtcagctatatgatcatgccactgtactccagccaagttgacagagcagaaccctatctctaaaaacaaatgaataaaataaaataaaataaggagtaggatttgacctgggtcttgaaatgcaggttcgagtaggatacgtgagaaggggaggacattttaaattaaaatatatatatttcttataaaatataaattgtagcagttaagagcagactctgaaaccaagctgcctgggttggaatcctgactccaccacttaaagtcttcctgtgactctgtatcatctgtaaaatgggaataata

SEQ ID NO: 714519 - DNA, 2732 bp, Homo sapiens
tatcaactggaaattctgaatacttttatctgatgtgactgtttatatccccaactaaattatatatatatatatatatatatatatatatatttttttttttttttttttttttttctgagagagtttcactcttgttgcccacactggagtgcaatggtacgatcccggctcactgcaacctccacctcctgggttcaagcagttctcctgcctcagcctcctgagtagctgggattacaggagggcaccaccacgctgggctaattttgtatttttttagtagagatggagtttcaccatgttggtcagactggtctcgaactcctgacctcaagtgatccgcccacctcagcctcccgaagtgctgggattacaggcatgagccaccgtgcccggcctaaattataatttttatagtaaaaccttagggatataattgctaattctttgaattctccatagcactaccttatttctttagcagagtgctcagtaaatgttaatttatatatatatcatatatattatatatgttgttatatattatataaacacatatatgttaatttatatatacataacatatatgttaatttttatatatacatatgtgtgtgtgtatgttatatatgtgcatatataccatattttacatataacgtgttcctacactatatgccaggacagaaaaccaggcatttcatttgattgagggttgtcaaaccaataatctgccttcctactaattcctaaacatggaggcgatcttatatatcacctggtgatgcctttactttactgatgaagaagcagcccagcaaagttaattgactttataaagcagttctatggcctgaaccagaactcaggcttctcacttggggtccagtgattattttgctacagaatgctaagtgtgtggctaaagaatgggggaaaaaaaagagaaattagatatagtttgcttaagttatagagaatttaacaagattctttagcattaaaagtatttttgttttatcagtttcatcagtaaggtagggtaatcatttcaaggttaatgctagattaatttgccttgtaaaaacttcattgtattgaaatggggaggaaatgtacagaattagagtggtcatatttcatgcagacaatgttttttatttatgatactatcccattattcttcataagtcataatttatctcgaagctttaatttagaattattgtatctttctaaaagaggaaagaatcatttttttctaagacaaataaatagctagcatagagtgcttaattatgaggatggcttttaatctaatttaccctcttttcctgattttgataaatattaaaacttttttattattaaaaataagcttcaattcaagccatagaaagactccagttaagaacatcaaataatctgaaataatctgtatctgcccagatgacccatgctgaccacacagttaaatgacttccctcctactggaagatgagatgttttttagcactaaaaagatcctggaagaataacttcattcagttcttcaggggtatctgttctcttccccgctgcgtgggtgaccggtccaaggggttattagctctggctgcgtgtcagtatgatctagagagtgttttgttttgtttgagacacattttgactctgttgcccaggctagagtgcagtggcacaatcttggctcactgcaacctccaccttccgggttcaagcaattcttgtgcctcagccttccaagtagctgggactagaagagcatgccaccatgcccggctaatttttgtattattaggagagacagggtttcaccatggtggccaggttggtctcaaactcctggcctctagtgatccgccccactcagcctcccaaagggcagggatgacaggggtgagccactgtgcccagcccagagagtttttaaaaggtatcacccaggcctcatcacaggccaattccatttgaattctgaatatctgtattttcagtatttttaaaatgttagatgttatgaatctaatgtgcagccagtgttgagaacctctggcgtaaatgggttcttctgttcagacagagcctgtctgtcccagcctctgcccagatgagggaggacccacgccataaatgaaaaggcaggttctacaaaatcccacttgttttctctccaatcctaaactgagaagtagggaagagaacagagggttctagctgtgtgcctggaggacagattgtgttttgttttcttctatctttgtttttttgccaaaggtacagaaagagaataaaggcctccactaactcctagagcaaggttttccacctcagcactgttgacatctggggctgggtaagcctttgttatggaggtcctcctgtgtattgtaaattcttaagcagctttcttgcctttgacacactggatgccagtggcattcacctccccaagttgtgacaacsaaaaaatgtgtacagacgttgccaaatgttccctgggactgaggggagtgggtagaaaatggcccctgggtgagaaccgttgtcctagagctaacagcagaagctctgatgaagaatttagtggtgactgttaggctgtggcttttgtgagtattggcaacaggcggcaaggatggtggtgctggtgaagacattggtggagatggcagtttgggcccaggcagcaagagaaactctgaaggtca

SEQ ID NO: 714520 - DNA, 2732 bp, Homo sapiens
tatcaactggaaattctgaatacttttatctgatgtgactgtttatatccccaactaaattatatatatatatatatatatatatatatatatttttttttttttttttttttttttctgagagagtttcactcttgttgcccacactggagtgcaatggtacgatcccggctcactgcaacctccacctcctgggttcaagcagttctcctgcctcagcctcctgagtagctgggattacaggagggcaccaccacgctgggctaattttgtatttttttagtagagatggagtttcaccatgttggtcagactggtctcgaactcctgacctcaagtgatccgcccacctcagcctcccgaagtgctgggattacaggcatgagccaccgtgcccggcctaaattataatttttatagtaaaaccttagggatataattgctaattctttgaattctccatagcactaccttatttctttagcagagtgctcagtaaatgttaatttatatatatatcatatatattatatatgttgttatatattatataaacacatatatgttaatttatatatacataacatatatgttaatttttatatatacatatgtgtgtgtgtatgttatatatgtgcatatataccatattttacatataacgtgttcctacactatatgccaggacagaaaaccaggcatttcatttgattgagggttgtcaaaccaataatctgccttcctactaattcctaaacatggaggcgatcttatatatcacctggtgatgcctttactttactgatgaagaagcagcccagcaaagttaattgactttataaagcagttctatggcctgaaccagaactcaggcttctcacttggggtccagtgattattttgctacagaatgctaagtgtgtggctaaagaatgggggaaaaaaaagagaaattagatatagtttgcttaagttatagagaatttaacaagattctttagcattaaaagtatttttgttttatcagtttcatcagtaaggtagggtaatcatttcaaggttaatgctagattaatttgccttgtaaaaacttcattgtattgaaatggggaggaaatgtacagaattagagtggtcatatttcatgcagacaatgttttttatttatgatactatcccattattcttcataagtcataatttatctcgaagctttaatttagaattattgtatctttctaaaagaggaaagaatcatttttttctaagacaaataaatagctagcatagagtgcttaattatgaggatggcttttaatctaatttaccctcttttcctgattttgataaatattaaaacttttttattattaaaaataagcttcaattcaagccatagaaagactccagttaagaacatcaaataatctgaaataatctgtatctgcccagatgacccatgctgaccacacagttaaatgacttccctcctactggaagatgagatgttttttagcactaaaaagatcctggaagaataacttcattcagttcttcaggggtatctgttctcttccccgctgcgtgggtgaccggtccaaggggttattagctctggctgcgtgtcagtatgatctagagagtgttttgttttgtttgagacacattttgactctgttgcccaggctagagtgcagtggcacaatcttggctcactgcaacctccaccttccgggttcaagcaattcttgtgcctcagccttccaagtagctgggactagaagagcatgccaccatgcccggctaatttttgtattattaggagagacagggtttcaccatggtggccaggttggtctcaaactcctggcctctagtgatccgccccactcagcctcccaaagggcagggatgacaggggtgagccactgtgcccagcccagagagtttttaaaaggtatcacccaggcctcatcacaggccaattccatttgaattctgaatatctgtattttcagtatttttaaaatgttagatgttatgaatctaatgtgcagccagtgttgagaacctctggcgtaaatgggttcttctgttcagacagagcctgtctgtcccagcctctgcccagatgagggaggacccacgccataaatgaaaaggcaggttctacaaaatcccacttgttttctctccaatcctaaactgagaagtagggaagagaacagagggttctagctgtgtgcctggaggacagattgtgttttgttttcttctatctttgtttttttgccaaaggtacagaaagagaataaaggcctccactaactcctagagcaaggttttccacctcagcactgttgacatctggggctgggtaagcctttgttatggaggtcctcctgtgtattgtaaattcttaagcagctttcttgcctttgacacactggatgccagtggcattcacctccccaagttgtgacaacgaaaaaatgtgtacagacgttgccaaatgttycctgggactgaggggagtgggtagaaaatggcccctgggtgagaaccgttgtcctagagctaacagcagaagctctgatgaagaatttagtggtgactgttaggctgtggcttttgtgagtattggcaacaggcggcaaggatggtggtgctggtgaagacattggtggagatggcagtttgggcccaggcagcaagagaaactctgaaggtca

SEQ ID NO: 714521 - DNA, 2732 bp, Homo sapiens
tatcaactggaaattctgaatacttttatctgatgtgactgtttatatccccaactaaattatatatatatatatatatatatatatatatatttttttttttttttttttttttttctgagagagtttcactcttgttgcccacactggagtgcaatggtacgatcccggctcactgcaacctccacctcctgggttcaagcagttctcctgcctcagcctcctgagtagctgggattacaggagggcaccaccacgctgggctaattttgtatttttttagtagagatggagtttcaccatgttggtcagactggtctcgaactcctgacctcaagtgatccgcccacctcagcctcccgaagtgctgggattacaggcatgagccaccgtgcccggcctaaattataatttttatagtaaaaccttagggatataattgctaattctttgaattctccatagcactaccttatttctttagcagagtgctcagtaaatgttaatttatatatatatcatatatattatatatgttgttatatattatataaacacatatatgttaatttatatatacataacatatatgttaatttttatatatacatatgtgtgtgtgtatgttatatatgtgcatatataccatattttacatataacgtgttcctacactatatgccaggacagaaaaccaggcatttcatttgattgagggttgtcaaaccaataatctgccttcctactaattcctaaacatggaggcgatcttatatatcacctggtgatgcctttactttactgatgaagaagcagcccagcaaagttaattgactttataaagcagttctatggcctgaaccagaactcaggcttctcacttggggtccagtgattattttgctacagaatgctaagtgtgtggctaaagaatgggggaaaaaaaagagaaattagatatagtttgcttaagttatagagaatttaacaagattctttagcattaaaagtatttttgttttatcagtttcatcagtaaggtagggtaatcatttcaaggttaatgctagattaatttgccttgtaaaaacttcattgtattgaaatggggaggaaatgtacagaattagagtggtcatatttcatgcagacaatgttttttatttatgatactatcccattattcttcataagtcataatttatctcgaagctttaatttagaattattgtatctttctaaaagaggaaagaatcatttttttctaagacaaataaatagctagcatagagtgcttaattatgaggatggcttttaatctaatttaccctcttttcctgattttgataaatattaaaacttttttattattaaaaataagcttcaattcaagccatagaaagactccagttaagaacatcaaataatctgaaataatctgtatctgcccagatgacccatgctgaccacacagttaaatgacttccctcctactggaagatgagatgttttttagcactaaaaagatcctggaagaataacttcattcagttcttcaggggtatctgttctcttccccgctgcgtgggtgaccggtccaaggggttattagctctggctgcgtgtcagtatgatctagagagtgttttgttttgtttgagacacattttgactctgttgcccaggctagagtgcagtggcacaatcttggctcactgcaacctccaccttccgggttcaagcaattcttgtgcctcagccttccaagtagctgggactagaagagcatgccaccatgcccggctaatttttgtattattaggagagacagggtttcaccatggtggccaggttggtctcaaactcctggcctctagtgatccgccccactcagcctcccaaagggcagggatgacaggggtgagccactgtgcccagcccagagagtttttaaaaggtatcacccaggcctcatcacaggccaattccatttgaattctgaatatctgtattttcagtatttttaaaatgttagatgttatgaatctaatgtgcagccagtgttgagaacctctggcgtaaatgggttcttctgttcagacagagcctgtctgtcccagcctctgcccagatgagggaggacccacgccataaatgaaaaggcaggttctacaaaatcccacttgttttctctccaatcctaaactgagaagtagggaagagaacagagggttctagctgtgtgcctggaggacagattgtgttttgttttcttctatctttgtttttttgccaaaggtacagaaagagaataaaggcctccactaactcctagagcaaggttttccacctcagcactgttgacatctggggctgggtaagcctttgttatggaggtcctcctgtgtattgtaaattcttaagcagctttcttgcctttgacacactggatgccagtggcattcacctccccaagttgtgacaacgaaaaaatgtgtacagacgttgccaaatgttccctgggactgaggggagtgggtagaaaatggcccctgggtgagaaccgttgtcctagagctaacagcagaagctctgatgaagaatttagtggtgactgttaggctgtggcttttgtgagtattggcaacaggcggcaaggatggtggtgctggtgaagacattggtggagatggyagtttgggcccaggcagcaagagaaactctgaaggtca

SEQ ID NO: 714522 - DNA, 1398 bp, Homo sapiens
caatagttatcattagcattttttcaccaggagtctcttcctcactcaacacaaagacaactggtgggtctgtcctgagagttaaccagactttgccagccacgtccacacttaagcagtgaatctgacccaggcccaggttgtcattctccactctgcataagtcataatataattttgtaagcaggcatatacatgagggctggttaactgaaggagaagtgagctttgagacacttaaaatgtgaaactaacaaagaagataaatagaggagttcaagaagtcatttaaatggaagagtctattaattcatctattcattttttattttagtcagcatttatttagaacttttgtaggtgctaaatacagtgtgtgaagatttttaaaaaatcatatttagttcctgtccttaaggatctcacagtctaagtataaaggcagacatgtaaacaggcaaatgatacctgccataaacccttttctatgaaatgtggacataatgaatttcataaaaatgaaacatgataaatgctataacagacacataaagtgctatgaagtacagggaggaactaatttttactataatttttattattgttactagaatcattaggtagtccctaaattggaaagatttgtgaacatataaaaaataataaatacttaagcttaccttttttcatacatgactattctaggcctggatttctattacagaatttcttgaatatacttctttttttcagtttatttatggaataattatggtagcaatgaccggtaatgacctttgagttataaaaatagatcttttataaagtaaactcatttactgagaagtcactggaacattttggtcttgtggaaaaacacagttattatttactgataaattatttcctgtttatgtaactgacctgccatgttaaagcattaaattaacattttggaaaatgaaacaaatatctttctacaaataggaaggatcattttaaggtttttaattagtttgtctcttgcttttattcagttttctgagataaaaattaaagaattaaaaatatttcttttagttaataatttttaaattacttggaagtcaccgtagctcatttgatctacactatttttctcaattggtaggataaatctctacaggcatccatagagacagctcccaagcatcagcgaattgaagaatttgggaatatgctttactgattgttccatatttctttattttttacactgcttttctttatccaatcttacttttcattgcagttgcttttttttttggcyttgtctgctcatgccttgggctcttcagtggtacactggaatattgctcaactctgtggtggacatcagtttcagtaggtgattctgtg

SEQ ID NO: 714523 - DNA, 624 bp, Homo sapiens
cttgggatttaaaaaaatgtttctgtaaagmagcacagctgttaagcaatctagtccattttaaatgaattgaatagtcaaggccacttcacgaataattgctaagtactatattacacctaacacttctgcctagatatttaaaaagaataaagaaaactatgggtagagattacacaatttcctaatctgttcatagaattcttacatacaccaaagttagtgatttagggggaaaatggattcctaagcatgagcactgccaaaaagaacgactagaaatgcctcacaatggtccctatgatccatgaaaaaaggcaaaaaagtatttcttacagtaaatcgccctactatatagaaccatgtaaaattgcaaggatgacatggattttctcattcttttatgtcagaataactactcactctcaaacatctaatgagttaactcagacctctaaacacagtggagttccattacaaaaacagaaatattaatattattattccaaaatcttaacacaggactctgctatccataaagtgttaatttcacttcaatattaaccaggacaccaattgaaatgtcaaatgcattcactaacaaaagtcgttttaatttatacc

SEQ ID NO: 714524 - DNA, 531 bp, Homo sapiens
  misc_feature 2, 3, 4, 5, 6, 7, 8, 9, 10, 11, 12, 13, 14, 15, 16, 17, 18,19, 20, 21, 22, 23, 24, 25, 26, 27, 28, 29, 30, 31, 32,33, 34, 35, 36, 37, 38, 39, 40, 41, 42, 43, 44, 45, 46,47, 48, 49, 50, 51, 52, 53, 54, 55, 56, 57, 58, 59, 60,61: n = A,T,C or G
  misc_feature 62, 63, 64, 65, 66, 67, 68, 69, 70, 71, 72, 73, 74, 75, 76,77, 78, 79, 80, 81, 82, 83, 84, 85, 86, 87, 88, 89, 90,91, 92, 93, 94, 95, 96, 97, 98, 99, 100, 101: n = A,T,C or G
annnnnnnnnnnnnnnnnnnnnnnnnnnnnnnnnnnnnnnnnnnnnnnnnnnnnnnnnnnnnnnnnnnnnnnnnnnnnnnnnnnnnnnnnnnnnnnnnnnnatgatgagttcatatcctttgtagggacatggatgaagttggaaaccatcattttgagcaaactatcacaaggacagaaaaccaaacactgaatgttctcacttataggtgggaattgaacaatgagaacacttggacacagggtggtgaacatcatacaccggggcctgtagtggggtgggggtaggggagaggcatagcattaggasatatacctaatgctaaatgacgagttaatgggtgcagtacaccaacatggcatatggcatatgtatacatatgtaacaaaccttcacgttgtgcacatgtaccctagaacttaaagtataataaaaaaaaatgaggggctttttttcccactccacttgcaagctgattctagttcgtcggtaagtaactcgcctttcctggttttcctcagcaacacaga

SEQ ID NO: 714525 - DNA, 1090 bp, Homo sapiens
ggcaataagctttttgtagagcactttggaaggaggcagacacatttgtagatttgtaataagcactgagttgctccaatttagtgcatgaacaaaaaataattgtagttattaataagagctgagaataaaaaagacctatctaatcttagaagatttgaaagaagaacactgagacaaacagcaaaatccaaatgagacctgatcatttgctctagccacgttaagttattggcaggttatatgagaactccatctatctctatatttacagtttatttagttcttttataaaagtttttattattttcttttggtcataataaatatatgacagcattaatagtatcaaatattgcttaaatgatttccacaaatatttctgtttccatagtaaawctctaatattaaaataaaaaccttcaaagtattgctatatatgatacatagatgagtgaactttgcttaaccatagtcaaggttttggtaagccagaatttacaaaacaaattatataatattacctacagaattctttcccacaggggtcattctttccaggtggatctcacattactacttttgaaggagaaaagtagaaaacactatgtaattgcaatgtatcaatatcaataacttccaggtgaagtaaattccttgtaacaatgatagaaattccactttccaataatgttcatgggaaaatcctagaacattccagtgtgggatactttgttattctaccctttcgtttttttttttgttttttgttttttgttttttttttttttgcttggaagatgttgcataacttagggaatggaaatcattttgccagataatttggcaataaatatatttcccacatgcttggtcttgtaaatcctatctggcaaagtagccatttaatcaatagagtaagaaaacagagatttaatctagaaagtgattgaattagcactgagtgtagaagctggacaaaagtggaaatatcattgctctgtagtttctccaattttataaatgattactaatgactaatgaaccaattgcctagttcctctgcacagtttgggaaaacagaagagca

SEQ ID NO: 714526 - DNA, 1456 bp, Homo sapiens
gatttattgtcacagtaagtgcaacaaaactcttttggttcacttcatgtraacttgtgagccaccgagggtgcagactggaaaactttctgcaataggtacctggactctgtttacctgacaccagttcattattcaaagtggtgccaaaaaagcagtcataggtattttaaatgttaactctgtggtcaaaaacaccagtggagagctgtgtaaatttaggactgctcacacgggagacagagatgagctgctcataaactccaggattcatcaaatcataggcgtatctttcttgtttgcagtcatatccccactggctaacaaagggcttgtctcatagtaggtgctcgttaaatatttatttattaaatactaaatacattgatgacttaatgagatagctgtgaagtttcagcagaaggggcagggaaggagggaagcaaattggtattgatcaagcacttcccatgtgcccggtacatcctaccttttcttctgcataatctgaaatattattcccactttatagataagcaagctaggaccaaagaagtaaagtgaattgttcaaggtcctctagctaggaagtagaagatgcaaactcaagactgaccctgaaactctcttctgtatatacatactctcttgattctctcattgatgaaacaggcttatggaggaggggccactctcctctgtgtatctgtgcatgggcctcttgcttttcctttttcttttcttttatttatttatcatttttttggagcaattttattttaatgctctcactttaacaccacttgctttttcttaccaagcagattgccaagaaattcactccaaaggcaaacttttgcatgagttgaagattgaagatttcggctgtcatcttcataagaaaaaatgccctgaggccgggtgcggtggctcacacctgtaattccagcactttgggaggccaaagagggtggatcacctgaggtcaggagttcgagaccagcctgatcaacatggagaaaccccatctctgctaaaaatacaaaattagctggtcatggtggtgcatgcctgtgatcccagctactcgggaagctgaggcaggagaatcacttgaacccaggagagagaggttgcggtgagctgagatcacgccactgcactccagcctgggcaacaagagtgaaactccaactcaaaagaaaaaaaaaaaaagccttgaaaatataaacaagactggtcctgtgaatgcgcgtttgtggtttcaagaggactaattaggtaccgtatgggttcacatgtctatctacataaataagtacccaaacaaccttaagttatctgtgtttcagtgtcaacactgcacaccaaaaaggggaatgtgtactggtgatagttaaaggtcattctaggtctcaatgacatccagaaaaaagtctgtgctcctaaggacagg

SEQ ID NO: 714527 - DNA, 968 bp, Homo sapiens
cagattcttggagatccacaaatatattcttgggctctgagagttttagaattttaaaataatctgtttttatatcaataatctaaaaggtcattagaaagcccacatttcacaatacaaggacattttcctggaatgagactgttttcttacattagtaagatggaagtgacttgcctaagataacacagcaagttaaaaccaacactaaaactcatctttggaagcttttctcagtgttctttgttactagtgtggagatcttgcaatgattctgtcttcattaagtctacaggtagtggggaaagcagaaaaagaacaagtattaactaaaatgatgagtgctgtaagggagagaaatggcagtatgagttgtgtagaatgagagcagttgcataggatgagttaagttactgtgagagtttgaggaggtggtttttatgccgatagttgaagagtgaattggagttaccttaagggggttgtgagaagaaccatgttacagatggaggaaatragatgtgaaggctgtgatgtgggaaacagcttagtttactccctgatttaaatggagaaaaggaatccagtgaggcttcagagagaagcaagaactaggttattcagggtttaagacaatcaaaagtcaaaatagagtttaaacaggggagtgacataacctgatttgcatcatgctggctgtagtatgcagaattgattggagaggcaaggatggcagacaggacgccaggtgggaagctatggaaaggtgcatatggaagaagagagtgtctttggattccagttggtaagtggaagagactgaagcatgtggctgaatgtaaatgtttaataagtagaattaaaaggacatggcgattggtttgatggggatgtctgggccttcaattatgactccctgtttttggcaatgatcagctgggagattggtggcagcatttactaagaca

SEQ ID NO: 714528 - DNA, 557 bp, Homo sapiens
gataaatttatgaaattccattatttacctacccaaagcaatattttacctaactgcatatataagtattacactaccaattttttatctaagggaatttcaaggtagtagacaaattttctgcacaatctattggtcatggaattcactgtatatgagttaaaatgacaacttctactytttgtgtgtgtgtgtgtgtgtgtgtgtgtgtgtgatggagtcttgctctgccacctaggctggagggtagtaatgcaatctcggctcactgcaacctctgcctcctgggttcaagcgattctcctgcctcagcctcctgagtggctgggattacaggaccgcaccaccacgcccggctaatacccaagtattctcaacttgtattaagtacctgtcttcccttgtctagtagactatattgttacaaactttgatttgacaatgatttgtattcattcattcactaatttttccaacccacctattccaattcagggttttgggtggccagaacctatctcagcagctcagggtgcaaggcgggaaataactctgga

SEQ ID NO: 714529 - DNA, 587 bp, Homo sapiens
gcctccactgagcaaaggctatctgctgaggctggagtcgctggtgccagctggaggtgagargtgtgggccctgggccctgctttcagccacctcacagagagaagagctgaaaccttactctccttggcccaagaggcaggaggacgacaaggctgttctgggaaggggccgcgcccgcccgtcaggctgctgtgcagtgctgccaggcagcggtgacgcggtgggccacagaggactgggtgtgctggcaggacatcccgcgtggtgatagtgtccccagggaaaggctctgccaccaaagagcctcttcctagcacttggagcgggagagctgcaatgccacaccaggaacagtgttgctgtcttgaaggcaccaccctccttgcttggcctctactttgcttgtgtagcagggaggttgagaaatgggcctgcagacagaccctggggtgtctgcacgagcgagggtacctgagtgtggccctccagactacagtctggtataagaagagcaaatggacatccccttactcttttccactgcagtccatctttaaatatttcccttcttcactaaaaaaaga

SEQ ID NO: 714530 - DNA, 621 bp, Homo sapiens
tggccacatacctttctttgtactatgaaatgagatccttgtcactttcaggcaacattttttagaaaaccacaaaatataaaatttgtcacttttattactaatgatctagaggatggaggacacaccaatatatgtagagtgtgagaaataaatatccttcatttaaaaccgcagagacccaaggattgtttgctctctccctattctctagcatggcagaccttccattaaaataacttaccaaactccctcatatatctggacmatcacatataattttcctcttccggaaatgctgtctttatttttttcccaactgtttaacttcatcttgttgactctaattttcttatatcaatttaaatgggaactttgttagtatactggattgtgtcctctcataatttctacatgtttaaatactcttcataattgtaagtataaggttgtttataaaataacttttaagtatttattttaaaaatatttaaactttgaattccatcataataggacccaaatttgtcttatttacaagaatgaataagtgaatgcaatatttctgatataatctgcaataaaaaaatttctggagtaagtcagatttagctttcattt

SEQ ID NO: 714531 - DNA, 628 bp, Homo sapiens
ttatctattaygcttaaaaaattagtctcgccaactaggagtaagctatccctcatagcagaataccagtttatcagtgaggtactgctcttaccttgacgttgctcctgcacaccaactaatgcttgcttgctgttttgctgagcctcctggagccactgtcacgtattatgtttttctaaccccattcacccagagagagggaattaccataagtattacaagatttaaaatctaaccccaaaagtaaaaatctgtggaacgaaatacctacaaaaggatttgagttgtgagtgtccctatgttacagcaattttcttagggaacgattgtttaagagttggaaagaattatacagaagaaaattactaaaaatagatacatattaagaataagaggctaatctccctacgaaagataagagagtgattcctctcaccttctttttctccatagcatttaccttagaaaacttgtaagactttttcctctctttaaaatgtatgtatggatataaatcctgtagaagacaagaagggccttttgtcagctttgtgacccaggaatgtttttaacatttaaatattgagggagatagcacccccatcttccagtttctgtggaaggg

SEQ ID NO: 714532 - DNA, 588 bp, Homo sapiens
tgtgactctttgaagaatgctagaagagagtgtatcttttttgcattcaaaatccacagtacacatataaaaaaggmttctgaattatttcaaagagttttgctttaagaaatttgttcaaaactctctaggtgtgcatttaggaggctaaccaaaaagacaggtaaacttctaggcaatccttctatttccacttagtatgtataactctcattcctcaggatcctttcatagtacaggcagatgtccccttcttactatcaatcactaaaggattgaggttagaagtaatatttggaaatcctgagtcacagccttggtattacacttctcaattcttgtaaagaacacccaattctaaagatcattaactggctgccataaaattctaatggtatctactttgcaaaagcttaggaacaccttacaacagataagtctcttccaaggtacctaaataatgctatatacaccagagcttgaggacaccccagaaactattttacagatgcagaaaatacagcacagagaggtcctaattcttgttagtgatggagtcgatactaaaaataagatctcctgagtctt

SEQ ID NO: 714533 - DNA, 588 bp, Homo sapiens
tgtgactctttgaagaatgctagaagagagtgtatcttttttgcattcaaaatccacagtacacatataaaaaaggattctgaattatttcaaagagttttgctttaagaaatttgttcaaaactctctaggtgtgcatttaggaggctaaccaaaaagacaggtaaacttctaggcaatccttctatttccacttagtatgtataactctcattcctcaggatcctttcatagtacaggcagatgtccccttcttactatcaatcactaaaggattgaggttagaagtaatatttggaaatcctgagtcacagccttggtattacacttctcaattcttgtaaagaacacccaattctaaagatcattaactggctgccataaaattctaatggtatctactttgcaaaagcttaggaacaccttacaacagataagtctcttccaaggtacctaaataatgctatatacaccagagcttgaggacaccccagaaactattttacagatgcagaaaatacagcacagagaggtcytaattcttgttagtgatggagtcgatactaaaaataagatctcctgagtctt

SEQ ID NO: 714534 - DNA, 588 bp, Homo sapiens
tgtgactctttgaagaatgctagaagagagtgtatcttttttgcattcaaaatccacagtacacatataaaaaaggattctgaattatttcaaagagttttgctttaagaaatttgttcaaaactctctaggtgtgcatttaggaggctaaccaaaaagacaggtaaacttctaggcaatccttctatttccacttagtatgtataactctcattcctcaggatcctttcatagtacaggcagatgtccccttcttactatcaatcactaaaggattgaggttagaagtaatatttggaaatcctgagtcacagccttggtattacacttctcaattcttgtaaagaacacccaattctaaagatcattaactggctgccataaaattctaatggtatctactttgcaaaagcttaggaacaccttacaacagataagtctcttccaaggtacctaaataatgctatatacaccagagcttgaggacaccccagaaactattttacagatgcagaaaatacagcacagagaggtcctaatkcttgttagtgatggagtcgatactaaaaataagatctcctgagtctt

SEQ ID NO: 714535 - DNA, 629 bp, Homo sapiens
ctccagggctctccataatgcctgcaaaatagctagtgatacacttgctaagaacttcaggaagcctacaatcttgtatagacccactagaaggaataagtgagaattctggasagactgtgcacttttgaaaatcattatataacatactgtcaaccttttaaccctgaacaaaatattcatactttactgcctatttcacagttgtatatctaaatgacaatttgctcttttcctccatgtaatccagatatatcttgcctccagaaagtattctatggtacttctaagagcaacacaggctgaaatacaaggaatattgagatgtttacttctttgaaaaattgggagaagaaaaaccatggaatctataacaaaaacaacaaaaaagaggttaaacgtaagcgaagaagattattatgcaactcctagaatgcccgtgaaactggagaaaacggggaggaaagtaaagctctcttctttgttcaggccagctaaggctgcatagagtctatcatcaggtcttgggtccttccacaatttgagtacagatggaagagaaaacataattaacagctgtgccttgacttctatgcctgagtaatatcccgggtcctaaaaccagtttg

SEQ ID NO: 714536 - DNA, 588 bp, Homo sapiens
tgtgggattgtgatccaagttttaactactcttgctatgggtagtttatttctcctcatctgccttccattctccatgctacaacctgagttttatctttcaaaaacacagatctagtgatgctctttctttgcttctaaactttagatgatgtctcattactatagaacgaagttccaactcctggctgagcatagtgtctcacgcctataattccagcactttgggaggctgaggcgggcggatcgcttgaacccaggagttcaagaccaacctgggcaatatgatgaaaycccttctctacaaaaaatacaaaaattagctgggcatggtggcacctgcctgtggtcccagctactcaggaggttgagtcagaatgattgcttgagtctgggagtcagaggttgcagtgagccaagattgcatcattgcactccagcctgggtgacagagtaagaccctgccttaaacaaacaaacagagttccaactccttagcatggtgttcaaggtccttggtaatccctgtcttaatctgcattttcagattcagctgccatcaccattaactccctgtgccaggcactat

SEQ ID NO: 714537 - DNA, 896 bp, Homo sapiens
tccctgtacagcctgtagaaacataagtcaaactaaacctcttttctttataaattacccagcctcaggtattcctttatagtaatgtaaaatggactaacatactgggggagccacattatcttcttccaaaagctgtttccagacctctcctcaatcacctcttttatcagaaccctggcccagggtgtgcactgcccaccactttgccctacatgggattcatggacagagcctcttctcattccttcccagggacagctaacacaagactatcatatatgaaataattttactaagggtttagagacaayagagaggaattccagcagagaggagaaaacaacactgtgtctgaagcctgcaagccatcttcatagggaatcccctctcggtcagctctcttcttggtcctggcatgtcactgtattgctatgattcattcctcagaattgaattccttctcctttttttcttacttcctcaggactccatcctcctggcttttcctgtattcttcctcagttgttgaggaaaagcagaatattccttagtttttctttttaaacccaaatttctgattcagaaaggtactctcctactttattaagcagggtaatacatctctttattgactatgttttataacaaaagtcttttttaatgaaaaatcagttgtctctgtactccggataaattctacagcccgataaaatagtttttaaaatataatattttttcacctactcaaataattgcctctcagtgtaacaaataccatggtggaggtaagtgcaaagtgaaagctgttagagctggaatatagggtctgagaccaggctgtaaacagctggagatgagcccccagcaaagagtttctggataatgtaatatga

SEQ ID NO: 714538 - DNA, 1805 bp, Homo sapiens
  misc_feature 644, 645, 646, 647, 648, 649, 650, 651, 652, 653, 654, 655,656, 657, 658, 659, 660, 661, 662, 663, 664, 665, 666, 667,668, 669, 670, 671, 672, 673, 674, 675, 676, 677, 678, 679,680, 681, 682, 683, 684, 685, 686, 687, 688, 689, 690: n = A,T,C or G
  misc_feature 691, 692, 693, 694, 695, 696, 697, 698, 699, 700, 701, 702,703, 704, 705, 706, 707, 708, 709, 710, 711, 712, 713, 714,715, 716, 717, 718, 719, 720, 721, 722, 723, 724, 725, 726,727, 728, 729, 730, 731, 732, 733, 734, 735, 736, 737: n = A,T,C or G
  misc_feature 738, 739, 740, 741, 742, 743: n = A,T,C or G
tattttaatggaatacttcatatgtatgttttacttcaagtaggaggtaggatggttgtctccagagggtagggtgtgggggagggagggaatggggagctgttgatcaaagggtacaaagtttcacataaagaggaagaacaggtttttgagatctattgaatagcagggtgactatarccaataataatgtatttatgtctcaaaataactaagaacaaatttgaaatatctcaccataaaaaataatgggtaatcaaggggttgaatatgttagtttggtttaatcattccacattgtattcatgtagcaaaacatcacattgtatcccataaatgtatataattgcaatttgtcaatcaaaaataatattaataatttaaaatttttatttctttgtcttgactttatccttctaagtaggaattgtacgtatgtcatagctaatattattttttcttagtcttaaaaatatgtctacagtttatctgttaagtatgatgtttgttataaagttttggtagttagcctttaacaatttcttttttcataattaggcttttcatttttgtccactttttcttgggccaattctggtaatttatattgacaatttagtattatatgtataatcatgtaacannnnnnnnnnnnnnnnnnnnnnnnnnnnnnnnnnnnnnnnnnnnnnnnnnnnnnnnnnnnnnnnnnnnnnnnnnnnnnnnnnnnnnnnnnnnnnnnnnnnaaactcaagtctaaagcctctgatgaaataaagaatacctatgcagattcgcttacctctaccacccagactttatgacaccaagagccaggagaaaggaggaaaacgacatgtggaaaaaataaattcaaaaagaatactgcaaagtaatttatgtggtattaattccattattttgaatgatcagttttgttatttttatagtatgaaacaagtttccaggactagaactctcttccaggaatgaattaggtaataagtcacacatatttctccccagagggaaaagtgggaaagggaaaataaacacaacataaacatggcaatggtggatggccatatcatttttctgctgctactcaagcctcttcctctttacaagtgcagagggactgaatgtatataaagatttatcaaacttttcaacattctggccaccacatagaaaagatgttaccgagcactatcttgaaattcataagtgtgaggttgggagtctgattcttctcttcaggatcctccaagcatctaaaggaggaaggtctgtggccaagtctctgtcgagttgaggtttctgaagcccatgggaggattacaagatgataaccagccagcatgccgaagataaaccactctggtgctctctgtggtacacatgctataccatgccagcttctgtactgatatggcaactccatcagaggaaaaatttcagaagcagaagtgcaggaggatggagggatctgggaagcatgcagcaaaagagccactgtagtagaatggtgagccttctaggggcttcacttcagaaattccttctagggacttcacttcagaaattcacatctctaaagaagaaagcctcttcccagtatttctgggggtgaaatatcaataaatcaccttcaatgtcttttctaaaacacctagcaatgtgtgaactccaatggaatgttgacattaggtaatatcagaaaggaaagttcactaatggtcacatagcatgaagaaatgcagccattaatctgttctccactctgttagttctcttaatcagtctcc

SEQ ID NO: 714539 - DNA, 1805 bp, Homo sapiens
  misc_feature 644, 645, 646, 647, 648, 649, 650, 651, 652, 653, 654, 655,656, 657, 658, 659, 660, 661, 662, 663, 664, 665, 666, 667,668, 669, 670, 671, 672, 673, 674, 675, 676, 677, 678, 679,680, 681, 682, 683, 684, 685, 686, 687, 688, 689, 690: n = A,T,C or G
  misc_feature 691, 692, 693, 694, 695, 696, 697, 698, 699, 700, 701, 702,703, 704, 705, 706, 707, 708, 709, 710, 711, 712, 713, 714,715, 716, 717, 718, 719, 720, 721, 722, 723, 724, 725, 726,727, 728, 729, 730, 731, 732, 733, 734, 735, 736, 737: n = A,T,C or G
  misc_feature 738, 739, 740, 741, 742, 743: n = A,T,C or G
tattttaatggaatacttcatatgtatgttttacttcaagtaggaggtaggatggttgtctccagagggtagggtgtgggggagggagggaatggggagctgttgatcaaagggtacaaagtttcacataaagaggaagaacaggtttttgagatctattgaatagcagggtgactataaccaataataatgtatttatgtctcaaaataactaagaacaaatttgaaatatctcaccataaaaaataatgggtaatcaaggggttgaatatgttagtttggtttaatcattccacattgtatwcatgtagcaaaacatcacattgtatcccataaatgtatataattgcaatttgtcaatcaaaaataatattaataatttaaaatttttatttctttgtcttgactttatccttctaagtaggaattgtacgtatgtcatagctaatattattttttcttagtcttaaaaatatgtctacagtttatctgttaagtatgatgtttgttataaagttttggtagttagcctttaacaatttcttttttcataattaggcttttcatttttgtccactttttcttgggccaattctggtaatttatattgacaatttagtattatatgtataatcatgtaacannnnnnnnnnnnnnnnnnnnnnnnnnnnnnnnnnnnnnnnnnnnnnnnnnnnnnnnnnnnnnnnnnnnnnnnnnnnnnnnnnnnnnnnnnnnnnnnnnnnaaactcaagtctaaagcctctgatgaaataaagaatacctatgcagattcgcttacctctaccacccagactttatgacaccaagagccaggagaaaggaggaaaacgacatgtggaaaaaataaattcaaaaagaatactgcaaagtaatttatgtggtattaattccattattttgaatgatcagttttgttatttttatagtatgaaacaagtttccaggactagaactctcttccaggaatgaattaggtaataagtcacacatatttctccccagagggaaaagtgggaaagggaaaataaacacaacataaacatggcaatggtggatggccatatcatttttctgctgctactcaagcctcttcctctttacaagtgcagagggactgaatgtatataaagatttatcaaacttttcaacattctggccaccacatagaaaagatgttaccgagcactatcttgaaattcataagtgtgaggttgggagtctgattcttctcttcaggatcctccaagcatctaaaggaggaaggtctgtggccaagtctctgtcgagttgaggtttctgaagcccatgggaggattacaagatgataaccagccagcatgccgaagataaaccactctggtgctctctgtggtacacatgctataccatgccagcttctgtactgatatggcaactccatcagaggaaaaatttcagaagcagaagtgcaggaggatggagggatctgggaagcatgcagcaaaagagccactgtagtagaatggtgagccttctaggggcttcacttcagaaattccttctagggacttcacttcagaaattcacatctctaaagaagaaagcctcttcccagtatttctgggggtgaaatatcaataaatcaccttcaatgtcttttctaaaacacctagcaatgtgtgaactccaatggaatgttgacattaggtaatatcagaaaggaaagttcactaatggtcacatagcatgaagaaatgcagccattaatctgttctccactctgttagttctcttaatcagtctcc

SEQ ID NO: 714540 - DNA, 1672 bp, Homo sapiens
tcactctctttgataattatcaaacctaacaacgaccataccttctaagcacatctcagtactaaagttcattgactgtcagacttttctcactgattgctcagacaaaaggaagaggagctttgaaagctgtgatgggacttgagacactcctttatatgctaccagcatataaacaaaaacatcacmaaaaatcttggctttccactgaccatcatcccaggtaacagaccctaagctaggttcaccacctaggctatatcattcaaataacataactcagtgaggctggcactttcattatccccattcttaagataacaaataataaaataaaataaaataaaataaaataaaataaaataaaataaaataaaataaaataaaataaaataaaaaaagatgtggctttaaaagtaacctggccaggtgaaaagccaagagctgagaaaagttccaaacacaaatttttctaactcaaaagcccatgcatgagtttacaacatgtccaggaggggcaacctgaaattaagaaaggctggtaatttagaattctgaattgcaggcaaaggcctcctctttcatgtaactttcagtaaagactgagagctaggatataatggactattccaacttggtatcagagctctcaaaggaaatgacataaaacagctattagaaggcaaaatgtaaaagaaaataggaagaattgacttttcagagctatttattttcactcagagatggagttgatattaaacccttatttatactgggtatgcaatcatacacattgttgagatctgggtctgattacacctatggcactatgcagtgtatttcagtgtaaacagagtaagtctgagtttgatttagagaaaaacaaaaaatacgctaaaaaaataaaaactacatgtgagggggaaatacttctcttttggcccctttgctcctgatcggtgagcatttttgcatttttcaaagacatcaaagggttgctacaaggcttaccttgctcacaggactttggatgtatcttctagtgctgctgagaagatgtgtcatgacaaggcacatccaccgtggtgtggtgtgtcaaacttgaatcactggacttgagaaaagaaggcagagtttgtgttctgtgctgaagatagcccatgtatttctctcagggaggaaaaagttttcaaggttaaaaaaattgagaaaatgggtaaagaaaaaaataggcttttaaaaaatatataaacatctgtaaaaatcctatcttaaaatatcagtaatacaagtaaattaatgtactagtagcaagattaccaatctaatgcaaagtctattcattgctcattcatgtgcttattcttttccacaaagtttttacaaggtggaatgacatgaagaatttgcttggaaaaatagatgatctaactttataagcatttctcaagtattcctctgctgccagaatttataatgaatctgcttactaccctggcctcagccaaattaattaataatttcctttctccttcccatgagtctcacagattactacaccttttttacccaagaagtcctatcctattgtatcctattatatctgcctgaaggaactagattcagctccatcaaacgtatacctttcaagaaaataatcttaaaagtgaat

SEQ ID NO: 714541 - DNA, 641 bp, Homo sapiens
gaaagaaaaaatcaaatagctaaaaaacatatttcgcattaaaactgcaaatttgtacaaatggtgaaacctttatctctgcataccagtcacacagaaataagagaatgaagccagtatcaccctaatccccaaaccaggaaaggacataacaaaaaaagaaaactacagaccaatatccccaatgaacatacatgcaaaaatcctcaacaaagtatttgctaatcaaatacagcagcacatcaaaaaatacaccacgatcaagcgggtttcaccccagggatgcagggatggtctaaygtatgcaaatcaataaatgtgatacactacataaccagaattaaaaacaaaaccatgtgatcatctcaatagatgtagaaaaagcattcgataaaatttagcatcgctttatgataaaaacctcaacaaactaggtatagaaggtacttacctccagttaataaaagctatatatgacaaacccacaggcaacatcatactaaatggggaaaagttgaaagcgtttcccctgagaactgaaacaagaccaggaagcccactttcaccccttctattcaacacaggactggaagttctggccagagccatcagtccagagaaataaataaggggcatccaaa

SEQ ID NO: 714542 - DNA, 641 bp, Homo sapiens
gaaagaaaaaatcaaatagctaaaaaacatatttcgcattaaaactgcaaatttgtacaaatggtgaaacctttatctctgcataccagtcacacagaaataagagaatgaagccagtatcaccctaatccccaaaccaggaaaggacataacaaaaaaagaaaactacagaccaatatccccaatgaacatacatgcaaaaatcctcaacaaagtatttgctaatcaaatacagcagcacatcaaaaaatacaccacgatcaagcgggtttcaccccagggatgcagggatggtctaatgtatgcaaatcaataaatgtgatacactacataaccagaattaaaaacaaaaccatgtgatcatctcaatagatgtagaaaaagcattcgataaaatttagcatcgctttatgataaaaacctcaacaaactaggtatagaaggtacttacctccagttaataaaagctatatatgacaaacccacaggcracatcatactaaatggggaaaagttgaaagcgtttcccctgagaactgaaacaagaccaggaagcccactttcaccccttctattcaacacaggactggaagttctggccagagccatcagtccagagaaataaataaggggcatccaaa

SEQ ID NO: 714543 - DNA, 645 bp, Homo sapiens
tccttatgccaatactacactgtattaatgcttaatatttttaaatgaaggttaaaatggctataaattaactttaaatacttttcacatccatgctttgaaattaatcatttattggtttataaactcttaagatttaaagatttaaatgagtaaaaaatttttttaagttgctaaatgtaaaactctgagaacccataagcaaatgctaacaacacagggaagaaagaccttcaagatgaaaataaaactccatgatgatacagaactgcagagaactctggagaaagctagtgaaattgagaaaaagggagaaattatagaacatttaccagagtttgccatatgaggtgcacaggagatcactggataaattttttagggtatcwatgcctgatccccacccccaaatatatggactgttttggaacaaggctatgtttgaggatcaaatatatattccagatataagtaatcaacaagcttaatcattgtgaagagaacaaaacaagtatgtaatacagagatgaggactgcactgctgtaagatattaaggaatgagctaaatatcacagaaatacacctttatttttaataattattaagaagtatacaattacatacatttattcagatacagaaaa

SEQ ID NO: 714544 - DNA, 319 bp, Homo sapiens
aaaaaaatgagtatttgaaaagccagaaaaatctaacaatgtcagggctgctgggcatggtggctcatgcctgtaatctcagcactttgggaggctgaggtgggtgggtcacttgaggtcaagagtttgagaccaggctggccaacatggtgaaatcccgtctytactaaaaatgcaaaaatgagccaggcgtattggtgggcacttgtaatctcagcctgtaatagggatgctgaggcaggattgcttgaacccgggaggtggaggttgcagtgagccaagatagcaccactgcactccagcctgggtgacagagcga

SEQ ID NO: 714545 - DNA, 2019 bp, Homo sapiens
tgcaggaaaaaggagtctccataacttctcaaaagaggagaccaaggtccagagagaaaaagcaactcacagccatgaatgctgacactgtggcagcagttagataagtccactgagattactactcatggaaggatttctggggccatggctgacctggaaggttatttaccgtggccaatgagggcagcatagccagaatctctggtttatggtcaaggagggtcaagtgtcccccagccatccttccacgccttctttccctgttatacttatggttcacaagaggaggacatagaacacgacaggaagacaaggtcagcctaattggcagtagaatcatgagcttcttctcaattatgctacactccagaaaatgctccttgccccttctcttaccatccattggcactttctggctttcagctgacctctcctgactccctgcctcacactcagcagcagccaccagatgtctggccgctggcctgggtgcctggggaagaaatatctgctgtgggagtgaagagccactattggctcctgacatttagtgcacttgttttttgatctctgtcccaggaagagcaagccaaagaaagttgaacacagctgagtacccaggcttattactttcatcatcttgagagctcataacttatttactgaatgcttactttacattaggcctgagctacactcatgacaggcagtaattctgccaattctcatgccaatccttaagttatgagaggttaactcacttattcaaggtcccactattggtaagtagtgctgggactcaaactaggtctgtctaatttcagatcccatgatcctgacccctccctggtactttatagcccaagatgaacttttggatcatgtaagagtgatgaagcaactggcccaatgtcacaaaattgtcagtggcagtgccaggcttgcatgattttcttcttgatgccccaggggcaatgggcaagcatggaagccctccctgtaacttccaagggtctggcctggacagttgaaatcttccaattatcccccctgtataaacttggttgctttcactgatgaaaataaactgttttyccctagagagaaaagagaccacaggtcaggggagagtcccgcaacactgtccctcggatgctctgaccccagtcagactccagacacacaggagcaagagaggtcttgccaagctctccttcatacctcctgcacagccagttggaggaggaggcaaattccctgcgaacttctttgagtcctcgcttagctgccagcccagctgcctgcctgctgtctccccacagggctgcagtagagccagcatgggaaacattgagtgttgctgggtttcggtctttctgtgcagccttggaagctctttgggcaagtggacctggaggaaactgcaaagccggctctcctttctgaaatcctgaagagcaccaagcatagaatttgaaaaatagagcctccaggccatggcacagtctaatttaaaggtgaatcctgtttaggaaaaagtcgggctgcgcaaatgaatgaaacgtgtcaaccttcaaagatagacaaaggggctagcaatggccttttgttgttgtttttgttgctttcttcctggaagcaattctctgaaaaggctggtccctgcccaaaggagtatgttgtggagaccagattatattcgggtagagtgagagaaaagtgggcattaattcaaggaacagccgtggttccatagagtaagggtctcaggagacacggtgttgaaaaacatagccttactggccaggcacactggctcatgcctctcatcccagcactttgggaggctgaagcaggtggatcacttgttgtcaggagttcaagaccaacctgaccaacatggtgaaaccctgtctctattaaaaatataaaaattagccggtcatggtggcacattcctgtaatcccagctactcaggaggctgaggcatgagaatcacttgaacccgggagggt

SEQ ID NO: 714546 - DNA, 659 bp, Homo sapiens
tttctttttttttagatggaatcttgctcttgtygcccaggctggagtaccatggctcaatcttggctcactgcaacctctgcctcccggtttcaagcgattctcctgcctcagcctcccgcgtagctgggattatagccatgcctggctaatttttttttcgatttctactagagatggggtttcccccatgtttgccaggctggtctcgagctcctgacgtcaggtgatccaccagcctcagcctcccaaagtgctggggttacaggtgtgagccactgcgcccggcctcactgcatcttattgcaccaaaataatgaacatcactcgtctgctgctgtctcttttcttcctctttgcccttgtgagattattccttttctactagcaaggaagctccatgagggcaggatgtatgtctgttttgctcactgaagtatcccaagttcctggcataaagtaggtgctcagtaaatattattgaacaccaaaaaatgcatagtatggttgagcaactggccagcgggtttggaattagctcaatttatcagcttctggagcatttttggaaatcccagtagctccagaaataacgttactaaagccccaggaaaggaacattctgttacttgttaaacaacttctcaccaaagccaaaa

SEQ ID NO: 714547 - DNA, 2002 bp, Homo sapiens
aaatacattttagtagcttccaagtaaattcttttgtaaatggagtttctctccattcataagttttagagcaaaaatgaagccttagtgggtctagatatctggctaacattaactccctgtgtgaccttaaactggtcgtccccagagctttatgcttttatacaattaacttgaattacagcctctccttcttgcccataagaatgataataccacctgcattactcaacttttacgcttatgtgagacacctagccacctatcagaaggtattcaaatgcaaagcattaagtttttacactttaatgtgaagtggaagaaagtcttgattcaaatgcacaatctctacctttctactgattccacatttgctgtcttttactagtgcagttaagtcccaaattagaaacataagtcgccccaacatgtgacaaatgtcctttgttgccagagaaaggacagtggggctgtgtcctcagccttagcaaccagaagattctgcaagaccaggacattctcctgccagagcctgctttagtgtccagtcctgttctccaaagagatggaaaaaaccaagtggaaaagtttcagtttattcaatataaggctccacattcaaatggcaaaactgctctgttcaggtcatatttcaagcccaacctatgtcagtccttagtaaaagcttcaaagcaataccagtcctttcccagcctggtttaccttgattagacaaacacagacacccatgtctgagtaagcacttggaccatggatgagtgctaaggagattaggtgtttggatagacacagctagggtgtgtgtatgtgtgtgtgtgtgtgtgtgtgtgtgtgtgtgtgtgtgtgtgtgtagagagagagagagacagaggcaaagacagagacagtgctcattgggcagaggacagagtagctgagatagtatcatttgtttattcatttgctttttcataaaatacttagtaagcacctacttggtatgtgccaacactttaataggtactagaaagagcaaracagacagaatcacagtcttcagagaatttacagcctatggggttaattaaaccaatgattatcatagcatgtaacaaacaaaagagaaccgagaatcagctgtatggaaatgcacacaggtggcagatataaatagcagcagatacacgaatcagtgcgggtccatcatataactcctagctttagtctctaaacttaggctcccactcaactcaactcctactctaactcaagatataccataccttggtttgctctttctctaagcatcgctgttctagtcttctaaggagcaggaatataaatctacatctatgtgaaactacagcacccccaagggaaaataaagaatccagtgctattctagtaattttagggcagtagtacagtacaatgcaaagtataggcttttgaactaaattggcctgggttcaaatatgagccctctcacattctattaggttgaaccatataaaaatggagatattcaatcatttttttacagtttcacgtagttcatctctgtattctagtggtaaatcattttaacctaagtttcatttccttctgttgttagtttttttaatggtgctaatacccctacctttcagggttgtaaatgaaaagatgttaaaaaaaaatacctgacatatagtgggtgttcaataaatgttagttttcccaaagatagtcagatgcatgaatcataataagaggtatttctggtcaacactaagcttaagaatccaagaaaagatatatcaaaatgagacatctttgggtttggatagtgggggaggctgtatatacacaggtatgtatgtaggggcagggagtaaatgggaaatctctggctcttctgcttaactttgccgtgagcttaaaactgctctaaaaaacaaaatctgaccaggcctggtggctcacacttgtaatcctagcactttggggggctgaagcagaa

SEQ ID NO: 714548 - DNA, 2002 bp, Homo sapiens
aaatacattttagtagcttccaagtaaattcttttgtaaatggagtttctctccattcataagttttagagcaaaaatgaagccttagtgggtctagatatctggctaacattaactccctgtgtgaccttaaactggtcgtccccagagctttatgcttttatacaattaacttgaattacagcctctccttcttgcccataagaatgataataccacctgcattactcaacttttacgcttatgtgagacacctagccacctatcagaaggtattcaaatgcaaagcattaagtttttacactttaatgtgaagtggaagaaagtcttgattcaaatgcacaatctctacctttctactgattccacatttgctgtcttttactagtgcagttaagtcccaaattagaaacataagtcgccccaacatgtgacaaatgtcctttgttgccagagaaaggacagtggggctgtgtcctcagccttagcaaccagaagattctgcaagaccaggacattctcctgccagagcctgctttagtgtccagtcctgttctccaaagagatggaaaaaaccaagtggaaaagtttcagtttattcaatataaggctccacattcaaatggcaaaactgctctgttcaggtcatatttcaagcccaacctatgtcagtccttagtaaaagcttcaaagcaataccagtcctttcccagcctggtttaccttgattagacaaacacagacacccatgtctgagtaagcacttggaccatggatgagtgctaaggagattaggtgtttggatagacacagctagggtgtgtgtatgtgtgtgtgtgtgtgtgtgtgtgtgtgtgtgtgtgtgtgtgtgtagagagagagagagacagaggcaaagacagagacagtgctcattgggcagaggacagagtagctgagatagtatcatttgtttattcatttgctttttcataaaatacttagtaagcacctacttggtatgtgccaacactttaataggtactagaaagagcaaaacagacagaatcacagtcttcagagaatttacagcctatggggttaattaaaccaatgattatcatagcatgtaacaaacaaaagagaaccsagaatcagctgtatggaaatgcacacaggtggcagatataaatagcagcagatacacgaatcagtgcgggtccatcatataactcctagctttagtctctaaacttaggctcccactcaactcaactcctactctaactcaagatataccataccttggtttgctctttctctaagcatcgctgttctagtcttctaaggagcaggaatataaatctacatctatgtgaaactacagcacccccaagggaaaataaagaatccagtgctattctagtaattttagggcagtagtacagtacaatgcaaagtataggcttttgaactaaattggcctgggttcaaatatgagccctctcacattctattaggttgaaccatataaaaatggagatattcaatcatttttttacagtttcacgtagttcatctctgtattctagtggtaaatcattttaacctaagtttcatttccttctgttgttagtttttttaatggtgctaatacccctacctttcagggttgtaaatgaaaagatgttaaaaaaaaatacctgacatatagtgggtgttcaataaatgttagttttcccaaagatagtcagatgcatgaatcataataagaggtatttctggtcaacactaagcttaagaatccaagaaaagatatatcaaaatgagacatctttgggtttggatagtgggggaggctgtatatacacaggtatgtatgtaggggcagggagtaaatgggaaatctctggctcttctgcttaactttgccgtgagcttaaaactgctctaaaaaacaaaatctgaccaggcctggtggctcacacttgtaatcctagcactttggggggctgaagcagaa

SEQ ID NO: 714549 - DNA, 905 bp, Homo sapiens
ttatttatttattttattttatttttttagacggaatctcgctctgtcacccaggctggagtgcagtggcragatctcagctcactgcaacctacacctcccaggttcactccattctcctgcctcagcctcccgagtagctaggactacaggcgcccaccaccacgcccagctaattttttgtatttttagtagagacggggtttcactgtgttagccaggatggtcacgatctcctgacctcgtgatccgcccgcctcggcctcccaatgtgctgggattacaggcgtgagccaccgcgcccagcaattttcacactcttttctatgtggacatttcaagcccataccaccgtgactcatgccactgtctagtgctgtagaactgcttagacctatcaaacctgcctctcaatcaagagttcttccttagtttcaacttaagaattgtcttcagcaaatatctaaattgaaactgcttctaatatttctgagcgataatggtcttttgttcttcttggggttggctgaacttctggcatctgagaggtcgatgccttttatcagttttagaaaattcttgagctttgtctcctgaaatactgctcctctctttcctctctctttcagggactgcaattaatcacttattagacatttttactgtgtttttgaggtctgttatgttcttttcctttttctctgtccttcagtttggatattttctacagacctgtcttccagttcatgaatcctgacttctgctgtactcagactgttgttaagcacacccaaagggttcttatttccagttattgtaatttttttttttttgagacagagtctctgtctgttgcccatgctggaatgcagtggtgtgatcttggctcactgcaacatctgcct

SEQ ID NO: 714550 - DNA, 905 bp, Homo sapiens
ttatttatttattttattttatttttttagacggaatctcgctctgtcacccaggctggagtgcagtggcaagatctcagctcactgcaacctacacctcccaggttcactccattctcctgcctcagcctcccgagtagctaggactacaggcgcccrccaccacgcccagctaattttttgtatttttagtagagacggggtttcactgtgttagccaggatggtcacgatctcctgacctcgtgatccgcccgcctcggcctcccaatgtgctgggattacaggcgtgagccaccgcgcccagcaattttcacactcttttctatgtggacatttcaagcccataccaccgtgactcatgccactgtctagtgctgtagaactgcttagacctatcaaacctgcctctcaatcaagagttcttccttagtttcaacttaagaattgtcttcagcaaatatctaaattgaaactgcttctaatatttctgagcgataatggtcttttgttcttcttggggttggctgaacttctggcatctgagaggtcgatgccttttatcagttttagaaaattcttgagctttgtctcctgaaatactgctcctctctttcctctctctttcagggactgcaattaatcacttattagacatttttactgtgtttttgaggtctgttatgttcttttcctttttctctgtccttcagtttggatattttctacagacctgtcttccagttcatgaatcctgacttctgctgtactcagactgttgttaagcacacccaaagggttcttatttccagttattgtaatttttttttttttgagacagagtctctgtctgttgcccatgctggaatgcagtggtgtgatcttggctcactgcaacatctgcct

SEQ ID NO: 714551 - DNA, 905 bp, Homo sapiens
ttatttatttattttattttatttttttagacggaatctcgctctgtcacccaggctggagtgcagtggcaagatctcagctcactgcaacctacacctcccaggttcactccattctcctgcctcagcctcccgagtagctaggactacaggcgcccaccaccacgcccagctaattttttgtatttttagtagagayggggtttcactgtgttagccaggatggtcacgatctcctgacctcgtgatccgcccgcctcggcctcccaatgtgctgggattacaggcgtgagccaccgcgcccagcaattttcacactcttttctatgtggacatttcaagcccataccaccgtgactcatgccactgtctagtgctgtagaactgcttagacctatcaaacctgcctctcaatcaagagttcttccttagtttcaacttaagaattgtcttcagcaaatatctaaattgaaactgcttctaatatttctgagcgataatggtcttttgttcttcttggggttggctgaacttctggcatctgagaggtcgatgccttttatcagttttagaaaattcttgagctttgtctcctgaaatactgctcctctctttcctctctctttcagggactgcaattaatcacttattagacatttttactgtgtttttgaggtctgttatgttcttttcctttttctctgtccttcagtttggatattttctacagacctgtcttccagttcatgaatcctgacttctgctgtactcagactgttgttaagcacacccaaagggttcttatttccagttattgtaatttttttttttttgagacagagtctctgtctgttgcccatgctggaatgcagtggtgtgatcttggctcactgcaacatctgcct

SEQ ID NO: 714552 - DNA, 905 bp, Homo sapiens
ttatttatttattttattttatttttttagacggaatctcgctctgtcacccaggctggagtgcagtggcaagatctcagctcactgcaacctacacctcccaggttcactccattctcctgcctcagcctcccgagtagctaggactacaggcgcccaccaccacgcccagctaattttttgtatttttagtagagacggggtttcactgtgttagccaggatggtcwcgatctcctgacctcgtgatccgcccgcctcggcctcccaatgtgctgggattacaggcgtgagccaccgcgcccagcaattttcacactcttttctatgtggacatttcaagcccataccaccgtgactcatgccactgtctagtgctgtagaactgcttagacctatcaaacctgcctctcaatcaagagttcttccttagtttcaacttaagaattgtcttcagcaaatatctaaattgaaactgcttctaatatttctgagcgataatggtcttttgttcttcttggggttggctgaacttctggcatctgagaggtcgatgccttttatcagttttagaaaattcttgagctttgtctcctgaaatactgctcctctctttcctctctctttcagggactgcaattaatcacttattagacatttttactgtgtttttgaggtctgttatgttcttttcctttttctctgtccttcagtttggatattttctacagacctgtcttccagttcatgaatcctgacttctgctgtactcagactgttgttaagcacacccaaagggttcttatttccagttattgtaatttttttttttttgagacagagtctctgtctgttgcccatgctggaatgcagtggtgtgatcttggctcactgcaacatctgcct

SEQ ID NO: 714553 - DNA, 867 bp, Homo sapiens
tactataaatgatacctacattctaaagagccaattctagttgtaccagcatggccttagagaaaagtaagggaatacaatttgtatttatcttctatttggtcggagttaagtatttaaaacagtaaggtagatctcagatccaccaccattaaaaataaataaataaataaataaataaataaaatagtaaagtagaaagaagagacaaagatccaaacctttcaaaatgaaaaatgaattttaaatataaggttatattttattacctactgctgagaccatcattgcataaatgaataaatagaactaaatagtccagtcacagtggctcacgcctgtaatcccagcacttttggaggcygaggcacgcagatcacgaggtcaggagacagagaccatcctggccaacatggtgaaaccctgtctctgttaaaaatacaaaagttagctgggcgtggtggcatgcgcctgtaatcccagctactcgggaggctgaggcaggagaatcgcttgaaccagggaggcagaggttgcaatgagccaagatcacaccactgcactccagcctggtgacacagcaagactctgtctcaaaaaaaaaaaaaaaaaaaagaactaaataaactcttcttcccccacaaatttaccagtttagccattttaagtgtacaggtcagtagttgcattaagtacattcacattattatgcaacaagtaccaccatccatctccaaaattttctctttttccaaaactgaaactctgtatccattaaacagtagctacccattctccctcccctacctcctggtaaccactattctactttctggctctatgaatttgactactctagccaccttt

SEQ ID NO: 714554 - DNA, 867 bp, Homo sapiens
tactataaatgatacctacattctaaagagccaattctagttgtaccagcatggccttagagaaaagtaagggaatacaatttgtatttatcttctatttggtcggagttaagtatttaaaacagtaaggtagatctcagatccaccaccattaaaaataaataaataaataaataaataaataaaatagtaaagtagaaagaagagacaaagatccaaacctttcaaaatgaaaaatgaattttaaatataaggttatattttattacctactgctgagaccatcattgcataaatgaataaatagaactaaatagtccagtcacagtggctcacgcctgtaatcccagcacttttggaggccgaggcacgcagatcacgaggtcaggagacagagaccatcctggccaacatggtgaaaccctgtctctgttaaaaatacaaaagttagctgggygtggtggcatgcgcctgtaatcccagctactcgggaggctgaggcaggagaatcgcttgaaccagggaggcagaggttgcaatgagccaagatcacaccactgcactccagcctggtgacacagcaagactctgtctcaaaaaaaaaaaaaaaaaaaagaactaaataaactcttcttcccccacaaatttaccagtttagccattttaagtgtacaggtcagtagttgcattaagtacattcacattattatgcaacaagtaccaccatccatctccaaaattttctctttttccaaaactgaaactctgtatccattaaacagtagctacccattctccctcccctacctcctggtaaccactattctactttctggctctatgaatttgactactctagccaccttt

SEQ ID NO: 714555 - DNA, 867 bp, Homo sapiens
tactataaatgatacctacattctaaagagccaattctagttgtaccagcatggccttagagaaaagtaagggaatacaatttgtatttatcttctatttggtcggagttaagtatttaaaacagtaaggtagatctcagatccaccaccattaaaaataaataaataaataaataaataaataaaatagtaaagtagaaagaagagacaaagatccaaacctttcaaaatgaaaaatgaattttaaatataaggttatattttattacctactgctgagaccatcattgcataaatgaataaatagaactaaatagtccagtcacagtggctcacgcctgtaatcccagcacttttggaggccgaggcacgcagatcacgaggtcaggagacagagaccatcctggccaacatggtgaaaccctgtctctgttaaaaatacaaaagttagctgggcgtggtggcatgcgcctgtaatcccagctactcgggaggctgaggcaggagaatcgcttgaaycagggaggcagaggttgcaatgagccaagatcacaccactgcactccagcctggtgacacagcaagactctgtctcaaaaaaaaaaaaaaaaaaaagaactaaataaactcttcttcccccacaaatttaccagtttagccattttaagtgtacaggtcagtagttgcattaagtacattcacattattatgcaacaagtaccaccatccatctccaaaattttctctttttccaaaactgaaactctgtatccattaaacagtagctacccattctccctcccctacctcctggtaaccactattctactttctggctctatgaatttgactactctagccaccttt

SEQ ID NO: 714556 - DNA, 867 bp, Homo sapiens
tactataaatgatacctacattctaaagagccaattctagttgtaccagcatggccttagagaaaagtaagggaatacaatttgtatttatcttctatttggtcggagttaagtatttaaaacagtaaggtagatctcagatccaccaccattaaaaataaataaataaataaataaataaataaaatagtaaagtagaaagaagagacaaagatccaaacctttcaaaatgaaaaatgaattttaaatataaggttatattttattacctactgctgagaccatcattgcataaatgaataaatagaactaaatagtccagtcacagtggctcacgcctgtaatcccagcacttttggaggccgaggcacgcagatcacgaggtcaggagacagagaccatcctggccaacatggtgaaaccctgtctctgttaaaaatacaaaagttagctgggcgtggtggcatgcgcctgtaatcccagctactcgggaggctgaggcaggagaatcgcttgaaccagggaggcagaggttgcartgagccaagatcacaccactgcactccagcctggtgacacagcaagactctgtctcaaaaaaaaaaaaaaaaaaaagaactaaataaactcttcttcccccacaaatttaccagtttagccattttaagtgtacaggtcagtagttgcattaagtacattcacattattatgcaacaagtaccaccatccatctccaaaattttctctttttccaaaactgaaactctgtatccattaaacagtagctacccattctccctcccctacctcctggtaaccactattctactttctggctctatgaatttgactactctagccaccttt

SEQ ID NO: 714557 - DNA, 867 bp, Homo sapiens
tactataaatgatacctacattctaaagagccaattctagttgtaccagcatggccttagagaaaagtaagggaatacaatttgtatttatcttctatttggtcggagttaagtatttaaaacagtaaggtagatctcagatccaccaccattaaaaataaataaataaataaataaataaataaaatagtaaagtagaaagaagagacaaagatccaaacctttcaaaatgaaaaatgaattttaaatataaggttatattttattacctactgctgagaccatcattgcataaatgaataaatagaactaaatagtccagtcacagtggctcacgcctgtaatcccagcacttttggaggccgaggcacgcagatcacgaggtcaggagacagagaccatcctggccaacatggtgaaaccctgtctctgttaaaaatacaaaagttagctgggcgtggtggcatgcgcctgtaatcccagctactcgggaggctgaggcaggagaatcgcttgaaccagggaggcagaggttgcaatgagccaagatcacaccactgcactccagcctggtgacacagcragactctgtctcaaaaaaaaaaaaaaaaaaaagaactaaataaactcttcttcccccacaaatttaccagtttagccattttaagtgtacaggtcagtagttgcattaagtacattcacattattatgcaacaagtaccaccatccatctccaaaattttctctttttccaaaactgaaactctgtatccattaaacagtagctacccattctccctcccctacctcctggtaaccactattctactttctggctctatgaatttgactactctagccaccttt

SEQ ID NO: 714558 - DNA, 639 bp, Homo sapiens
cccccccgagccatgcacgggatataatctcctggtgtgccgtttgctaagactgttggaaaagtgcagtattagggtggcagtgacccgattttccaggtgccgtctgtcacccctttctttgactaggaaagggaattccctgaccccttgtgcctcccgggtgaggtgatgcttcgccctcctttggctcatgctgggtgcagtgcacccactgtcctgtacccactttctgacactccccagtacctcagttggcaaggcagaaatcacccgtcttctgcatcgctcacgctgggagctctagactggagctgttcctatttggccaccttggctccacctcagatcttttcattcttgtatatacaacagtttacttggacagcctgggtagtcaggaacatccatccaagccacacttctgcctattargttcctctgttgtgctaaacaacaatttgaatttataaattctattgaacagtgtttcatcaagtgaaactccagtttcattgtacctaggaacttgcttctcttactgcctattatttaatctttctaagactctgttttctcttctataaaaagagggttgtcttgctgggatgctcccttgacatgcttcacttatcttta

SEQ ID NO: 714559 - DNA, 683 bp, Homo sapiens
gctaaagtgctaaattagtcatagactatttataataaattgtataataatactgttttattttcatagcactttcacagcctgtgattcatctttccttaatctgtctyattatcttcagtccttttctgcttgttacattccacagaaacgtctttctttcttgtcttttccaaggccagtgagggaagaggtaacttgcaactagtgtcttcttatcatggtcatggtggaaagggtggaaagaagcaataacttctgacatatagaaagcattcactggccaggcacagtggctctcgcctgtaatcccagcactttgggaggccaaggcaggaggatcacttgaggtcaggagttcgagaccagcctggccaacatgttgaaaccccatctctactaaagatacaaaaattagtgggcatggtggggggtgcctgtaatcccagctaatcgggagaccgaggaatgagaattgcttgaacccaggaagtggaggttgcagtgagccgagatcacaccactgcactccagcctgggtgacagagcaagaatatgtcggaaaaaaaaaaaaaaaaaaaaaaaaaaaaaacctggtaaggctttgccttcacaaagaaaaattgaataatttctagcatttcacacaatttaagaatgaatttattttccacttcataatg

SEQ ID NO: 714560 - DNA, 596 bp, Homo sapiens
tgtagatttatgaaagaatgcattttcacgagcattgttagtggaaagcactaacgggatatttgaaattggatttaaatgataaaattggggaggttaaataagattatttggaaaaagagactaacagaaaaaaatgaatagctaatagattatacttggctacagtacctagaatgctgactaacatagtaaatattgtgggttaagtaaagggaaagcttaagaatgattctatgtggttagttttaccaaatagactagtgccatgtatttttgttttgttttgttttgttttatgagaccgagtctcactctgtctcccaggctggggtgcggtggcaggatctctgctcactgcaactgtcgtctcccaggktcaagcgattctcatgcctcagcctcctgagtagctgggactacaggcgcctgccaccacatctggctaatttttgtatttttagtagagatggggtttcaccatgttggccaggctgggcttgaactactggcctcaagtgatccgccaggagggaggattaagaagaaatcaatcagagcttctagaattgaaaaactcacttaaggaatttcaa

SEQ ID NO: 714561 - DNA, 824 bp, Homo sapiens
tatttgattgaaatgtgatcattgtacttcatgtattcagtttgccttgaagaatttgacttcatctattgygctctatttatctattgtgctccagctgtctgcgttgtttcaacttcactgtatgaataaatcccctggggattcacttaaaatgtaaattcttatcctctagggctgggatggagctcaagattaaaaatttctagcatgttccaagctggtgcccatactgtttgtccagggaccacactgcgaataggaaaacatagaaaagaatgtaagggaaggtataggaagggatatttgagttaaaaatgagaggattttctaatagtaagatctatatgaaaggaggatgggggtataagggggtgtgagttaattaattaacgagctcattttttttctgggctaactcagatatgggctgggagtccaattgttaggcataatatagaagagactaaggggacatttagaataaatgggcgttttctcaatatgatgtatagggtgctatggttttattggagtccttagaacatccatgagcatcaaggaaaacctaaaattttaacttcaattttgtatattttatccctcaagacaccttcaattttatatattttacctattgaagttctgtgtaagatttaattttttaaacaaatccagttgcttaaaatacacactcacacacaacacacactctcaaaagtacaaacatggcagtagaggagtttctctgattctatgcaccctgatcagagaaccatggtcaaatgttaaagaaaagattcctcaatgaacagcttttcaat

SEQ ID NO: 714562 - DNA, 824 bp, Homo sapiens
tatttgattgaaatgtgatcattgtacttcatgtattcagtttgccttgaagaatttgacttcatctattgcgctctatttatctattgtgctccagctgtctgcgttgtttcaacttcactgtatgaataaatcccctggggattcacttaaaatgtaaattcttatcctctagggctgggatggagctcaagattaaaaatttctagcatgttccaagctggtgcccatactgtttgtccagggaccacactgcgaataggaaaacatagaaaagaatgtaagggaaggtataggaagggatatttgagttaaaaatgagaggattttctaatagtaagatctatatgaaaggaggatgggggtataagggggtgtgagttaattaattaacgagctcattttttttctgggctaactcagatatgggctgggagtccaattgttaggcataatatagaagagactaaggggacatttagaataaatgggcgttttctcaatatgatstatagggtgctatggttttattggagtccttagaacatccatgagcatcaaggaaaacctaaaattttaacttcaattttgtatattttatccctcaagacaccttcaattttatatattttacctattgaagttctgtgtaagatttaattttttaaacaaatccagttgcttaaaatacacactcacacacaacacacactctcaaaagtacaaacatggcagtagaggagtttctctgattctatgcaccctgatcagagaaccatggtcaaatgttaaagaaaagattcctcaatgaacagcttttcaat

SEQ ID NO: 714563 - DNA, 604 bp, Homo sapiens
tttaaaaaatgaaatataaacaattctcattaccctttttattttaaaaaaagaaatctgatttgtttgtttttgagttagcggccatgttgtctctttttttaaaaaaaaaaacaacaggtaagttgattttctttgcattaagaattattgaatatgaaattactataagggcaatcaaagcattgtagcttatgagaggttcactaaactccaactagtcaccagtccttcacaactacaatttgtcaacaaaagcaaacctaaagagtctcaggtctgaaggtattagaagttaaaagttggcttaaagctattactgatggctaatctttgttgtggaatgcttttaacagaaggggcatggtcttttagtgcaaacaggattgggcaccaaagaacctggaaaactatctgatgatgataaagtaaaaacagaactaattcaagagtttgaagaactggacttcattcctaccttggcctttaatctgccatgtaaacttactcaaattaattaaacttctcaaatcactgccactgtggstgtttagagctgaatgaacttattcagtagactagtgagaactgatattattattac

SEQ ID NO: 714564 - DNA, 667 bp, Homo sapiens
tcagtttgggagtaaggatttcaacatatgaatactggggggacataaacattcagatcatagcagctttgcagcttcaaattttttcaatccatctactctcctagttctcaatcatcctacttcctatcatagtctttaaattagctagtttatatcgtgactgaatattgtcatgtattaattgcaaacctttcattaaactgggattcaatcaacttgaaaataccttgatatacattgctgattttattaccaagattatatggatcttttcatttctagcctagcttaggatgggaggtgtattagttatttactcctatttaacaaattactccatcttagtggttcaaagcaacaaatatttgttattttgcaattcaattcctttgagtcaaagattcaggagtggcttagttgtatagctctggagaagagtcattcacaagattgtrctcaagaaattgggctagggttatagtcatgtgaaggtgtgaatgagatagaagaatttacttccaagatggcttactcgcaaggaggttggcaggatgcctcagtttttttgttggctattgtcaggagacttcagttctttccatatggttccctccacaggggtccttgagtgtcctcaaaacatggcacttggccttcctcagag

SEQ ID NO: 714565 - DNA, 1756 bp, Homo sapiens
ttttcagtatcatatcttaacagggatattaaaatattagtgaatattcaagaaaaagtgatgtgatgctgtatcagtatgtttaataagaaatgatggaagacactggaaaggcttgctttaraaaagtgctttgtgttagagttttctgctataatgaaaatcttctgtggtgttcagcattgtagccattagtatcaagtgggtattgaattcttgaaatatggccaccgtaacttttaaatcttatttaattttattttatttacatttacatggaaataaccactatataactcaagagtttcaccagagaaacaatacagtaggatatgtagctcactatctatctatcacctatctatctatatctatctatccacctacgtatgtatgtatctatgtatgtatgtatgcatgtatctatatacctatgcatctatctatgtatctatccatctatatatgtatgtatgtatgtatgtatctatgtatctatctagagctttactgcaaggaattggcttatattgggggctggctaggcaagttaaaaacctataaagaagggctgtttggaaactcctgggcaggagttaaagctgcattccacagcacaatctgttcttctccagggaaacctcatttctgctcttcaaacctttcaactgattagatgaggcctaaacatattatcccaagataatctcccttacttaaccatatttgcaaaatactttcacagtaacacctagattagtgtttgattgaataagtgatagctaaagcctaactaaattgacacataaaactaaccatcatagccatataggttggtggctaccatattggacagtgtgggtctagaaaaaaggaaattgaggttgggcatgacagatgacactacatattaaaataacagtgataaaaattgggaacagctttatatgttctgatagtggattggatgcacaaacctaaaggttgaaacatcctcttcaaattattgagagaaagaattaatagtcttaaaatatccaaaattagaatagatcacctggcaaaatattgagcccctagttcccagaattcagaatgggtgattataggaagaatttttttacccagtatggaatggctacctgtcttggatgttgaagaaggaattattttaatgggctgggcttgagctataacattttaagactccataattttcagaggtatagaatcaaaaagcttaaatatatataggcagacttccaatcaggaagttatatgtaggaaaaagttgaaatatgactctttttggcatgcctccttagatgacaggcttgggttaaacatttgtgaaacaaggcaagatatataataaagagatgatatgttatttcaaagttgaacattgataatgacttactttcactcttacctcaaagcatgacacagcacaatgagactggttagtttggtaagaaagtagattttgcaatcaaacttagactaagctgaaattaaaggtattattttttcctataaattgtaacaatagcacacacaaaatgatgctataaagtttgccttagtgctctgcgattctttcacttctgcttcttgtaattttgtcaccatattccacataaaacaagcaaaattctaattcttcttgtcttgttaaatcttctctcaagaaagaacttgaaactcattcatatacaaaacagatgtgactaataatagattaaaatgtaatatt

SEQ ID NO: 714566 - DNA, 1756 bp, Homo sapiens
ttttcagtatcatatcttaacagggatattaaaatattagtgaatattcaagaaaaagtgatgtgatgctgtatcagtatgtttaataagaaatgatggaagacactggaaaggcttgctttaaaaaagtgctttgtgttagagttttctgctataatgaaaatcttctgtggtgttcagcattgtagccattagtatcaagtgggtattgaattcttgaaatatggccaccrtaacttttaaatcttatttaattttattttatttacatttacatggaaataaccactatataactcaagagtttcaccagagaaacaatacagtaggatatgtagctcactatctatctatcacctatctatctatatctatctatccacctacgtatgtatgtatctatgtatgtatgtatgcatgtatctatatacctatgcatctatctatgtatctatccatctatatatgtatgtatgtatgtatgtatctatgtatctatctagagctttactgcaaggaattggcttatattgggggctggctaggcaagttaaaaacctataaagaagggctgtttggaaactcctgggcaggagttaaagctgcattccacagcacaatctgttcttctccagggaaacctcatttctgctcttcaaacctttcaactgattagatgaggcctaaacatattatcccaagataatctcccttacttaaccatatttgcaaaatactttcacagtaacacctagattagtgtttgattgaataagtgatagctaaagcctaactaaattgacacataaaactaaccatcatagccatataggttggtggctaccatattggacagtgtgggtctagaaaaaaggaaattgaggttgggcatgacagatgacactacatattaaaataacagtgataaaaattgggaacagctttatatgttctgatagtggattggatgcacaaacctaaaggttgaaacatcctcttcaaattattgagagaaagaattaatagtcttaaaatatccaaaattagaatagatcacctggcaaaatattgagcccctagttcccagaattcagaatgggtgattataggaagaatttttttacccagtatggaatggctacctgtcttggatgttgaagaaggaattattttaatgggctgggcttgagctataacattttaagactccataattttcagaggtatagaatcaaaaagcttaaatatatataggcagacttccaatcaggaagttatatgtaggaaaaagttgaaatatgactctttttggcatgcctccttagatgacaggcttgggttaaacatttgtgaaacaaggcaagatatataataaagagatgatatgttatttcaaagttgaacattgataatgacttactttcactcttacctcaaagcatgacacagcacaatgagactggttagtttggtaagaaagtagattttgcaatcaaacttagactaagctgaaattaaaggtattattttttcctataaattgtaacaatagcacacacaaaatgatgctataaagtttgccttagtgctctgcgattctttcacttctgcttcttgtaattttgtcaccatattccacataaaacaagcaaaattctaattcttcttgtcttgttaaatcttctctcaagaaagaacttgaaactcattcatatacaaaacagatgtgactaataatagattaaaatgtaatatt

SEQ ID NO: 714567 - DNA, 1573 bp, Homo sapiens
tttaaatttttggttttaatgacattgaaagagaatgtcctattgtgaacagtgagaggtttgcaaaaacactacaaaagttaataaagagcagtttgtttgcttattttagatttaataattttatagaacacaaattgctccttcaaaattatgaaaatttaaaatccacatgttttaaagggtggcaagagtttgagcaattcggatagccctatttgacttatttacctcatctgtctaggaataatattagttcttatgctacagtattattttcacagtgagataagccacacatgaacccataacacagtgcctggctgtgaacactcagtaagttaataattaacaattaacactcaataattaaaacctaataatgaaaactcaataaattactatctttatatttaaagctgtttaatgaaagtatttctctaactttgtaatttcacgctttttttttcttaaaaaatgtaaggctttaaaatgtttyatagtatgcttcaacctttactcctaacaatcaatctcataaattcaggtgggtaagttccatttgagcaagcttacttctattgagatttgaaaagtatatgtgacctgtaaatgttatcagaaacagtaactctatttgacaaatggcctaatcactccactctagatcaacacatttttcttgttataataaaatgtctcttctaagagtgcatatggattttaactttcctgaatttctataaatttttagctactttataatacagctttgtcctggaaaactgaaatgttccatgaggtaaatgctcaccctattttgctgcatgccacacaaaagtcactttcaaggttcagagaataactattctttggctctttttttgacaattgtcagtttttgaaaatgcacaaaccttccttctcattgaaaggaaacatggaacattcaatatcaggggtcagctcaacattaggaggctatttaaaagcatggccacatttctcctggtataagtcacttgccaatttagaaggaaaaccaggctgtaccagaactttaaatgtccaaaagtttctttaatcatattatagattttcacagtggtgtaactttaatttttataatgtaagttaagttaaaaataaactacaattttactgcattaaattatcacttctaacaaagatgtgctcttgcagctgataatgattctctttaatctcatttatttctcaggttccttaaactttaggccaggtggcggctcatgcctataatcctaacactgtgtcaggcaaaggcaggaggattgcttgagcccaggagtttaagaccaaccggggcaacatagtgagaccctgcctttgcaaaaatagatgtaaaaaattaaaaaaaaaaaaagctaggcatggtggcatgcgcccatagtctcagctactcaagaggctgaggcgggaggatcccttgagctcaggagttcaaggctgcagtgagctatgatcattccactacactccagcctgagtgacagagtgaaaccctgtcattatttaacaaaaaataaagcaa

SEQ ID NO: 714568 - DNA, 658 bp, Homo sapiens
atatcagtctgtctgtggtaagtgttgattgaggacgcaggtattaaatgctacagtaaacaataagtctgagcttcttcagaagaaagtttatttgataggtatacttactagtgaatgagaaaagaataaagatatctgtaaaaaaaaaaaaaaaaaaaaaaaaaaaaaaaagcccaagtgtggcccatgtgatccaaaggcactaaracaaatcatggaacatctgctgtttctgagatttcatggttgagggttgcattcctgacaggtagtatattgatgctaaataataaaatgtcatctacatcctttcatagatttcctgttagctagttctttctcgttggcattttttcttccttaggctccatgatcccacactgttctcttcccattttcttgactgatcaatttatctttgtagatcatccattttcaaccatcaaatgtcagtatttcccatggttcagttcctggctctgcatcaaagaattgccattgagtcaccacctgaaatcgtgctgtcacccttgaattccacattcaattctaccaaggtggtcatcaaatgtctttcatcaatttaaccattcccctgatttccacatccattttaccgaagtcttaagtacattttctcctggatgtcccacca

SEQ ID NO: 714569 - DNA, 2343 bp, Homo sapiens
agccatttttatagggactactataaatagcggcctcttaagctgatttttaaattgatttgtttacatccatcattttcaagtcaagattgataggattaagcattaacaatttgcttaccggaattttttttgctcaccataattatttttaaaagatcatcagtttggattgtttgaattaatcaagcattagacataatcattttaaaattaagtttaatttgagttcataatgacaaaaaacaaattttaagatagttatgctmtaatatattttctaattatgcaatatattaatgagtataaagtataaatttttcacactagttttagtcagtacttatcagttcacttctaaaaatagaagctaaaaaacaattagggtcgtgatatggttaggttttatatccccacccaaatctcatctggaattgcaatccccataatccccataatccccacatgtcaagggagaggccaggtggaggtaattgaatcatgggggcagtttcccccatgctgttttcttttcagagtgagttctcatgagatctgatggttttataaggggctgttttcccttcactaggcacttctccttcctgctgccttgggaagaaagcaccttgcttccccttcaccttccaccatgattgtaagtttcctgagacctccccaaccatgctaaactgtgagtcaattaaacctcttttctttataaattacccagtcttgggcagttctttatagcagtatgaaaatgaattaatacaagtgggcattaggatatacagacagaaaaaactactaagatagatagatagatactcataggacatattttgaccatctaaccatctagaactgaattccattaatgtctttatctgttttgtgctgctataacacaatacccccgcatgagtaatttataaagaatggaagtttatttgactcatggttctggagactgggaaatctaagatcatggcaccagcacctggcaagggcctcatcccatggcagaagggaagaaggtggaagtgatttcatgagactgaaagagtaaatggggacagaacttattctttcatcaggaacccatgcccatgataattaaaccacttctactataacagcatgaattcattcatgagggcagaggcctcatggcttactcacctctttaaggccccaactcccaacaccattacattagcaattaggtttcaacatgagttttaatggagacattgaaatcatagcaattaacatgggtctatttttaaatatctctcatcttagtttagtaatcaagttggaaattacctaataaatggacaaaaaggaagaaaagcacctaagaaaagaagattaggagaaagtgaatggtttttcagcctgcatagaactatatagatagagactgacttctaactcctcctgagagtgaccttaatggtcaaatcatcaatgattatgttcatgaaaagttagatacctctttctagaaataaatgaccaaataaataagctgaattaattcaatcacattcaattataggtggcagagtgtagaaccagaacaattagaccagcaagctgacaaccttcttacatatcaagcccttaagtttatctgcctcatgctcttcaactatttttctacttataggctgtggaaagatgaaggatgaaatataagagtagcaatgtgagattgctgaattattaaattttggtgcttggtagctgcacatttgttattctgagggaaggagttgcagactcagctatagaagattacctagaagttgagttcaagagtgatatataaaagactttgtgcttctttctttcttttttcaggcctacagatttggggcattaagttatacccattgcatatggctccgcatttataatatgagtttttgctagtcgatgacccattttccaaatactcaatgatgtgatcctggaggtacctagcatgagctgtgctgaccatggggagaggtacttgggccggtagaaatatggagtaatacaatcggatcacacaaagaagagtcttcctcaaaacaaatagtatatttttgagtcctaagcttataagaattgttaaaactcttttttttttttttttttttttttttttgagacagagtctcactctgttgcccaagctggagtgcagcagcgcaatctcggctcactgtaacctccatctcccaggttcaagcgattctcctgcctcagcctcctgagtagctgggattacaggcacccaccatcatgctcagctaatttttttgtatttttagtagagacggggtt

SEQ ID NO: 714570 - DNA, 1056 bp, Homo sapiens
tgtttgtgaaatacagaattgatgctttaaaggatgaaacatgctttgggtgatagaaactgtgttcactatcaacagaatatctmgtttagtctaaatacaggccaattggtcatatccgtagtaagccaatgggaagacatttgttggggattaagtagggactgtgctggtctgtttcagtatgtttttcagtgtgttgatattaatacaaagttttgaaattttggtactttttgttaaagtattggttttattttcctcaattcatcacacaacttgaaacctttcatttgaatggagcattcgcttcccacagagtctgtggtattgttgctttcagctagaccctagcagtgttcctcagccatcaacatttttaaatgcaaaaaaaaaaaaaagtgtatacaaagacaattttaggaagtatacataggctgtaaattatttatagtgcttaaggattgaaacagctacaggctgtcaagaataagaaaagacaattacctaaaaagtaggggtgaaaacagagttataggctggtcattgtttcattattattaaatacaaaggctacataaatgctgatatttagaaaatattttaaaaatctgagaattctaaactcttcttctcttacctaaattattttgaagaattaaaagataaaaggctgtacagtttggaggatagtcctctggacataaagatggggaggccaagattctagcccatgtctgaccacttgttacttatgtgaggacttagcatacctgaccttcaatgttctcatatgaaagataagagaattatctgcccataagaataaatatgtgggggtacattgtgaaactcacacgatccaaaacatgagtaattactattaccaatatcttaaggtttcttcctacttcctggaacacagagtgaaattatatgaaatagtcatgtctgatcaagcatgcatatttggttccatccatctaattgatcattttatatgtattaaacaccattctaagtaaatcacaaatctccttgctctgaaataattca

SEQ ID NO: 714571 - DNA, 1056 bp, Homo sapiens
tgtttgtgaaatacagaattgatgctttaaaggatgaaacatgctttgggtgatagaaactgtgttcactatcaacagaatatctcgtttagtctaaatacaggccaattggtcatatccgtagtaagccaatgggaagacatttgttggggattaagtagggactgtgctggtctgtttcagtatgtttttcagtgtgttgatattaatacaaagttttgaaattttggtactttttgttaaagtattggttttattttcctcaattcatcacacaacttgaaacctttcatttgaatggagcattcgcttcccacagagtctgtggtattgttgctttyagctagaccctagcagtgttcctcagccatcaacatttttaaatgcaaaaaaaaaaaaaagtgtatacaaagacaattttaggaagtatacataggctgtaaattatttatagtgcttaaggattgaaacagctacaggctgtcaagaataagaaaagacaattacctaaaaagtaggggtgaaaacagagttataggctggtcattgtttcattattattaaatacaaaggctacataaatgctgatatttagaaaatattttaaaaatctgagaattctaaactcttcttctcttacctaaattattttgaagaattaaaagataaaaggctgtacagtttggaggatagtcctctggacataaagatggggaggccaagattctagcccatgtctgaccacttgttacttatgtgaggacttagcatacctgaccttcaatgttctcatatgaaagataagagaattatctgcccataagaataaatatgtgggggtacattgtgaaactcacacgatccaaaacatgagtaattactattaccaatatcttaaggtttcttcctacttcctggaacacagagtgaaattatatgaaatagtcatgtctgatcaagcatgcatatttggttccatccatctaattgatcattttatatgtattaaacaccattctaagtaaatcacaaatctccttgctctgaaataattca

SEQ ID NO: 714572 - DNA, 1056 bp, Homo sapiens
tgtttgtgaaatacagaattgatgctttaaaggatgaaacatgctttgggtgatagaaactgtgttcactatcaacagaatatctcgtttagtctaaatacaggccaattggtcatatccgtagtaagccaatgggaagacatttgttggggattaagtagggactgtgctggtctgtttcagtatgtttttcagtgtgttgatattaatacaaagttttgaaattttggtactttttgttaaagtattggttttattttcctcaattcatcacacaacttgaaacctttcatttgaatggagcattcgcttcccacagagtctgtggtattgttgctttcagctagaccctagcagtgttcctcagccatcaacatttttaaatgcaaaaaaaaaaaaaagtgtatacaaagacaattttaggaagtatacataggctgtaaattatttatagtgcttaaggattgaaacagctacaggctgtcaagaataagaaaagacaattacctaaaaagtaggggtgaaaacagagttataggctggtcattgtttcattattattaaatacaaaggctacataaatgctgatatttagaaaatattttaaaaatctgagaattctaaactcttcttctcttacctaaattattttgaagaattaaaagataaaaggctgtacagtttggaggatagtcctctggacataaagatggggaggccaagattctagcccatgtctgaccacttgttacttatgtgaggacttagcatacctgaccttcaatgttctcatatgaaagataagagaattatctgcccataagaataaatatgtgggggtacattgtgaaactcacacgatccaaaacatgagtaattactattaccaatatcttaaggtttcttcctacttcctggracacagagtgaaattatatgaaatagtcatgtctgatcaagcatgcatatttggttccatccatctaattgatcattttatatgtattaaacaccattctaagtaaatcacaaatctccttgctctgaaataattca

SEQ ID NO: 714573 - DNA, 649 bp, Homo sapiens
aagggattcttcattcttcatratgtgcactgttcccggagatttggtctcaattatgtaaagaggaaacatgggtggctaaggagaacagtataatgtattgaatttatccttttctggaactacattttagtgtagtggaaaaataataaactactttgtggcttattacttccagtgctaataaggttgtctataaaacagaagctaccattctaaagtggtcaaggtaggataaccactataacaaactacccaacaatttcactgcattaaaacaagaaacctttcttaattacctgtgttatggtccagtgcaagtatccaggtgccgtgttccatgaaatgactcaggaacctagggtctgtagtgcctcaggggaatagtcttcccctgaggggagaggaagacggggggaggagagagaagggggagggagggaagcaagcagatggagagagacagagagagagagagaagaggaggggaggggaggatgggagagaagagaggagagaaaaagaagaagaagaggagaaggaagaagagaagggggagcagagagacagagacagagaaaaaaatataagtggaatatttacaggatttaaacaccaagcttgaattccatataattttgtttatatg

SEQ ID NO: 714574 - DNA, 762 bp, Homo sapiens
aagcaaggattggaactgagcctatttgcctgaagtgtgttctctgagttaccaagccatatccccacctgagctagatgccttctggaaattcctactggccacctgagtcctgccacacagtgcaggcaacatatgtacactctgaggctttgtgtctataaaatgggagtaatattcaacccacagcgttttgcaagggtgaaatgaggggccacacataaatcacatagtttaggtcctggttgttgggagtactcagtaaatggtggctagtatcagtttactttccttctagcgatttggaaacatgatataaaaatagaaaatgaatgggtccctgaggtttgttgtaaaaagtcgtcttgccttctgataaaggtcaatccttaacctccatggatgtgggggttttgtgaacttcatggttacgtgtaactgtcatcgtaatcatttctccccttcgccttgcatgtttgcagagattggagctgagctttgccttgctcctgggtggattcccaggctgcttgccatattggaccactggctagattctggaacttcaatatgttgtataggcacattgcttgctcattcacacaggcctatggcttttcatccctgctattaagtcaaatatcctcttccgattaaagcccaatttctgggcctattagtccayatgaagagatttcttcagttaagtaactgttcagagattttcttgtgactgaaatgtcatcctcggggtcaatctat

SEQ ID NO: 714575 - DNA, 762 bp, Homo sapiens
aagcaaggattggaactgagcctatttgcctgaagtgtgttctctgagttaccaagccatatccccacctgagctagatgccttctggaaattcctactggccacctgagtcctgccacacagtgcaggcaacatatgtacactctgaggctttgtgtctataaaatgggagtaatattcaacccacagcgttttgcaagggtgaaatgaggggccacacataaatcacatagtttaggtcctggttgttgggagtactcagtaaatggtggctagtatcagtttactttccttctagcgatttggaaacatgatataaaaatagaaaatgaatgggtccctgaggtttgttgtaaaaagtcgtcttgccttctgataaaggtcaatccttaacctccatggatgtgggggttttgtgaacttcatggttacgtgtaactgtcatcgtaatcatttctccccttcgccttgcatgtttgcagagattggagctgagctttgccttgctcctgggtggattcccaggctgcttgccatattggaccactggctagattctggaacttcaatatgttgtataggcacattgcttgctcattcacacaggcctatggcttttcatccctgctattaagtcaaatatcctcttccgattaaagcccaatttctgggcctattagtccatatgaagagatttcttcagttaartaactgttcagagattttcttgtgactgaaatgtcatcctcggggtcaatctat

SEQ ID NO: 714576 - DNA, 1356 bp, Homo sapiens
atgggctcactggagaaagcaagctttacagaaaaatctccagtagtggagaaatgttttgaaatgataacaattgtccaagtgtgaatatatatatataatttgttcctcccaccatatataaatggtccttaaaattattcagtaatgctgttttcaaactgcaatataccttaagtattataatcacctgcataaaatgaggcaattttaaacacattccaaaatgacatttctacagactataggaaatcttcagcaatatttttcattcagattgtggtcttcatgctataattgctttatacaaaatccactccagccttatcactcaatactatctttactgctgaacatcggaagataattttgcaataaaatttaatttacagagcttattttccactaatctcctagcagaggaaaaattaaacatgccaaggtacacactccaagttatgatcctaatggcatttttaaaaatttctggaatagcacgccactaaacatatcaattttatcatattgaaatgttgacaaattttaattatcaaaactttatatcctagaagagaaagtaaaagaggctattaagaatatgtatgaaaataagattcttcaagcaataaagttcccctgtggaaagcttttcttccataagaaaaaaaatacttaatataaaaatatgggactagtaaagttattttattcaaaccattaatatatcagtaacggtcaacaatattgagattttcaaataaaaaattcaaagccagtaacaataaatagggactagacatcaagactcagttttctgtataaaatgacaaagtcaggtttcttatctccaaggctyatgccagctgtaaaacttttaattttaaatatttagatgccatgcaaaatttggaagagtaaattaatagtagaaggtttatttctacaggccttttggtctctatatatcatttatgtcctagaaggcattcatcgcttgaaaaacaaaaaaaattttcttttacaaaaagtattgagccctctaaaacaattaatgccacaaattaggataagatataagccaatcctgttgctcacaaagaaatagcttcatttttacaatggtgaaatatacttaaagagtcctcatgaaaacttaaattctttgccaaaatggtaacataataaaaaaattaatgagcattaatgggttgagagatttgtgtttgatgtctacactgaatgagaccaccattttctagaacagatttaaatcactctgcctcttttaaaagttatatcataacaaggccaaactgatactgaatcatttatgaggtttttagagttgaaatatca

SEQ ID NO: 714577 - DNA, 652 bp, Homo sapiens
aaaccaacaaagcataagttaagggtaaaaaaaaaaaaccacttctcttgaataaagtactgcattaagaatgtaagaaggcagcagaagcacttcaaacagtccaggaatttggagggagggaggagaagaaggaagtctaaaagtcattttctcccctaatactgaggggaaaaaacctttatgaaaatcttactaattttttgtaatctatttttataattccagtctaattcttagttctaattgtatctgtacatttgctaattaatattcaaattatgggaacaggcataggtaatgtcattacatttagttgtccaagaagtgcaacttaaatagtagtaaatattcaacattttctgcagaggtaccttttgatatcaaattttagaaattctgtttaacatagccatttggtcttcatcaaagtttattatctttctctccttkttgcttcattaatgtaaaggagtccttttaatttaatattctttccaattactttctcttagtcacagtttgacttatttttttatgccagcttttaatttggtattgtttaactttccttctcctatgttataagctctttggggcaagaacatacaatatacacttctgaagttttccacagtgactaactactgca

SEQ ID NO: 714578 - DNA, 652 bp, Homo sapiens
aaaccaacaaagcataagttaagggtaaaaaaaaaaaaccacttctcttgaataaagtactgcattaagaatgtaagaaggcagcagaagcacttcaaacagtccaggaatttggagggagggaggagaagaaggaagtctaaaagtcattttctcccctaatactgaggggaaaaaacctttatgaaaatcttactaattttttgtaatctatttttataattccagtctaattcttagttctaattgtatctgtacatttgctaattaatattcaaattatgggaacaggcataggtaatgtcattacatttagttgtccaagaagtgcaacttaaatagtagtaaatattcaacattttctgcagaggtaccttttgatatcaaattttagaaattctgtttaacatagccatttggtcttcatcaaagtttattatctttctctcctttttgcttcattaatgtaaaggagtccttttaatttaatattctttccaattactttctcttagtcacagtttgacttatttttttatgccagcttttartttggtattgtttaactttccttctcctatgttataagctctttggggcaagaacatacaatatacacttctgaagttttccacagtgactaactactgca

SEQ ID NO: 714579 - DNA, 429 bp, Homo sapiens
cactctgcacatcatcttatatatatcacccagcttagaggaccagacaagctaagagatagatacctcccattatttctttgctgctgtctgtaatgggcttgggggatcgttttgaaagttatgatcttaaccagctgacatacggtagctgttgacatgttagagtcagctcaagcagaaaagcttctctcaragtctgaatcttcaaaaggactagactctatcctaccagttgcaggaagaacacagtcttctatatggatatgccttattgatttcttagtaattcacctatcaagaagtttacatctttatctgtcacttgcatgtggtcaagtttcccaaactttttttattgtcttctggatttcctatctagctgagaaagttttcttcattgaaagagtaaatagtcataaaatgtga

SEQ ID NO: 714580 - DNA, 3085 bp, Homo sapiens
cttagcaataattttttggatatcgcaccacaagccaggctacaaatgtaaacataaacaaggaggactgcatcaaactaaaaagcttctgcacagcaaaggaacaaccaacaaaatgaaaggggaacctacagactggaagaaatatttgcaaaccacatatctgataaagtgttaatatccaaaaatcagtaaagaactcttacaacttaagagcagaaaaacaacccagttgaaaaatgggccaaataggaaatgaccaataggaaatggggagatgtacattaaaataatacaaagtagcagacatgtaggatgaacaagttagagatctagtgtacatcatgagggctatagttaataaaaatatattgtctttgggatttttgttaaataagtagattttagctgttcctgtcacacaaacaaaaatctaactatgtgagatggtagctatgttaatttgcttcactatagtaaccagtttactatctatatgtatcctttaagatcatgttgtcaacctcaaatatataaaataaaatttattttaaaaaagaaaagttttccttcaatccagaaagaaccactattaccattttttggtgttccattccaaaatatcccacaaatatacaattgttcaatcaaatttaacattagactttatacttgaacattcaaagtatgtaagaaattatagaaaagtgtctgtgtgactccctgtctgtagagcacaggcttcatctccactaacacacacacgaccagtaccttatacagagagtccttgtttgtctttagtctgacaccatgggcgagcctgagttggcccgtggtccacattcctgaccaggtgtctttctcacccactggtttcaacaaagatgttactgggttatagaaggctgggatggaaacaggataccaagttcgcatgaagacaatatctgaaaagaggtaatttactttaacgttttcaaaagaagattcatatccatattgtgaagaaacaaagaacaatatcctcactccaaacttctctacctgactgcaaagtatttgaagggacagctcgctaaggaaactattctcatagatcaaagaactgttactgggtgtgcgccaggggactgcagacacaaggcaaatgggcacactgcataagactgggagatctaaggctggagctgctcaactctgtggagacctgactccagcctctcgtcacactggatagaagtcaagcatgaatggtaacaccctgccctgaacactacttaagacactcgccgctcatccgcagatcatcctcaaagctatcctggaaagctccttctggagctcagagtgctctcttgatctgcccccttatcccactgacagttcgaatcacagcatcttcaaatttggccacttccaaggcagaattaaacattccctacaggtatagcaagataaacacacacacacacacaaaatcatatactttatgctttacttcttacttcaaacatacatccgtgattaaagaacaaaaacaactctctgaagggtgataaaataatcaaaatgtatttgcccctgaaagtggaattactacctcaaaaagaatacaactctttcattttccccaaaataatcatgtgagttcatgggcatgctcatcactgctgtctgtgtggaagagaagatcgaagagggatttactggactgaattggcctaggaagcctttgctggcatctctcagactggactgcagcccagatccttttactcagatgcatgcacttagaacatgaaaacagtaagataaacgccagtggtattattaccttatattgcaagaacattttatgacttcctaactctgttttcaawagaaacatccccactaatgaaattgtcaataaatgctgctcaaaccaccctcccaaaatactgaaaaacagtacatccgtttctctgtacccttgccaagttgtctgcaaatgctttgtcgatttttctactgagttagacaaacttgtgatttttttccctttcttaacaccaatttaaaaagtaggaaacaaaacctagtggataaaatgacatattttcaatatgagttctgtggcagtctcacatggaagtcaggagtaacagcctcaattcctaaatagctgtttaccactgcttttttgagcatatttaagtaatacagaatataaaggagcaaacaaaatatgaagtttataaaagatttcaaacacttttctaaaaataagaggcccacattttagaggtatttcattccttttctcaaacaatatggacatttataaatatgagaatatatagatatacagaccttaataaatgaagtgttcttgaaaattttatatggaaaaccagttagctttaatttcttcacaatttttatggatttatccagatcaaggacaactcctgtggcagctatctgaaaatcaggctaacaggagccccaaaatttgaaaataggaataatattagcaagagaaaaacttcaattctatgtgacacaataaattaccaaagtgaattttacttacaattagttaagaaaaacaagagagaccatctgaacttgcaacccattggtttgacaaaagcaatccaaaactttaaagttggtaagccaaactaacaagggtgacttgaggccaggcacagtggctcatacctgtaatcccagcactttgggaggccaaggcaggtggatcacctgaggtcagaagtttgaaaccagtctggccaacatggcgaaattccgtctctactaaaaatacaaaaattagctcggcatgatggtgcatacctgtaatcccagctactcgggaggccgaggcaggagaaccgcttaaacccaggaggcagaggttgcagcgagccaagatcgtgccactgcactccagcctggaagacagagtgtgactcggtctcaaaaaaaaaaaaaaaaaaaaagaaagaaaaaaaaaggctacttgagtactttcctgagagtgatttcagaggaatgtaattttactataatgatttatttggaacgaaatggaaaa

SEQ ID NO: 714581 - DNA, 3085 bp, Homo sapiens
cttagcaataattttttggatatcgcaccacaagccaggctacaaatgtaaacataaacaaggaggactgcatcaaactaaaaagcttctgcacagcaaaggaacaaccaacaaaatgaaaggggaacctacagactggaagaaatatttgcaaaccacatatctgataaagtgttaatatccaaaaatcagtaaagaactcttacaacttaagagcagaaaaacaacccagttgaaaaatgggccaaataggaaatgaccaataggaaatggggagatgtacattaaaataatacaaagtagcagacatgtaggatgaacaagttagagatctagtgtacatcatgagggctatagttaataaaaatatattgtctttgggatttttgttaaataagtagattttagctgttcctgtcacacaaacaaaaatctaactatgtgagatggtagctatgttaatttgcttcactatagtaaccagtttactatctatatgtatcctttaagatcatgttgtcaacctcaaatatataaaataaaatttattttaaaaaagaaaagttttccttcaatccagaaagaaccactattaccattttttggtgttccattccaaaatatcccacaaatatacaattgttcaatcaaatttaacattagactttatacttgaacattcaaagtatgtaagaaattatagaaaagtgtctgtgtgactccctgtctgtagagcacaggcttcatctccactaacacacacacgaccagtaccttatacagagagtccttgtttgtctttagtctgacaccatgggcgagcctgagttggcccgtggtccacattcctgaccaggtgtctttctcacccactggtttcaacaaagatgttactgggttatagaaggctgggatggaaacaggataccaagttcgcatgaagacaatatctgaaaagaggtaatttactttaacgttttcaaaagaagattcatatccatattgtgaagaaacaaagaacaatatcctcactccaaacttctctacctgactgcaaagtatttgaagggacagctcgctaaggaaactattctcatagatcaaagaactgttactgggtgtgcgccaggggactgcagacacaaggcaaatgggcacactgcataagactgggagatctaaggctggagctgctcaactctgtggagacctgactccagcctctcgtcacactggatagaagtcaagcatgaatggtaacaccctgccctgaacactacttaagacactcgccgctcatccgcagatcatcctcaaagctatcctggaaagctccttctggagctcagagtgctctcttgatctgcccccttatcccactgacagttcgaatcacagcatcttcaaatttggccacttccaaggcagaattaaacattccctacaggtatagcaagataaacacacacacacacacaaaatcatatactttatgctttacttcttacttcaaacatacatccgtgattaaagaacaaaaacaactctctgaagggtgataaaataatcaaaatgtatttgcccctgaaagtggaattactacctcaaaaagaatacaactctttcattttccccaaaataatcatgtgagttcatgggcatgctcatcactgctgtctgtgtggaagagaagatcgaagagggatttactggactgaattggcctaggaagcctttgctggcatctctcagactggactgcagcccagatccttttactcagatgcatgcacttagaacatgaaaacagtaagataaacgccagtggtattattaccttatattgcaagaacattttatgacttcctaactctgttttcaatagaaacatccccactaatgaaattgtcaataaatgctgctcaaaccaccctcccaaaatacygaaaaacagtacatccgtttctctgtacccttgccaagttgtctgcaaatgctttgtcgatttttctactgagttagacaaacttgtgatttttttccctttcttaacaccaatttaaaaagtaggaaacaaaacctagtggataaaatgacatattttcaatatgagttctgtggcagtctcacatggaagtcaggagtaacagcctcaattcctaaatagctgtttaccactgcttttttgagcatatttaagtaatacagaatataaaggagcaaacaaaatatgaagtttataaaagatttcaaacacttttctaaaaataagaggcccacattttagaggtatttcattccttttctcaaacaatatggacatttataaatatgagaatatatagatatacagaccttaataaatgaagtgttcttgaaaattttatatggaaaaccagttagctttaatttcttcacaatttttatggatttatccagatcaaggacaactcctgtggcagctatctgaaaatcaggctaacaggagccccaaaatttgaaaataggaataatattagcaagagaaaaacttcaattctatgtgacacaataaattaccaaagtgaattttacttacaattagttaagaaaaacaagagagaccatctgaacttgcaacccattggtttgacaaaagcaatccaaaactttaaagttggtaagccaaactaacaagggtgacttgaggccaggcacagtggctcatacctgtaatcccagcactttgggaggccaaggcaggtggatcacctgaggtcagaagtttgaaaccagtctggccaacatggcgaaattccgtctctactaaaaatacaaaaattagctcggcatgatggtgcatacctgtaatcccagctactcgggaggccgaggcaggagaaccgcttaaacccaggaggcagaggttgcagcgagccaagatcgtgccactgcactccagcctggaagacagagtgtgactcggtctcaaaaaaaaaaaaaaaaaaaaagaaagaaaaaaaaaggctacttgagtactttcctgagagtgatttcagaggaatgtaattttactataatgatttatttggaacgaaatggaaaa

SEQ ID NO: 714582 - DNA, 3085 bp, Homo sapiens
cttagcaataattttttggatatcgcaccacaagccaggctacaaatgtaaacataaacaaggaggactgcatcaaactaaaaagcttctgcacagcaaaggaacaaccaacaaaatgaaaggggaacctacagactggaagaaatatttgcaaaccacatatctgataaagtgttaatatccaaaaatcagtaaagaactcttacaacttaagagcagaaaaacaacccagttgaaaaatgggccaaataggaaatgaccaataggaaatggggagatgtacattaaaataatacaaagtagcagacatgtaggatgaacaagttagagatctagtgtacatcatgagggctatagttaataaaaatatattgtctttgggatttttgttaaataagtagattttagctgttcctgtcacacaaacaaaaatctaactatgtgagatggtagctatgttaatttgcttcactatagtaaccagtttactatctatatgtatcctttaagatcatgttgtcaacctcaaatatataaaataaaatttattttaaaaaagaaaagttttccttcaatccagaaagaaccactattaccattttttggtgttccattccaaaatatcccacaaatatacaattgttcaatcaaatttaacattagactttatacttgaacattcaaagtatgtaagaaattatagaaaagtgtctgtgtgactccctgtctgtagagcacaggcttcatctccactaacacacacacgaccagtaccttatacagagagtccttgtttgtctttagtctgacaccatgggcgagcctgagttggcccgtggtccacattcctgaccaggtgtctttctcacccactggtttcaacaaagatgttactgggttatagaaggctgggatggaaacaggataccaagttcgcatgaagacaatatctgaaaagaggtaatttactttaacgttttcaaaagaagattcatatccatattgtgaagaaacaaagaacaatatcctcactccaaacttctctacctgactgcaaagtatttgaagggacagctcgctaaggaaactattctcatagatcaaagaactgttactgggtgtgcgccaggggactgcagacacaaggcaaatgggcacactgcataagactgggagatctaaggctggagctgctcaactctgtggagacctgactccagcctctcgtcacactggatagaagtcaagcatgaatggtaacaccctgccctgaacactacttaagacactcgccgctcatccgcagatcatcctcaaagctatcctggaaagctccttctggagctcagagtgctctcttgatctgcccccttatcccactgacagttcgaatcacagcatcttcaaatttggccacttccaaggcagaattaaacattccctacaggtatagcaagataaacacacacacacacacaaaatcatatactttatgctttacttcttacttcaaacatacatccgtgattaaagaacaaaaacaactctctgaagggtgataaaataatcaaaatgtatttgcccctgaaagtggaattactacctcaaaaagaatacaactctttcattttccccaaaataatcatgtgagttcatgggcatgctcatcactgctgtctgtgtggaagagaagatcgaagagggatttactggactgaattggcctaggaagcctttgctggcatctctcagactggactgcagcccagatccttttactcagatgcatgcacttagaacatgaaaacagtaagataaacgccagtggtattattaccttatattgcaagaacattttatgacttcctaactctgttttcaatagaaacatccccactaatgaaattgtcaataaatgctgctcaaaccaccctcccaaaatactgaaaaacagtayatccgtttctctgtacccttgccaagttgtctgcaaatgctttgtcgatttttctactgagttagacaaacttgtgatttttttccctttcttaacaccaatttaaaaagtaggaaacaaaacctagtggataaaatgacatattttcaatatgagttctgtggcagtctcacatggaagtcaggagtaacagcctcaattcctaaatagctgtttaccactgcttttttgagcatatttaagtaatacagaatataaaggagcaaacaaaatatgaagtttataaaagatttcaaacacttttctaaaaataagaggcccacattttagaggtatttcattccttttctcaaacaatatggacatttataaatatgagaatatatagatatacagaccttaataaatgaagtgttcttgaaaattttatatggaaaaccagttagctttaatttcttcacaatttttatggatttatccagatcaaggacaactcctgtggcagctatctgaaaatcaggctaacaggagccccaaaatttgaaaataggaataatattagcaagagaaaaacttcaattctatgtgacacaataaattaccaaagtgaattttacttacaattagttaagaaaaacaagagagaccatctgaacttgcaacccattggtttgacaaaagcaatccaaaactttaaagttggtaagccaaactaacaagggtgacttgaggccaggcacagtggctcatacctgtaatcccagcactttgggaggccaaggcaggtggatcacctgaggtcagaagtttgaaaccagtctggccaacatggcgaaattccgtctctactaaaaatacaaaaattagctcggcatgatggtgcatacctgtaatcccagctactcgggaggccgaggcaggagaaccgcttaaacccaggaggcagaggttgcagcgagccaagatcgtgccactgcactccagcctggaagacagagtgtgactcggtctcaaaaaaaaaaaaaaaaaaaaagaaagaaaaaaaaaggctacttgagtactttcctgagagtgatttcagaggaatgtaattttactataatgatttatttggaacgaaatggaaaa

SEQ ID NO: 714583 - DNA, 952 bp, Homo sapiens
aaaaccttttgattccacttcttccaccaaaaactgcttcatttctctgcttctctctgcagcaaaaccccacaaaagttttccacagttgcagcctccagttcctctgctcccattctcctacatccatgaaaattggtgcttgccaagatcgctgaaggcctccacgctgaaggactcctccggtggtcaactctgcctttaccatagttaacactgcagcgggatctgaacagtgtttcgcctccgtgtacaactggactcctgcgtgcctgcaggctcacactgcttctccctctccctcctaggcactgctcaggcctcacggccgcaatcgccccatctcgcccatgccagtcttgctcctcccagtcactctgcactcactccccggccacctcacagagttaagtggcatctacatgctgagggctgtacatctaagtccctggccagacctgtctctccagacttgacactccgcttgtctgcatgatacccagccgaaacaaacatcatcttcccaaaactgcatctgcagacagtttcctatctaacctgcaacaacccatccttccaggaacttccagtcgccatcctcatttcctcacacaccccacattcagtccaccaggagatcctactgacccagcttccaaataaactctatccgggtttgactctttgtctcatctccactgctagccctctggtttgtgccaccggactgatctctaccggactgatgtcttggcagagtgatctgattacctgaatgtctctcctctgctcaaaaccctccaaggactcccatttcagagtgaaacattcagtctyttccaatggcccacaaggctctaggtaattttaaattgtaaatggtgtgaagcagaaacttcagttagcctagtcatgcctttcaaaggtcaacacagactagcaaccactaagc

SEQ ID NO: 714584 - DNA, 585 bp, Homo sapiens
gcaatctaaatgttcaataatagagctccaattaaataacaataaatccaaataatgaaaaataatgcagccctttaagaataagcacttgcaagccgtaattcatgacatgggaaaattatcataatggaaaaagaagcaagctatatacagtgcatgatcctatacacacacatacatacatacatatttcctatccctttatatgcataagaaaacaagcgggaggaaagtsgtatctttagtcaagtcttgtttactaacgtactattaatgattatcttttctttttctttatacctttttgcatttttcaatttcctaaaatagccttacatgccttttatcaccaggagaaaaattacttctaaagtaatttcagtcaacatgcatactaagaactcttcagatttatctgttagaagctgtgcatgaatgccagtccttgcatctgtcttggaactcacagagagctcttttcccatggctttaagcaatactcaaaaagactagcatacctgaatttcctagtcctatgtttttttcatccaacagccagtcttgtatttctagctgttttctaaa

SEQ ID NO: 714585 - DNA, 585 bp, Homo sapiens
gcaatctaaatgttcaataatagagctccaattaaataacaataaatccaaataatgaaaaataatgcagccctttaagaataagcacttgcaagccgtaattcatgacatgggaaaattatcataatggaaaaagaagcaagctatatacagtgcatgatcctatacacacacatacatacatacatatttcctatccctttatatgcataagaaaacaagcgggaggaaagtcrtatctttagtcaagtcttgtttactaacgtactattaatgattatcttttctttttctttatacctttttgcatttttcaatttcctaaaatagccttacatgccttttatcaccaggagaaaaattacttctaaagtaatttcagtcaacatgcatactaagaactcttcagatttatctgttagaagctgtgcatgaatgccagtccttgcatctgtcttggaactcacagagagctcttttcccatggctttaagcaatactcaaaaagactagcatacctgaatttcctagtcctatgtttttttcatccaacagccagtcttgtatttctagctgttttctaaa

SEQ ID NO: 714586 - DNA, 585 bp, Homo sapiens
gcaatctaaatgttcaataatagagctccaattaaataacaataaatccaaataatgaaaaataatgcagccctttaagaataagcacttgcaagccgtaattcatgacatgggaaaattatcataatggaaaaagaagcaagctatatacagtgcatgatcctatacacacacatacatacatacatatttcctatccctttatatgcataagaaaacaagcgggaggaaagtcgtatctttagtcaagtcttgtttactaacgtactattaatgattatcttttctttttctttatacctttttgcatttttcaatttcctaaaatagccttacatgccttttatcaccaggagaaaaattacttctaaagtaatttcagtcaacatgcatactaagaactcttcagatttawctgttagaagctgtgcatgaatgccagtccttgcatctgtcttggaactcacagagagctcttttcccatggctttaagcaatactcaaaaagactagcatacctgaatttcctagtcctatgtttttttcatccaacagccagtcttgtatttctagctgttttctaaa

SEQ ID NO: 714587 - DNA, 585 bp, Homo sapiens
ttgcccacttctatgaattttatgtataaaattttttaagagtcagagtttttttttcttgattaaytggatgtatttcacagaatttccaactgctcacgttagttttcttccttttagagttgatctctctaatgtattagatcttcatgcctttgatagtctctctggaataaggtatgttttgtataatttggttacttttattgttatgtaccttttttccccatagttaacaggaatgatttgcacaattgcatccatgatttaagcttcctgccattcctttggcatacaagaccattcttaatgaggtatattcttggaagttttactaattggttgtttggaaatcatattgcattttcctgtagaaattatagtgtaaatgatagttaactttagaggctaatcgttaacacttctacaccaaacactatgtctaatactctttctatgagaaaatgcatgaaatacatggaaaattttagcttagcgttttcacacaaataactctcttcactttatttttttattttttattttttcctgagttttttttaaatttatttatttattattatt

SEQ ID NO: 714588 - DNA, 1193 bp, Homo sapiens
tgaaatcacatgaaatgaaatactgaaatgaaatgatgaaataatgaaaatgaaatggaaatgagatgagatgagatttgatgaaatgatgagatgaaatgatgagatgatatgaaatgatgagatgagatgggataagatgaaatgagatgaaatgatgaggtgaagtgatgcactgtcacgtgtgtrtctttttcccaaccaacaaaaattataattcattaattttattatttaagaatattcttaagagttgaaggaaaaataatatctgtacattatgggttacaattaagtataaataatacataaatatattaaaacttacaaagaatatgtttcggaatcgaatataccatgcttctgtgatgacagttatttcatgctggttgtcacaattttacatgaaaaactaatgaaacaatgtttttaactgtttctaaaaataacagtttccaaaacagttttacattcaaaatatgaaaaagatgtctttgtgttccttaatctgatgagattttcacactctgcacatgataattgttagatttttattgtgttgataaattgtatatcaaataaaaaatgttattacctcttaaattaggatttttaggtgatataggcagaaaggaaggcaagtttttataactttgtctaaatgaactttctaaatgcctgagtattaaaagatagcatgtctataaatgacaatgtatatattactgtatgacctaggaccaatcaaaaccgttacctctgataacattatattgtgcccagtataaaatagatataataatacctcaaacttaaatccaggcattgtcattgaatatgttaagaatatgcagcaaaggtgcttttaaaaatacaagctagtgattgtactaaatttgtaaatcacataggatagtgggtcattttaagaatattatttcaatctataaacgtggatgtctttgcttttttatgttttctttaatttctttcattaatatttgtcatttttgttgtcgaaatcttttacttggttaaatttatttctaagtacatttttgtagctattgtaaaaggaattgctttcttaatttcttgtttcagctagtttactatcaatatatagaaatgctactgatttttgtatgttgatttatatcctgcaactttattaatttcatgtatcaccctga

SEQ ID NO: 714589 - DNA, 1193 bp, Homo sapiens
tgaaatcacatgaaatgaaatactgaaatgaaatgatgaaataatgaaaatgaaatggaaatgagatgagatgagatttgatgaaatgatgagatgaaatgatgagatgatatgaaatgatgagatgagatgggataagatgaaatgagatgaaatgatgaggtgaagtgatgcactgtcacgtgtgtatctttttcccaaccaacaaaaattataattcattaattttattatttaagaatattcttaagagttgaaggaaaaataatatctgtacattatgggttacaattaagtataaataatacataaatatattaaaacttacaaagaatatgtttcggaatcgaatataccatgcttctgtgatgacagttatttcatgctggttgtcacaattttacatgaaaaactaatgaaacaatgtttttaactgtttctaaaaataacagtttccaaaacagttttacattcaaaatatgaaaaagatgtctttgtgttccttaatctgatgagattttcacactctgcacatgataatwgttagatttttattgtgttgataaattgtatatcaaataaaaaatgttattacctcttaaattaggatttttaggtgatataggcagaaaggaaggcaagtttttataactttgtctaaatgaactttctaaatgcctgagtattaaaagatagcatgtctataaatgacaatgtatatattactgtatgacctaggaccaatcaaaaccgttacctctgataacattatattgtgcccagtataaaatagatataataatacctcaaacttaaatccaggcattgtcattgaatatgttaagaatatgcagcaaaggtgcttttaaaaatacaagctagtgattgtactaaatttgtaaatcacataggatagtgggtcattttaagaatattatttcaatctataaacgtggatgtctttgcttttttatgttttctttaatttctttcattaatatttgtcatttttgttgtcgaaatcttttacttggttaaatttatttctaagtacatttttgtagctattgtaaaaggaattgctttcttaatttcttgtttcagctagtttactatcaatatatagaaatgctactgatttttgtatgttgatttatatcctgcaactttattaatttcatgtatcaccctga

SEQ ID NO: 714590 - DNA, 612 bp, Homo sapiens
tctgttgaatcataaattgaatttctttcatgagaaggtaatttatactttaaggcatatttttgttaataaactgggttcttctgaatgtttttttctcttcagcactcctgaaattaaacattatgtctgtctctctaatattttatgccctcaaaccaattttkgcataattttatgggtttttgtgaaattttgttacatgtaatgtgtagtgatcaaggcaggatatttaggatgtctatctcttgagtacaatacatttttgttaatatggtcaccctagtctgctatcaaacattgaatttgttccttctaactatatgtttgtatccttcgacccacttctcttcatcttccctctcccccaaatcagccttctcagtctctgttatctatctttccactctctacctccatgtgatcaacatttttagttcccacctataagtgagagcatgcaatatttgtcttttttgtgcctggcttattcacttaagttaatgaccttaagttccatccatgttgctgcaaatgacgtgattttatactttttaattgctgaagagtattccattgtgtatatataccacattttcttcattcatctgt

SEQ ID NO: 714591 - DNA, 612 bp, Homo sapiens
tctgttgaatcataaattgaatttctttcatgagaaggtaatttatactttaaggcatatttttgttaataaactgggttcttctgaatgtttttttctcttcagcactcctgaaattaaacattatgtctgtctctctaatattttatgccctcaaaccaattttggcataattttatgggtttttgtgaaattttgttacatgtaatgtgtagtgatcaaggcaggatatttaggatgtctatctcttgagtacaatacatttttgttaatatggtcaccctagtctgctatcaaacattgaatttgttccttctaactatatgtttgtatccttcgacccacttctcttcatcttccctctcccccaaatcagccttctcagtctctgttrtctatctttccactctctacctccatgtgatcaacatttttagttcccacctataagtgagagcatgcaatatttgtcttttttgtgcctggcttattcacttaagttaatgaccttaagttccatccatgttgctgcaaatgacgtgattttatactttttaattgctgaagagtattccattgtgtatatataccacattttcttcattcatctgt

SEQ ID NO: 714592 - DNA, 632 bp, Homo sapiens
cttcagtttcttagctttttcatctttaaggttaaattcttaacatggggaagaatgaccgctttttaaaaacataattttaaaatctgccttccaatcctaatgtaacattggaggaaagtaattcaagtcttatctatacccagggcttctggaggtcwgtgagatgtctgtgtttaaaagtgtcatgtcggtagaaaatttgcattttttactggtaatttgatgtgataggtgggcaatcctgattagagtctgtcattttgaagcagctgaacatcatcattctccgtctgctttctatatactctatgagttctgaaagatcttttcaaggatgatgaaggatggaatctttcttaaagtatattttgaatctcatccaacagatatgacataataaatcttcaagctatttttgaccatatgtcacaactcctgaaagcaaatgaaggctttcacagctttaagggattatttaacattgacagctgttgaggcatttatcctgatttttcttctttctttccatcaaaagtatctacataagatggcatggcttgtgggttggatgagatataaaatgcttgatgtattatgtgataccatataaatttcttatgttccttcat

SEQ ID NO: 714593 - DNA, 632 bp, Homo sapiens
cttcagtttcttagctttttcatctttaaggttaaattcttaacatggggaagaatgaccgctttttaaaaacataattttaaaatctgccttccaatcctaatgtaacattggaggaaagtaattcaagtcttatctatacccagggcttctggaggtcagtgagatgtctgtgtttaaaagtgtcatgtcggtagaaaatttgcattttttactggtaatttgrtgtgataggtgggcaatcctgattagagtctgtcattttgaagcagctgaacatcatcattctccgtctgctttctatatactctatgagttctgaaagatcttttcaaggatgatgaaggatggaatctttcttaaagtatattttgaatctcatccaacagatatgacataataaatcttcaagctatttttgaccatatgtcacaactcctgaaagcaaatgaaggctttcacagctttaagggattatttaacattgacagctgttgaggcatttatcctgatttttcttctttctttccatcaaaagtatctacataagatggcatggcttgtgggttggatgagatataaaatgcttgatgtattatgtgataccatataaatttcttatgttccttcat

SEQ ID NO: 714594 - DNA, 673 bp, Homo sapiens
ttttaaaagaataatactttacttgtaaatgcagtttaaaattttagaaagttgagaaattttagatgcttttcatatctaaaatttcagaaggaaaaacttgattgctgactctcattgcccttatgaaaaccatattcctaaataatttgttaaagaaatacaatactggttaaattcaggtcttacttgaaattttttagtagcaggaccaaaactagtatttagtttctgctagttattaagctgtagactactatatgttctaataaaaataaaatttgtggcactagtattatacattttacrataaaaaaattggagaacaacaacaaaaaacccatcaaacaaaaacaaaacacacacatatggctttgaatccaccactgcaagattcattcatcaagttttactaagtatttactccttaccaatgctagatgagaatggaatagctgatggagccctcattttataaagttttctatacaactaatttcaatcataagtttatatacacattattatattaaaaccagtaataattacattggtgtgcaagatacatataatttatttttaaaaccttgttactcaaaactgcctatgtaaggaatataacactaataatcaattgcagaaaggtgcaacatatcacaatgggggggtaata

SEQ ID NO: 714595 - DNA, 581 bp, Homo sapiens
aaagcacttccttcgtgtagggctgagacttaataaacaataaatagcagcaatcatttgattatctgacaagcaagaaacataaattcctttccttatgtgacttgtccaagatcccacaattggaagaagttgagccagggctgaaatgcaggctcagctctgttttacattccaagtcccttcttcactcgtttctcagctgccttttccctcgatcttgccatggtaacrtcccagacagacctttgctttgccaagatctgatgttgacataataccccatgctatccccaggcttcttcttgagagattgaatgtttccacgttgcttgcatctccagtggtcacttacatctccctgacgatctactctgctaagtacattgcttgcaaaatacttaaacaacaaacaaatatgcagataaacacatctccctgacaatctactctgctaagtacattgcttgcaaaatacttaaacaacaaacaaacaaatatgcagataaacacacctttgcaccttcctgccagctcatcatccaggtctatcttgttcctttgccgcatgcacaagttaa

SEQ ID NO: 714596 - DNA, 945 bp, Homo sapiens
tgtcttacatttcttcataggatgaatataaaaacctaaaataccaaagctagaagtcaaccctcactttctagggaggaaggagggccagagatattaaatgattggaccagctcacagcagagtgagcctggaattaagtgatctygacctcaaaggcaatgcacttcattttctagaataccaaaatatgcctgcgatcttaattcttgtctagaaaacagttccttcataataagaattcaattgcccgtggttagaaacagagcaacaatgcgtaaacaagcgaagctttcaggggctccaagagcatcgccccagaagcctgcacccgatcagatgacccgcacactgcaagctgttgacagaggccccacccgagggtctcagtgtggctctaattgggcatcttagaacctgaagctttcatttgtaaaatggcataaaaatctgccttgattaactcagacttgtttaaaacagtatggtgatacaacataaggtctcattattcacttgtagaaagacaaggttatttcccaaaataaaatcttaccataattgaatgctatccacttccatgtgcttagactggagaattcaatagtcatttccaccttcctcattttatgccttgagaaacacagcctataagtagtctcaggcaaagtgtaatgtgacacagctaggtaaaggcggaactgggaatggcttcctagtctgactgccaggtgcttttcttgctgctggacaccatgctagcacacctatgtactgaacaggacaaagtgcagggaattgtgtctgtactggagttactctaaggaatgtctgctgcttagtgtttgaggagaggctggtcttcgtcgtgagaatcactgcggtggtgggggtggggtgtcctagataaaaacatgtgtacttaagcccatcctcagtaacttt

SEQ ID NO: 714597 - DNA, 945 bp, Homo sapiens
tgtcttacatttcttcataggatgaatataaaaacctaaaataccaaagctagaagtcaaccctcactttctagggaggaaggagggccagagatattaaatgattggaccagctcacagcagagtgagcctggaattaagtgatctcgacctcaaaggcaatgcacttcattttctagaataccaaaatatgcctgcgatcttaattcttgtctagaaaacagttccttcataataagaattcaattgcccgtggttagaaacagagcaacaatgcgtaaacaagcgaagctttcaggggctccaagagcatcgccccagaagcctgcacccgatcagatgacccgcacactgcaagctgttgacagaggccccacccgagggtctcagtgtggctctaattgggcatcttagaacctgaagctttcatttgtaaaatggcataaaaatctgccttgattaactcagacttgtttaaaacagtatggtgatacaacataaggtctcattattcacttgtagaaagacaaggttatttcccaaaataaaatcttaccataattgaatgctatccacttccatgtgcttagactggagaattcaatagtcatttccaccttcctcattttatgccttgagaaacacagcctataagtagtctcaggcaaagtgtaatgtgacacagctaggtaaaggcggaactgggaatggcttcctagtctgactgccaggtgcttttcttgctgctggrcaccatgctagcacacctatgtactgaacaggacaaagtgcagggaattgtgtctgtactggagttactctaaggaatgtctgctgcttagtgtttgaggagaggctggtcttcgtcgtgagaatcactgcggtggtgggggtggggtgtcctagataaaaacatgtgtacttaagcccatcctcagtaacttt

SEQ ID NO: 714598 - DNA, 1611 bp, Homo sapiens
gcaatgtgagaaggccacgagattattttgcaatgtgagaaggacctgagatttgggaggccaggggcagaatgatatagtttggatggtccccctaaatcttatgttgagatgtaatcctcagtcttggatctggtggaaggtgtttgggtcttaggggtggatttctcatgaatggtttggtgctgtcctcatgagaatgagtgagttattgtgagatgtagttgtttaaaagtgtgtggcacctgcccccaccscactttctctcttgctcctgctctcattatatgtgagatgtctacttcccctttgccttctgtcatgattgttagcttcctgagtccctcaccagaagcacatcagatgctggccccacactttctgtacagcctgcagaaccatgagccaattaaacctctgttctttataaattacccagcctcaggtatttcattacaacaatgcaagaatacctgaacacactgggtttctaatccccttttgtggatttgcttgtgtatctttctgaacgaccttgattatattctatggcttattaatggtttaccaattagaaccacactaatctgtttgatcatgcatgcaatgtgcctgctgaaaaacaaggtttcagggtttcaaatagagagacttacttgtcttaccttttctcacaatcaaccatccctgtataggctctggtgtttcctccaatgtctacagtatgtttgaggaataaagaaaatgaaataacagtcaaggaagaattatgaggcatttcttttttcaaaatatgcaattaaagcaaaaagtacaaaatgcaattttcagatcagtaaggtaatttgtgtttccacagtgcaagtgttacaattattttttaagctcacactgtagtgcttttattcatttactcaaacttgttttgagcccctaatatgtgtcagccaccaaggattacattattagcaaaaactaaataaaaataaaaatagctgggcatggtggctcatgcctgtaatcttagcactatgggaggccaagacaggtggatcatttgatgaaacactgtctctacagaaaatacaaaaatcagccaggcatggtgaccctcacctgtagtcccagctcctcaggaggctgaggtggatggatcacctgaacccgggaggtggaggttgcagtgagccaagattgtgccactgcactgcagcctggctgatagagtgagactctgtctcaaaaaaaaaaaaaaaaggaaatgttgcatgtgttcacgaagctcacaatcaaatgggtgaggccaattgttagtcaaataatctcttaaagaaatctcaccttgtaactgtgacgagaacagagcagtggcccaggtcagtggtgacttatcacagtagaagtggtggccactcaaggaactgatgaaggaactgaaatctgatggatgagcatagctgagcctttgttttcccccaaagtctcagtataattttggaactcacatcaactttggattcagctgatacatgccacgacatcattgaccactgatccttttagaacctttgcacctcactttgggctcagttttcctggtttatttcccat

SEQ ID NO: 714599 - DNA, 1611 bp, Homo sapiens
gcaatgtgagaaggccacgagattattttgcaatgtgagaaggacctgagatttgggaggccaggggcagaatgatatagtttggatggtccccctaaatcttatgttgagatgtaatcctcagtcttggatctggtggaaggtgtttgggtcttaggggtggatttctcatgaatggtttggtgctgtcctcatgagaatgagtgagttattgtgagatgtagttgtttaaaagtgtgtggcacctgcccccaccgcactttctctcttgctcctgctctcattatatgtgagatgtctacttcccctttgccttctgtcatgattgttagcttcctgagtccctcaccagaagcacatcagatgctggccccacactttctgtacagcctgcagaaccatgagccaattaaacctctgttctttataaattacccagcctcaggtatttcattacarcaatgcaagaatacctgaacacactgggtttctaatccccttttgtggatttgcttgtgtatctttctgaacgaccttgattatattctatggcttattaatggtttaccaattagaaccacactaatctgtttgatcatgcatgcaatgtgcctgctgaaaaacaaggtttcagggtttcaaatagagagacttacttgtcttaccttttctcacaatcaaccatccctgtataggctctggtgtttcctccaatgtctacagtatgtttgaggaataaagaaaatgaaataacagtcaaggaagaattatgaggcatttcttttttcaaaatatgcaattaaagcaaaaagtacaaaatgcaattttcagatcagtaaggtaatttgtgtttccacagtgcaagtgttacaattattttttaagctcacactgtagtgcttttattcatttactcaaacttgttttgagcccctaatatgtgtcagccaccaaggattacattattagcaaaaactaaataaaaataaaaatagctgggcatggtggctcatgcctgtaatcttagcactatgggaggccaagacaggtggatcatttgatgaaacactgtctctacagaaaatacaaaaatcagccaggcatggtgaccctcacctgtagtcccagctcctcaggaggctgaggtggatggatcacctgaacccgggaggtggaggttgcagtgagccaagattgtgccactgcactgcagcctggctgatagagtgagactctgtctcaaaaaaaaaaaaaaaaggaaatgttgcatgtgttcacgaagctcacaatcaaatgggtgaggccaattgttagtcaaataatctcttaaagaaatctcaccttgtaactgtgacgagaacagagcagtggcccaggtcagtggtgacttatcacagtagaagtggtggccactcaaggaactgatgaaggaactgaaatctgatggatgagcatagctgagcctttgttttcccccaaagtctcagtataattttggaactcacatcaactttggattcagctgatacatgccacgacatcattgaccactgatccttttagaacctttgcacctcactttgggctcagttttcctggtttatttcccat

SEQ ID NO: 714600 - DNA, 629 bp, Homo sapiens
taatgttttataagataaccgggcacaatgacccatcagttctttttctcttgaaagcacatcatgcagacagaatgaagagaaaccattttgagctaatgaatttgatattttcttttaatctacatggttagaatgaattccagctcacatggacttttccatttgtgagagaaacctctaggtagcaaggtttattttaaaattatttcactggggcagagaggaatgaaaaggtggagtgcaggggatttttaaggcagcaaaactattctgtatgattctacaacagtagatacacattattaaacacttgtcaaaacccccaggatgggcctggcgmggtggctcacacctgtaatcccagcactttgggaggccaaggtgagtggatcatttgaggtcaggagttcaagaccagcctggccaacatggtgaaatcctgtctctactaaaaatacaaaaattagccaagtgtggtggcaccctcctgtaatcccagctactcaagaggctgaggcaggagaatcgcttgaacccaggatgcggaggttgcagtgagccaagatcctgccattgccctccagcctaggttacagcgccagactccatctcaaaacaaaacaaga

SEQ ID NO: 714601 - DNA, 1013 bp, Homo sapiens
tacaaaaacaagatactgtcatacaaactgctttgtaagctctttctttctcccagcttccacaaaatttctcaagtcatcagagcaccgtgcggagtgctggccagggccctgctgtggcaaactgctgttctctcctattcttcacattttcatatttcaggtttttcatgatcataggcagccctcccacatccgccttggtgtgtgatgccaagcagctgtcaccgcacgcacacggcctgggcccggcccgcttccaagggctctccgtccgtgcatcttccatagatgcgaatctgcacagcttctgcctcaccctgttaggcggacttggagtaatcagctctaaatccaagtctccaaggtctcagccctggcagcgtgggtgcagggtctggcctgggtgccacctacagagccagcgtgggggccctggcggtgtccactccacacaggcacatcagagctcatgtctcatcccatcttgttctctgactcctcacagttccacctcccaaagctctttcaagtgcatttactttgctccgtctctaactgccaccagcggaccctgcaccccactgctagagaacaaaggcaatgcgtgactccagccgcctgcaccctgggattttttccggccctccttttgtcctcccatgaatgccacgtcccacagggattttcccccagcaccagcatccagcacagcctctagtctccttctgtgtctaagaagcccccattcccaggcagcagcaccaggtctggcctggtcactgcaaagccagtgtccactgcccttggaatggagcctcagttgtatctgaccagcctttrtaagtggctgccacagtgcaaatatccaacagcataattaaagtcacgtatttggaacggcatacaaactgttctgccggtgctactagccagcactttagagtttaacaataggatcagggcctggtgcagtggctcacgcctgtaatcccagcactttgggaggccga

SEQ ID NO: 714602 - DNA, 2897 bp, Homo sapiens
taaatccctgtgctgtcagtatgccaatatccctgggtgccacagtcctcagtgcttggcatgcatgtctgtctgcatgtctctgtgcacctgcatctgcgtgagtccatgtatggagatgtgttatctgcagatgtgtctgcaacaggatgtgtgcatgtctgtgtgtccctgcgcctgtgttcttaacacccgttccaggaagtacattccatcaggaggcgctacggtcagggtgatgctcagaaaagggaaccccatttcccagagattcctgggcactgctcacacccttgacagcagcacacctgcaaagccacggcacactcatcaacctctgtccacctccgatggtgacacacctgcaaagctacggcacacacgtcagcctccgtccacctacaatggtgacggcggggtgcgggagaagacaacaaatggaaaatcagagtaaaaatccatgcagggagccaagcgccaggatatgatgccacttatattacagcagacttttcttttttttttttttttttttttttttctgagatggagttttgctcttgatgcccaggctggagtgctgtggtgtgatcttggctcaccacaacctccgccttccggattcaaacgattctcctgcctcagcctcccgagtagctgggattacaggcatgtgccaccaacgcttggctaattttgtatttttagtagagacagggtttctccattttggtcaggctggtcttgaactcctgacttcaagtgatccgcccaccttggcctcccgaagtgctgggattacaggcatgagccaccacgcccggcctagaggaggctttactactatgtctgcttagaacacaatgttttccctgcttagaatgtttaaaatgatggttaaatttagaaagcaggccttaatttattttgtctatgatataactcagatacagaactgttgaagtaatgcaattactctttataatattatttaaaattttaatcaaaatacatatatatgatacataacataatacatgtatttattctatataattatatatatacatttatagtctatatgtatatattatatattttatatatatatatattwtttttttttttgtcacccacactggagtgcagtggtgtgatcttgactaactgcagcctcaacctcctggactcaagtcatcctcccacctcagcctcatgagtatctgggactacaggtcaccatgcctggctaatttttttttttttttttagacagagtcttgctctgtcgcccaggctggagtgcagtggcgtgatcttggctcactgtaagctccgcctcccaggttcaggccattctcctgcctcagcctcccaagtagctgggactacaggcgcccgccaccaagcccagctaactttttgtatttttagtagagatggggtttcactgtgttagccaggatggtctcgatctcctgacctcgtgatctgtctgcctcggcctcccaaagtgctgggattacaggcgtaagccattgtgcttggccttaatttttgtattttttgtagagacagggtcttgccacgttggccaggctggtctcgaactcctgggctcaaacaatctgcctgccttggcctcccaaagtgccggtattacaggtgtgagccactacgctcggcctctatatttctaaataatacatttctacaacttcttcttgatttatcaagtttagatactgattgactcctgggtaggatttggtggcctctggcccagttctaggaggcagtctctacaccctcatttctgagtgacaggaatgactggtatcacggggccacacctgactttatgctagcaagatgactcaacatggggctggccacaccagaaagacagcatggggttagaggcctggggctgtgtgcctggtgaactcagctgacttcctgggaggtgaagggctggaggctgagctcagctacgtggccagtgattcagtcaactgtgcccatgcaacgaagccccaataaaaactgaacaccacagcccaagtgagcgcccctggctggcagtaccctgaggagcgtcccacctcagagctcggagggtgatgcgtccctgaggacagggaaagctttgcacatggaaacctcccagactttgccctgcacatccttccaacaagcatcctttcctccaattgactataatcgtattagggcacgcccagtgagtactgcgaatgtgtcacctgaagagctggggagggtggatcctgaactgtaacctgctggttagaagtgagggtggccccagggaccccaaatgtgtggctggtgtctgcagcaaaggcagtcttgtggaggactgtgccctcagactctgcagtttgacaatgtcactgcaatcccctaagaggaaaactaagtttcagcaccaatatcctaagcccccactgcacgttgcctcgggtacactgaggttcagctccagccttattttgacctggtcagtgctaggcccaacagtggctcttttcctttgtgtcgatcctgcttgaggtttattgagcttcttgtatctgtgggtttatcgttttcatcaaatctgggaaattcaagggcattaattttgaaatcttttctgccccccgacaacctcttactaggattccaatcacaggcatattagaatcgctgatgtttgtctcagtttgctgaggcccttctcgtttttttcatcatttttttcttttggtgcttcagttcagctagtttccactgttataatctcaaactcactcaactcccgcaaagtctactctgatattcggcccaacaagtaatttttcattctagatactgcatttcagctttaattcact

SEQ ID NO: 714603 - DNA, 2897 bp, Homo sapiens
taaatccctgtgctgtcagtatgccaatatccctgggtgccacagtcctcagtgcttggcatgcatgtctgtctgcatgtctctgtgcacctgcatctgcgtgagtccatgtatggagatgtgttatctgcagatgtgtctgcaacaggatgtgtgcatgtctgtgtgtccctgcgcctgtgttcttaacacccgttccaggaagtacattccatcaggaggcgctacggtcagggtgatgctcagaaaagggaaccccatttcccagagattcctgggcactgctcacacccttgacagcagcacacctgcaaagccacggcacactcatcaacctctgtccacctccgatggtgacacacctgcaaagctacggcacacacgtcagcctccgtccacctacaatggtgacggcggggtgcgggagaagacaacaaatggaaaatcagagtaaaaatccatgcagggagccaagcgccaggatatgatgccacttatattacagcagacttttcttttttttttttttttttttttttttctgagatggagttttgctcttgatgcccaggctggagtgctgtggtgtgatcttggctcaccacaacctccgccttccggattcaaacgattctcctgcctcagcctcccgagtagctgggattacaggcatgtgccaccaacgcttggctaattttgtatttttagtagagacagggtttctccattttggtcaggctggtcttgaactcctgacttcaagtgatccgcccaccttggcctcccgaagtgctgggattacaggcatgagccaccacgcccggcctagaggaggctttactactatgtctgcttagaacacaatgttttccctgcttagaatgtttaaaatgatggttaaatttagaaagcaggccttaatttattttgtctatgatataactcagatacagaactgttgaagtaatgcaattactctttataatattatttaaaattttaatcaaaatacatatatatgatacataacataatacatgtatttattctatataattatatatatacatttatagtctatatgtatatattatatattttatatatatatatattttttttttttttgtcacccacactggagtgcagtggtgtgatcttgactaactgcagcctcaacctcctggactcaagtcatcctcccacctcagcctcatgagtatctgggactacaggtcaccatgcctggctaatttttttttttttttttagacagagtctygctctgtcgcccaggctggagtgcagtggcgtgatcttggctcactgtaagctccgcctcccaggttcaggccattctcctgcctcagcctcccaagtagctgggactacaggcgcccgccaccaagcccagctaactttttgtatttttagtagagatggggtttcactgtgttagccaggatggtctcgatctcctgacctcgtgatctgtctgcctcggcctcccaaagtgctgggattacaggcgtaagccattgtgcttggccttaatttttgtattttttgtagagacagggtcttgccacgttggccaggctggtctcgaactcctgggctcaaacaatctgcctgccttggcctcccaaagtgccggtattacaggtgtgagccactacgctcggcctctatatttctaaataatacatttctacaacttcttcttgatttatcaagtttagatactgattgactcctgggtaggatttggtggcctctggcccagttctaggaggcagtctctacaccctcatttctgagtgacaggaatgactggtatcacggggccacacctgactttatgctagcaagatgactcaacatggggctggccacaccagaaagacagcatggggttagaggcctggggctgtgtgcctggtgaactcagctgacttcctgggaggtgaagggctggaggctgagctcagctacgtggccagtgattcagtcaactgtgcccatgcaacgaagccccaataaaaactgaacaccacagcccaagtgagcgcccctggctggcagtaccctgaggagcgtcccacctcagagctcggagggtgatgcgtccctgaggacagggaaagctttgcacatggaaacctcccagactttgccctgcacatccttccaacaagcatcctttcctccaattgactataatcgtattagggcacgcccagtgagtactgcgaatgtgtcacctgaagagctggggagggtggatcctgaactgtaacctgctggttagaagtgagggtggccccagggaccccaaatgtgtggctggtgtctgcagcaaaggcagtcttgtggaggactgtgccctcagactctgcagtttgacaatgtcactgcaatcccctaagaggaaaactaagtttcagcaccaatatcctaagcccccactgcacgttgcctcgggtacactgaggttcagctccagccttattttgacctggtcagtgctaggcccaacagtggctcttttcctttgtgtcgatcctgcttgaggtttattgagcttcttgtatctgtgggtttatcgttttcatcaaatctgggaaattcaagggcattaattttgaaatcttttctgccccccgacaacctcttactaggattccaatcacaggcatattagaatcgctgatgtttgtctcagtttgctgaggcccttctcgtttttttcatcatttttttcttttggtgcttcagttcagctagtttccactgttataatctcaaactcactcaactcccgcaaagtctactctgatattcggcccaacaagtaatttttcattctagatactgcatttcagctttaattcact

SEQ ID NO: 714604 - DNA, 542 bp, Homo sapiens
tctgccacagggaagagatgtatcaatctttgctaaaatgtcagctaaaaaagaaatatggtactaaccatctcagggatagctggaatttcaatggggattcatcaacaatttaagaaaaaagcctaaagacaccaaaataatccacatctgatggtagaatttcagatactctgaaaaagaaactgatgaaatataccaatttttgtaggcacacatgggcacacatacacacataagaaatacataaargaaagatcacacacacaaatgtaattacaaaagaaagtgtatctggagcacataaatcaagaagtacatatgtgctctcttgctttggaaggatcaggacttgggtagcaatcacagacattcgtaagactattgcttacctccaaatacccatggcaggtcgggcgggggtgggtgggcgttggggggggggttactccagtctcttatcactccagatagcttgggcccttgagcccaaaagccagtcttctgtcagtgtgcttctctgtgtacaccagggttgcata

SEQ ID NO: 714605 - DNA, 641 bp, Homo sapiens
ggtcaagagttccagactagcctgactaacatagtgaaaccccctctctactaaaagtacaaaaattagccaggagtggtggctcgcgcctgtagtcccagctattcgggaggctgaggcaggagaatcgcttgaacctgggaggcaaaggttgcagtgagccgagatcacgccactgcactcyagcctgggcactgagcgagactctgtctcaaaaaaaaaaaaaaaaaaaaaaaaaaagaaaagaaagaaatagaaaagaagtagggtaaaggaaactcctattgtttgacagcctcctgtgtgcatttaagcaccatagaaaccttaggagagatttcttattttcattttcaagcatgacagttgtgaaactgtggccctcagagtattttatttcatattgctattttttttatgtccaagatcacacaattggtagttaacggaactaagtttagaatagagttatttgtatctgacttcaaacaggcaacaatacccttagctccatgtcctgctggagattttcttagttcaggaacatttcttttctctttaagataaccttcactatttacaatttttgagcaccataatttccttaaaaagcattacctcacactcatatcctactactg

SEQ ID NO: 714606 - DNA, 397 bp, Homo sapiens
catgtcgaattaatgaaaaacaaagttaaacatttcagaacctgcaaaagggttcagttccagaaatgagcaaaggtttgggaagagtcttattttttaagtgaggtttattcatcctccgtagacacaaaaataagtctttcaaagaacatgaatatttgaggcacttggcaacatgcagtctttggcaacctctcccttatttataccatgtaattatacttgcctttatatgtgtgtccttttcgttwttgagcctaacatggtcttttgtcaaattccagttattgattagcactggcaactctgaaatgtggctgtttatacctcaataaatctctctccccccccccccttaaatcacagcagatcttgttggacatttggggagaaaaca

SEQ ID NO: 714607 - DNA, 397 bp, Homo sapiens
catgtcgaattaatgaaaaacaaagttaaacatttcagaacctgcaaaagggttcagttccagaaatgagcaaaggtttgggaagagtcttattttttaagtgaggtttattcatcctccgtagacacaaaaataagtctttcaaagaacatgaatatttgaggcacttggcaacatgcagtctttggcaacctctcccttatttataccatgtaattatacttgcctttatatgtgtgtccttttcgtttttgagcctaacatggtcttttgtcaaattccagttattgattagcactggcaactctgaaatgtggctktttatacctcaataaatctctctccccccccccccttaaatcacagcagatcttgttggacatttggggagaaaaca

SEQ ID NO: 714608 - DNA, 1617 bp, Homo sapiens
gttgagagtccgtgatcctggagaagcctggtattctgactcccagaggtcctgcttcttgtgcctgctgagaagtcctgtttctctggcctcatgtcctggttgagattgggtctcactgggatagcatgacctggccacagatggctcattagaactgtgttgagccatcagtctctcaggagcactmcctgtcattctaaaaaaaaaaaaaaaaaaaaaaaaaaaaaaaaaaaaacccgcaccctctttgtcttctttttgtctttattttcccttttagagactccctagtctctgagggcctgctgaaagcagcagatagaacatttgaggcagacacctgagtttatatcccaggctagctgtatgccttgagcaatgcacttaagctctctgagcctatttgttcttctgcaaagtgggggcaatagactccccctcatggcattattatacaaattgaataagagatggaatatcattcatttattcagtaaatatttcctgagcacctcctatgtgttggtcaccctcctagatgttaggaatacatcagtgaacaaaacagatcagcacctgttgcattctagtgccctgttttaaattggaatgtgtgtattttaactgaaatctgagggaaggtattgctacatcctcatagtccattcctcttctctggacagaatacctctactcgctatccagatgtggctatatatgaagaggggaaaagagagggagacaaatatgaacatttaaggagaaccacttctcctaaattacaccttttagttctcaccaatggtgtaggtatcgctgtccctactttccacataagtagatgaaagccctagaagcttgcggaacttgcccaaggtttcacagcccatgagtagcaaaaccaggatttgaaccacagtcttctgactctaaagacctgcctttgggttccatcaagctgctgcatatagcacattcactttgtcacccatctcagtattaataactctgggaccccaagccagagagcaattctgtaatggatttgtgttgggtggggtgaggagtggcaaatggggggtcagcatgcaggtgcttgtgtttgtgtctgctgagtctgtgtatgtgtgtggggtttcaacgacagggatctcagtagggaattggtatttgggctgctaaataaccacaatttgtattaagcagaaacatagtcattatgcaccacgtgcgggctgctgctgctcactcccattagggaagagcgcagctgatggcactttggcctgtggtcttgtgaaaagcttccaccaggggtcctgagatggccttctggggacaggatattgggaggaggtggtaggggagtaagaagagcagggcgctagggcatatggacctcaatttcaggagacgtgctccttgcctcctacctctatgggcctctcatcagtaaggccattctggttctcattaacgcaagtaaatacgcatcccagcactgggcaggggacacgtgttgatatttaattatatagtgtgcactgagcatattatggctcctccagggaatggcagctgcagacaatgaggtgcaatggagtacattcaaaa

SEQ ID NO: 714609 - DNA, 635 bp, Homo sapiens
tctttctaccgtaaagacacatgcacacatatgtccatcgcagcactattcacaatggcaaagacatggaatcaccctaaatgtccatcaatggcagattggataaacaaaaggtggcatatacaccatggaatactatgcagccataaaaagaatgagaccatgttctttgcaggaacaggatggagctggaggccattattgttaagaaactaatacaggaacagaaaaccaaatatctcatgttctcacttataagtgggagctaaatgatgagaacacaaggacacaaaaaattacagtatgtttctccattttcaattctttgctctctgaaaaatgtcttgtgaaccaggttaaggcaaaaattgaacccagacttctgtttaataggtttttaatcttttgattttttcagacaataaaataagaaaatcatttttgtaatctctgtagagtctttcccttgtcatggtgaaacatttcggttagtaaattaatacagtctgcgtatctcagaatatgttttacaaatattatytgaatcagctgcatatgtataaacagttattcttgtctgaaatcaagtgtttctgtctacctaatatgagaagaaacatttaagtaaatgtgta

SEQ ID NO: 714610 - DNA, 642 bp, Homo sapiens
aatgtataagattatttcagggagtagcagctctttatttgtagtttactcctgacatcaaaccaattggcctggatgacataagacagaaaacctggaacaggttttccttaataatgacttttagtgattaattacattttactaagataactgcaggcttccctgaatcacacatctgtctttaattagtttaacctactatttttctaaaggataaagtgacttgtttgaagtcacatatatatttagtggattactggttttaggagtcctgtgttcctattttccagcctattgagatttagaatttaatgccctgttctctgttgtttatactaggaagtstgaggtatttttccctaatttggttccgaaagtgtgttgaagaatactccagcaaaaagaagcagttatgatttatgttcacaataataaataactcccctttgaattatgggttttattgatagcagttacctaattttctgtcattttttgacagatggggaagagatggttattagcttcataaaaataatcatgaaattcagtattaaaatatttattggacttcattcagaagtctcaacaggataaattttattggcaaagtttgtttgttgcaaactctacaaagct

SEQ ID NO: 714611 - DNA, 1753 bp, Homo sapiens
atttttatttttaaattttgagacggagattcactcttgttgtccaggctagagtgcaatggtgcgatctcagctcactgcaacctctgcctccttggttcaagtgattctcctgcctcagcctcctgagtagctgggattacaggcctggccaattttgtatttttagtagagacggggtttctgcatgttggtcaggctggtctcaaactcctgacctcaggcgatccgcccgcctctgcctcccaaagcgctaggattacaggcatgagccaccgtgcccacctcggatatgactctttctagctctctctgaaaagccatgcacttgttctacttttagtatattggtatgcagaattgaagttacaatgtcacatatcttatacaatgcctagttaagcatatattaattacatactatttgtttttgaaaatcagtgtaggcaattgaaagaatccttgctctggagccagagcaggcttaaattctgcctttgccactactgcataagactatggaaaactagtttgtttgttttttctgggtctcagttttagcttttcctggctgaaaaagtgaataatagtgctcccatgtgatagtaataaatgttagattgatttaatgaaatacatgtcaaacaccacgttaatatttggacttgcaggtgacaattaatagctgattgctgtctttaatattgttttgtgaagttggaaaatgcattggcaaatatatttacagaagtcaatttttcatacttcatatcaaaatctaaatattcccaaaatcttagctatattgggagtcatgagtaatcatgtgactaatcattttatttatagtaaaaatatgtgcaaattggatagagaatatctcatctctggaaatagaagcctcagcaactagtctgtctggttgtagttgctattcaaaggttagtctccatcatcatagatctccaatggaataaaaagggtctcttttttcttacagcactcatctttctatatccctctctttcaaattatagccatgactctcaatgttgaagtaattcrgaagcaagatagtaatcagtgaaatttcattaaacaaagaattcataaaaatgtacctgttgccctaagtggcagtttaaataacaacaaagagcaaaatgtaaagaaatataaaaatacatctattttatatgcagctgtttaataacccatacacttaatgtatgtcaataaagtcaatgacaaaatgattactaattcctttaaattgagtacatgtctttaaaaggtaatatctcaaacaataaatcataaagccaaatatacataggaaaacttgtcaaacaaattaaaaataggctgggcattgtggctcatgcctgtaatcccagcagtttgggaggccaaggcaggtgaatcacctgaggtcaggaattcgagaccagcctggccaacatagtgaaaccccacctctactaaaaatgcaaaaatttgccagctatggtggttcatgcctgtaatcccagctactcaggaggctgaggcaggagaactgcttgaactcaggaggcagaggttgcagggagccgagattgtgccactgcactccagcctgggcaacagagcaagactccctctcaaaaaataaataaataaataaataaataaataaataaataaataaataaatattaacagaaaaactagtacaaacaatgggattccactttcctttcatcaggtttaa

SEQ ID NO: 714612 - DNA, 1753 bp, Homo sapiens
atttttatttttaaattttgagacggagattcactcttgttgtccaggctagagtgcaatggtgcgatctcagctcactgcaacctctgcctccttggttcaagtgattctcctgcctcagcctcctgagtagctgggattacaggcctggccaattttgtatttttagtagagacggggtttctgcatgttggtcaggctggtctcaaactcctgacctcaggcgatccgcccgcctctgcctcccaaagcgctaggattacaggcatgagccaccgtgcccacctcggatatgactctttctagctctctctgaaaagccatgcacttgttctacttttagtatattggtatgcagaattgaagttacaatgtcacatatcttatacaatgcctagttaagcatatattaattacatactatttgtttttgaaaatcagtgtaggcaattgaaagaatccttgctctggagccagagcaggcttaaattctgcctttgccactactgcataagactatggaaaactagtttgtttgttttttctgggtctcagttttagcttttcctggctgaaaaagtgaataatagtgctcccatgtgatagtaataaatgttagattgatttaatgaaatacatgtcaaacaccacgttaatatttggacttgcaggtgacaattaatagctgattgctgtctttaatattgttttgtgaagttggaaaatgcattggcaaatatatttacagaagtcaatttttcatacttcatatcaaaatctaaatattcccaaaatcttagctatattgggagtcatgagtaatcatgtgactaatcattttatttatagtaaaaatatgtgcaaattggatagagaatatctcatctctggaaatagaagcctcagcaactagtctgtctggttgtagttgctattcaaaggttagtctccatcatcatagatctccaatggaataaaaagggtctcttttttcttacagcactcatctttctatatccctctctttcaaattatagccatgactctcaatgttgaagtaattcagaagcaagatagtaatcagtgaaatttcattaaacaaagaattcataaaaatgtacctgttgccctaagtggcagtttaaataacaacaaagagcaaaatgtaaagaaatataaaaatacatctattttatatgcagctgtttaataacccrtacacttaatgtatgtcaataaagtcaatgacaaaatgattactaattcctttaaattgagtacatgtctttaaaaggtaatatctcaaacaataaatcataaagccaaatatacataggaaaacttgtcaaacaaattaaaaataggctgggcattgtggctcatgcctgtaatcccagcagtttgggaggccaaggcaggtgaatcacctgaggtcaggaattcgagaccagcctggccaacatagtgaaaccccacctctactaaaaatgcaaaaatttgccagctatggtggttcatgcctgtaatcccagctactcaggaggctgaggcaggagaactgcttgaactcaggaggcagaggttgcagggagccgagattgtgccactgcactccagcctgggcaacagagcaagactccctctcaaaaaataaataaataaataaataaataaataaataaataaataaataaatattaacagaaaaactagtacaaacaatgggattccactttcctttcatcaggtttaa

SEQ ID NO: 714613 - DNA, 1753 bp, Homo sapiens
atttttatttttaaattttgagacggagattcactcttgttgtccaggctagagtgcaatggtgcgatctcagctcactgcaacctctgcctccttggttcaagtgattctcctgcctcagcctcctgagtagctgggattacaggcctggccaattttgtatttttagtagagacggggtttctgcatgttggtcaggctggtctcaaactcctgacctcaggcgatccgcccgcctctgcctcccaaagcgctaggattacaggcatgagccaccgtgcccacctcggatatgactctttctagctctctctgaaaagccatgcacttgttctacttttagtatattggtatgcagaattgaagttacaatgtcacatatcttatacaatgcctagttaagcatatattaattacatactatttgtttttgaaaatcagtgtaggcaattgaaagaatccttgctctggagccagagcaggcttaaattctgcctttgccactactgcataagactatggaaaactagtttgtttgttttttctgggtctcagttttagcttttcctggctgaaaaagtgaataatagtgctcccatgtgatagtaataaatgttagattgatttaatgaaatacatgtcaaacaccacgttaatatttggacttgcaggtgacaattaatagctgattgctgtctttaatattgttttgtgaagttggaaaatgcattggcaaatatatttacagaagtcaatttttcatacttcatatcaaaatctaaatattcccaaaatcttagctatattgggagtcatgagtaatcatgtgactaatcattttatttatagtaaaaatatgtgcaaattggatagagaatatctcatctctggaaatagaagcctcagcaactagtctgtctggttgtagttgctattcaaaggttagtctccatcatcatagatctccaatggaataaaaagggtctcttttttcttacagcactcatctttctatatccctctctttcaaattatagccatgactctcaatgttgaagtaattcagaagcaagatagtaatcagtgaaatttcattaaacaaagaattcataaaaatgtacctgttgccctaagtggcagtttaaataacaacaaagagcaaaatgtaaagaaatataaaaatacatctattttatatgcagctgtttaataacccatacacttaatgtatgkcaataaagtcaatgacaaaatgattactaattcctttaaattgagtacatgtctttaaaaggtaatatctcaaacaataaatcataaagccaaatatacataggaaaacttgtcaaacaaattaaaaataggctgggcattgtggctcatgcctgtaatcccagcagtttgggaggccaaggcaggtgaatcacctgaggtcaggaattcgagaccagcctggccaacatagtgaaaccccacctctactaaaaatgcaaaaatttgccagctatggtggttcatgcctgtaatcccagctactcaggaggctgaggcaggagaactgcttgaactcaggaggcagaggttgcagggagccgagattgtgccactgcactccagcctgggcaacagagcaagactccctctcaaaaaataaataaataaataaataaataaataaataaataaataaataaatattaacagaaaaactagtacaaacaatgggattccactttcctttcatcaggtttaa

SEQ ID NO: 714614 - DNA, 1753 bp, Homo sapiens
atttttatttttaaattttgagacggagattcactcttgttgtccaggctagagtgcaatggtgcgatctcagctcactgcaacctctgcctccttggttcaagtgattctcctgcctcagcctcctgagtagctgggattacaggcctggccaattttgtatttttagtagagacggggtttctgcatgttggtcaggctggtctcaaactcctgacctcaggcgatccgcccgcctctgcctcccaaagcgctaggattacaggcatgagccaccgtgcccacctcggatatgactctttctagctctctctgaaaagccatgcacttgttctacttttagtatattggtatgcagaattgaagttacaatgtcacatatcttatacaatgcctagttaagcatatattaattacatactatttgtttttgaaaatcagtgtaggcaattgaaagaatccttgctctggagccagagcaggcttaaattctgcctttgccactactgcataagactatggaaaactagtttgtttgttttttctgggtctcagttttagcttttcctggctgaaaaagtgaataatagtgctcccatgtgatagtaataaatgttagattgatttaatgaaatacatgtcaaacaccacgttaatatttggacttgcaggtgacaattaatagctgattgctgtctttaatattgttttgtgaagttggaaaatgcattggcaaatatatttacagaagtcaatttttcatacttcatatcaaaatctaaatattcccaaaatcttagctatattgggagtcatgagtaatcatgtgactaatcattttatttatagtaaaaatatgtgcaaattggatagagaatatctcatctctggaaatagaagcctcagcaactagtctgtctggttgtagttgctattcaaaggttagtctccatcatcatagatctccaatggaataaaaagggtctcttttttcttacagcactcatctttctatatccctctctttcaaattatagccatgactctcaatgttgaagtaattcagaagcaagatagtaatcagtgaaatttcattaaacaaagaattcataaaaatgtacctgttgccctaagtggcagtttaaataacaacaaagagcaaaatgtaaagaaatataaaaatacatctattttatatgcagctgtttaataacccatacacttaatgtatgtcaataaagtcaatgacaaaatgattactaattcctttaaattgagtacatgtctttaaaaggtaatatctcaaacaataaatcataaagccaaatatacataggaaaacttgtcaaacaaattaaaaataggctgggcattgtggctcatgcctgtaatcccagcagtttgggaggccaaggcaggtgaatcacctgaggtcaggaattcgagaccagcctggccaacatrgtgaaaccccacctctactaaaaatgcaaaaatttgccagctatggtggttcatgcctgtaatcccagctactcaggaggctgaggcaggagaactgcttgaactcaggaggcagaggttgcagggagccgagattgtgccactgcactccagcctgggcaacagagcaagactccctctcaaaaaataaataaataaataaataaataaataaataaataaataaataaatattaacagaaaaactagtacaaacaatgggattccactttcctttcatcaggtttaa

SEQ ID NO: 714615 - DNA, 1106 bp, Homo sapiens
gcccattcttagaaactcaacacaaaccagtgtattacaagcatgattattagaggtacacccacacgtgcatacacacagtctctctctctaaatagagcactttttatatattttctatttcctttatattcaccccaacacttattatttaaaattttgtctaggctcttgttaaatgatatctcacatttgatctgatttgcatcattttaatacttatgttttgcatttctaaactgcctaattcatgtcattggataattaatactaaatttcataatatttttcttattggtttacaagagtttttcattttttgctagttttatacattgtaaatattatcatacaatcattaacctagaaaaacacatcttactttgtgttttacctttgacattcaaatcattattctgtgtaatacttattttaaatatgtgcactcagtgatgttcatttttactttttatatggtgagtcaatttctaagcattatcttccaaataaccctatttttctgtgatttgtttttaaaattttactataaaatttatttcaaatataaaccataatgcaatgtacttctttgtacttattacctagctttaataatcatcaatgcatgaacacatttttatatataaccctcaaatactcaaccacgtcttcatcccctcttgatcctaagacaaacataaatcttatgtcacttcatcgacagtgagtaatcattaatatrtatttctaagatataggtttctataaaccttaacataatctaatattgatttgttatttatattttctcaaatatacatttttggtgctttccaatgtttgataaatccagataagaaatccctgtgtcttacatttgattaatatattgcttaaatcctttaatatctgtaatataatttttgaaaaaatcaggtcattgattctgtagactttcctgactctggattttattttatacaacaccatttaatatattcttctatcccttgtatttcttatacaatggtagttaagtttacagccttcatcatacgaggttcaatttcggtaagaatactgcttaggcagtgatgtgtacttcc

SEQ ID NO: 714616 - DNA, 1686 bp, Homo sapiens
cctcccctgtggctcactctatatggccgatgccttcctttaaagagttcaaactgtagcaccttcatcacacctttggtttttgagctccaacagagcaaggtgattcaactttggaaatagaatgacagagagagactgggtgcagtggctcatgcctgtaatcccagcattttgggagaccaaggtgggaggactgcttgaatccaggagttcaagaccagcttgagcaacatagtgagacctcgtctctacaaaagacaaacaaaattagcaagcgtggtggtgcgtgcctgtagtcccgcctatttgggaggctgaggtgggagaatcatttgaacctgggaggtcgaggctgcagtgagtggagattgcaccactgcattccagcctgggtgacagagcaagaccctgtcacacacgtacacacacgcaaaaatgacagagaggcagaattctcctaagtggaaatgaaatacagaataccatgatttagttttcctgtagttctttccctaacgtttgacaatagctttccttttgggtgatcagtgtcctttggttttacctcatagccctgtgaggttgccgtgttgagtcttgttttcataccacattgacggtcctttctagtggcctgaaggtttttgttattattttgaaaagctttattgatatataattcacataccatacagttcactcatttgaagtggacatttcaatatttggaagcctattcacagcatatgcgcaaccattaccacagccaattttaggataattttttctttctgttttttactgtggggttttgcagtgaaaaccagaaaacctgctagacaaattccaaaagagctgtaacacgcgatttcagaacrtttaatcacctcaagaagaaacctgaaggatccttccgtcgccgcctctatctctgtcccctccagccctcagaaacaactaatctatgttctttctttaaaaaaaaaaaatctttgaagccttcataaatcagccctttgatttaaatctccatctcactccgccactatttttgatcaattcttcaccagagcttcatcttgacatgtgctctgccacagtgctaaggaacagagtgaccccccaccccactcccgacagaagcagccccagagagagaagcagagggtcagggtcagggtcagcaccgagtgtgctcgggtgaactgcaagtcttgacttagtcttgaggacctcctcagtcttgcaccccttccttcagcaacacctgccgggatgcgtctttcggcctcctctgaaatacaaaaacattttgtggtctagctgctcactgtattttcactctgtggttttctttaatttacacccctcttctactctgctggccttcaggatttttttatttttattcaccacactcatcagggaacaaatgcataatccttcatctggcttctgctgtcagtcagtttgaatcttggttgccttctcagccataaactttatcacctggcctcatgccttcggctttgtccttgattttggaagcgcagtgaatcaacattatttatctttgcagaaggcagtatcttaaccaccacatagtagcattaatctgtcacatcgtcccgaacatgcaagacactatttgttattgaagaggagacttctttatggaaggat

SEQ ID NO: 714617 - DNA, 1360 bp, Homo sapiens
ccaccccgtctgggaggcgtacccaacagctcattgagaacaggccatgatgacaatggcggttttgtggaatagaaaagggggaaatgtggggaaaagatagagaaatcagattgttgccgtgtcttgagtagaaaaaagtagacataggagactccattttgttctgtactaggaaagattcttctgccttgggatgctgttgatctatgaccttgcccccaacccggtgctctctgaaacatgtgctgtgtccactcagggttaaatggattaagggcggtgcaagatgggctttgttaaacagatgcttgaaggcagcatgctccttaagagtcatcaccactccctaatctcaagtacccagggacacaaacactgcggaaggccacagggtcctctgcctaggaaaaccagagacctttgttcacttgtttatctgctgaccttccctccactattgtcctatgaccctgccaaatccccctctgcgagaaacacccaagaatgatcaataaaaaaaaaaaaaaaaaagaagaaaagaaaagggccccaaagtgacgtcagccccatctcaaattcaaaccccatagtaaacgaacaagatagaccttaactactgactaattctccaaagcaaaaagtcaggaaaataaaaaaatctcgttaagctgtaaaaaataaaaataaaaataaaaatacatatccaggtacatactctttctttctttgagacagaggctcgctctgtcacccgtgcagtggcagtctcggctcactgagatctcagccttccaggctcaagcaattcttcggcctccacctccgaagtagctgggactacaggcactcaccactatgcctggctaatttttcgtagagatggggtttcgccatgttgsctacgctggtctcaaactccttaccgcaagcaatctgtccacctcggcctcccaaactgctgagattacaggcgtgagggattgtaggcgtgagggattacaagcatgagccaccgcgccctgctatattacttatttcttaaacacctgcaattcattaaaatacaccatgtataaattataaatcataatattatcaagaactgttatttctaagtgctgaataaatgaatatttccactcattaaaaaaaaaaaaagttgtccgttcaaagccagtgtcaagtaccaaaaaaagaaaattatcttgcggcagataatgagaaataatgcaggagaggaaagaggaactttaaaggctgtacgtgtaggattttctttttctctctcggaggaaagaacagcaaaaagcgaagagtgggaaatgctggacttaaattcctttctttaggtttacga

SEQ ID NO: 714618 - DNA, 1360 bp, Homo sapiens
ccaccccgtctgggaggcgtacccaacagctcattgagaacaggccatgatgacaatggcggttttgtggaatagaaaagggggaaatgtggggaaaagatagagaaatcagattgttgccgtgtcttgagtagaaaaaagtagacataggagactccattttgttctgtactaggaaagattcttctgccttgggatgctgttgatctatgaccttgcccccaacccggtgctctctgaaacatgtgctgtgtccactcagggttaaatggattaagggcggtgcaagatgggctttgttaaacagatgcttgaaggcagcatgctccttaagagtcatcaccactccctaatctcaagtacccagggacacaaacactgcggaaggccacagggtcctctgcctaggaaaaccagagacctttgttcacttgtttatctgctgaccttccctccactattgtcctatgaccctgccaaatccccctctgcgagaaacacccaagaatgatcaataaaaaaaaaaaaaaaaaagaagaaaagaaaagggccccaaagtgacgtcagccccatctcaaattcaaaccccatagtaaacgaacaagatagaccttaactactgactaattctccaaagcaaaaagtcaggaaaataaaaaaatctcgttaagctgtaaaaaataaaaataaaaataaaaatacatatccaggtacatactctttctttctttgagacagaggctcgctctgtcacccgtgcagtggcagtctcggctcactgagatctcagccttccaggctcaagcaattcttcggcctccacctccgaagtagctgggactacaggcactcaccactatgcctggctaatttttcgtagagatggggtttcgccatgttgcctacgctggtctcaaactccttaccgcaagcaatctgtccacctcggcctcccaaactgctgagattacaggcgtgagggattgtaggcgtgagggattacaagcatgagccaccgcgccctgctatattacttatttcttaaacacctgcaattcattaaaatacaccatgtataaattataaatcataatattatcaagaactgttatttctaagtgctgaataaatgaatatttccactcattaaaaaaaaaaaaagttgtccgttcaaagccagtgtcaagtaccaaaaaaagaaaattatcttgcrgcagataatgagaaataatgcaggagaggaaagaggaactttaaaggctgtacgtgtaggattttctttttctctctcggaggaaagaacagcaaaaagcgaagagtgggaaatgctggacttaaattcctttctttaggtttacga

SEQ ID NO: 714619 - DNA, 285 bp, Homo sapiens
attacctacaggttttaattacttaaaacatttgtggcactatggaggtcacctgaaacgcctcatttacattaataaaacttgtaagaataaatatgaagcaaaaaatagaaaaaaatgttaaraaagaatgaaattcaccattatatttcaacaaaatttatatacgtatatatgtatgcatattatatatgtagcaatattaattatttgcagaggaatttaattttataaacattgttcaaataagcctagagatattttaattgggattgctttgtataa

SEQ ID NO: 714620 - DNA, 1057 bp, Homo sapiens
tgagagcaggttcccaattgttcagccccatgatttttctagtgtcacattatacctcttcacacacctcccgccagaagccatcttttgcttaatcatctcataagtatataccatgccagacactctagccttccatcagcaataagtaaaatgcacgctctcaggaaaagtgcacaaactattttaaaaattccaatgccatcaacttattccacattctaagtttgctaaaatccccaattcctactccaattccctaaaaaggagcaaaggaagaaaagagaaaaaaaaaagaaacaaagaaaagatggttctctaaatttctaatattttttttctggtggcacaaattcattttctttgtcttataattcttatatgtttctgcctctccctttgctttacactcttcttgttccctcttttctctctacctatatctgttgtattttaataagacatataaagaatgagatatccttaaatgactttttaattaatagattttttcagagcagtttagatttacaaaaaaattaagcagaaagtacagagagtttccatataccctctccaacctaccctccyttattcccagttttctgattattaacatcttgcatttgtgtggtacaattaatgaagcaatattgatactttattgtcaactaaagtctatagtttacattaagattcactctttgtgttgtacagttctatgagttttgacaaatgcataatatcatctatctaccattataattttatacaaaatagtgtccctgccctaaaaatcccctaaaaatctctcctctccccttctccatcccccatcaaacacacgacaacctctgatctttttactctctacaattttgtcttttccagaatgtcatatagttggaatcatatagtatatagccttttagattggtttattttacttgcaatatgatctagtttccttcatgtctttttgaggcttgatagctgatttatttttatcattgaatgatagtttattatatgaatatgccatcatttgtttatccat

SEQ ID NO: 714621 - DNA, 1057 bp, Homo sapiens
tgagagcaggttcccaattgttcagccccatgatttttctagtgtcacattatacctcttcacacacctcccgccagaagccatcttttgcttaatcatctcataagtatataccatgccagacactctagccttccatcagcaataagtaaaatgcacgctctcaggaaaagtgcacaaactattttaaaaattccaatgccatcaacttattccacattctaagtttgctaaaatccccaattcctactccaattccctaaaaaggagcaaaggaagaaaagagaaaaaaaaaagaaacaaagaaaagatggttctctaaatttctaatattttttttctggtggcacaaattcattttctttgtcttataattcttatatgtttctgcctctccctttgctttacactcttcttgttccctcttttctctctacctatatctgttgtattttaataagacatataaagaatgagatatccttaaatgactttttaattaatagattttttcagagcagtttagatttacaaaaaaattaagcagaaagtacagagagtttccatataccctctccaacctaccctcccttattcccagttttctgattattaacatcttgcatttgtgtggtacaattaatgaagcaatattgatactttattgtcaactaaagtctatagtttacattaagattcactctttgtgttgtacagttctatgagttttgacaaatgcataatatcatctatctaccattataattttatacaaaatagtgtccctgccctaaaaatcccctaaaaatctctcctctccccttctccatcccccatcaaacacacgacaacctctgatctttttactctctacaattttgtcttttccagaatgtcatatagttggaatcatatagtatatagccttttagattggtttattttacttgcawtatgatctagtttccttcatgtctttttgaggcttgatagctgatttatttttatcattgaatgatagtttattatatgaatatgccatcatttgtttatccat

SEQ ID NO: 714622 - DNA, 796 bp, Homo sapiens
atggatagatagatgatagatagatagatagatagatagatgattgatwgatagatagatagatagatagatagatagatagatagatgatagacagacagagattatgtctatcactattagacctggctctaaagtagtaaggtagatgtgtgcacatgtatgcatgcacgtggggcaaaggggaggcaggtgtatgtgtgagggagtgagaaagagacagagaatatcctaggcattccaatttgttggtggagtgtgattttatttctcaccaaacaaaggaagcaaatctaacaggctgtgcatgctacaacttccactcttgtcaggaaaatttctcagtttcagtcttgattggaagcagaaatttttttgaagcacagatgatttgtcagctggaaggcagaaggtctcttgggacacaccacaagaatgtctttcctccatccaggagtcacacagtcttgtcatcatctctgctgctgcaaaccagccaacacggttagatgtacagacttgtgaacactttcaattggatttttgagaaaaaggttaccctccaaactggtcaatttgttcctaagcttcaagctctctctcccttccccatccaaaacacttccttctttttctgcttccactagtctttatttcattattctctccctcagacccctctctgcctctataaagataagcaattattttaagcttcaaacaagatgctgacccttggggggccttcaaatgcagaaagtctgggagaagatggaggatttgcagatcaacagct

SEQ ID NO: 714623 - DNA, 644 bp, Homo sapiens
aatgtttcactcagagaattcactagaagacgaatcacatatactcctttttcctcctttgaacagctagtggtcaaaagttctagagtgcagcttagggccattcctggcttgatttgctcagtgaccacaagaatagtttcactacctgttctttagtctcaacaagcagaaataataattccacttcctttatgggcaagagtattaacatgaatgtgttggtaaaacaatttgatgtttcaaatgatcaaaaagagaggaagagtcaaactgtgagtactggaaggaaaagtaaggtgatrtaccctgaatatttgttccctccaaatctcatgtcaaagtttgatccccagtggtggaggtggtgcctggtaggaggcatttgggtcctcggggcagatcccttatgaatgacttgctgccatcctcttggtaatgagtgagttctcgctctattagttcatgcgagaactgattgttaaaaagagcctagcacctcttcttttctcttgcttccctcctctcgccatgtgatacctgctccccttcactttctgccttaagtggaagcttcctgaggttccttgccagaagcagatgctggtggcaaccttcttatacagcctgcagaactgtgagcc

SEQ ID NO: 714624 - DNA, 635 bp, Homo sapiens
cagggtcttgctctgttgcctaggctggagtgtagtgacacaatctcagctcattgcaacctcttcctcccagtctcaagcaatccttccacctcagcctcctgagtagctgaaaatacaggcacacaccaccatgcacagctaatttttgtatttttagtagagacagtgttttgccatgctgtccaggctgktctcaaactcttgggctcaagtgatccacccaccttggcctcccaaagtgctgggattacaggtatgagccaccgtgcccaggctctgggtttttctcataggactggctttctagttgtgtaatcatttctgttgctgacctcaataaatgaatgcatttgttaattatatagctgtgtattacatcatactaaattaaatatgctttgttcatcactcttagcagctcttaaagtgtacacaattttcccatattcttttacattttaaactcatgctgtacaaaatttaggcaagagtaagccatcaatgctttacacaatgtctgttatgccaaagcattgcttgcagcattcatcatttgctaaaaacttctcaactgctccagtgtcctttgtctgaaaactcttggatttggaaataacacttttttttttttt

SEQ ID NO: 714625 - DNA, 572 bp, Homo sapiens
tgaaaaataaactgttggagtacaaaaataaagtattccctcctcaatatggaaccactcctctgatttacggtgtatgcattttagattaaacgatgctggtattgatrgcaaagaatgcatctgtgtcttcagtaagatggagctttctgagagtcactaggagagtcttactaacagctgtagaaagccaagaaggggcttgaaactttcttagtgctaagtaaagaccagctctagatatactggtcacctggtaagcatccaataaatacctattgagtgactggaaatggcatggccacatttcaccattttcattccaatgacataaacagtcatgatcctgccacaagatgactgttcaaacacctgaattaatgattcttatctctattgcttagaccactacttcctaacctgtgcattaactactacctgattctctccccagcccactagtgcccctctcccctgacagtaactctctgcagggcccagaggtgacagaggcagagtctaggctctccttctgcttatcccacatctgcctctcttgctgccacccctgc

SEQ ID NO: 714626 - DNA, 907 bp, Homo sapiens
cccttgtctgacatgctttgtaccccagatgttcactgattacactaccgccatttacccataaaattcctttctcctgatttcaaagacttgttaagagcttgattaacccatcacaaatagctaaggtattgaacattgtaaatgtaaataaggtaaatgttgaatgggtcataccccccccaagataattgtattcttagagagagctttaatgattttactctgaggaatgagcagtagaagactatcaggaaacaagataaaataaaatggggctcagaattatcactcaattttaaatgtgcatgaaaaaacgggggtggaaaagaaacatggaagcctgaaagggctccaggctgattcatctaagtggaagtctaacacacacacacaccccttcaaagtgagaaaggtttcagaaacttctcccttcacccagccataacccattgaaatacataagaaatctcactgctgcaggtgaagaactagatctcagtcccgctcccttcgaacaacacagggcagaagttaaacaatcagtcattgcccaggcttgcaattgctgtcaaaagagtcctatttgattggggtgaaccacaaccttttagtactgatgatgctgrcataatcttaaggtgcagaaagcactggcttaaagcctggcaggggatgaggataaaaggcattccttttacaaattttgacatcattagaatgcacaatgctccacaaacacttttccttctacgactttgtgcaaaacctgagaagtacagcgcaaaatcctgggagtggaggaatggaagccttggtcctcaagtgcttcatatcacaaggttgtcctagtgaggagtagatctggggcacaagtcctatggctttctgtggtgctactggcaaa

SEQ ID NO: 714627 - DNA, 804 bp, Homo sapiens
tgatggtgcatgcttgtagcccagctacttggaaggctgaggtaggagaatcacttgagcccaggargtcaaggctgcagtgagccatggttgcactactgcactccatacctgggtgacagagtgagacacagtatcaaaaacaaacaaacaacaacaaaaagtgtttgttttagaaaaaacatttggtgaggtttgggcttaaaaatatattattctaaaatattcataaatattccctagtaataagattaaagtgacaaagacaaatatttttcctgtgcatttccatctctcaccttcccgtaatttgtctgttccatccagcatccaaaggaaattatttacaaaataatgtctgcatcctgggtctatatatctattgtctatgaggagagcatttaagatctgagccatcttcaagtcttatactttgtgtatagctctcatgtttttgcaggttaagtaagtttgtataccctttcttttattaatctgtgtatggtcagttcatttcgggtaatcttcagagggtgaaaggggaagcttttcacttcactcctattgtgacaactaactaccttcttacttattcaattttttagtctatatcaacactttcatatacatttacttttaaacaaaattttgcatcattacacttaaaattttatttacctttttaaaaggaaattaaaaataaaattaaaaattataaaattttacataataaaaataaaataaatgatttatataaaaattaatctgacctgtgaaaaacactatccagaggccaggtgtggt

SEQ ID NO: 714628 - DNA, 804 bp, Homo sapiens
tgatggtgcatgcttgtagcccagctacttggaaggctgaggtaggagaatcacttgagcccaggaagtcaaggctgcagtgagccatggttgcactactgcactccatacctgggtgacagagtgagacacagtatcaaaaacaaacaaacaacaacaaaaagtgtttgttttagaaaaaacatttggtgaggtttgggcttaaaaatatattattctaaaatattcataaatattccctagtaataagattaaagtgacaaagacaaatatttttcctgtgcatttccatctctcaccttcccgtaatttgtctgttccatccagcatccaaaggaaattatttacaaaataatgtctgcatcctgggtctatatatctattgyctatgaggagagcatttaagatctgagccatcttcaagtcttatactttgtgtatagctctcatgtttttgcaggttaagtaagtttgtataccctttcttttattaatctgtgtatggtcagttcatttcgggtaatcttcagagggtgaaaggggaagcttttcacttcactcctattgtgacaactaactaccttcttacttattcaattttttagtctatatcaacactttcatatacatttacttttaaacaaaattttgcatcattacacttaaaattttatttacctttttaaaaggaaattaaaaataaaattaaaaattataaaattttacataataaaaataaaataaatgatttatataaaaattaatctgacctgtgaaaaacactatccagaggccaggtgtggt

SEQ ID NO: 714629 - DNA, 2037 bp, Homo sapiens
tttttataaaggtacttccaaaacaataatgatgcaatttgtaaaatggtttactgaacaaatgaggatgaatctcaaatattatttttcctaaccatatggcttattggacaataaatgaagatcaaggacacaataatccttcattttacgtagccatgttccatgttataacaacagtccgaagtgccgatagatttaattattggatttgaagggagacaatgagtgacaaaccacttcaacttcatttaacatttaaaacagcaattttcatagataaattgccatggaataagacaaacttttatttaatgaactgaggtttatattcagtggtgaaactgacaaaacttggaatctgaccaattcctgaatttccacgatgccagtcccactcagggagcaaagcattgctgttttgaaggaagaaaaaaartttggttgcagagccagggaccaagtcttcagaacttcacattcactttccagcctttcagaaaatagtctagaaatcatgccttgtgtagttgaaagtgaacgctcctttgaaagaaatacaagctgtgcactgtcatctagtgcccatccagatcttacctgcatgaggtgaggctcatgatattgcccaagcaactgcaaatgtcgccctaaaataaccaacacatcagctggtgcttcttcttctttcagataatggcctcttctaacttgagttgcattcccagaaaaatcacagatcagtccaacaatcccccttgtaactgtagacaaccatctgagatttcctggggaaatatacaaattattacccatataaattgttgccaattgttaccaatatcctcaacttcaactaagttctaaaaaccacataggtttttaagaataattctataataatttgtgttgctattttccacaatttacaatttcaaacctttatgtctcccaaatttccagcgtcctccattgctgtaaatctcagctattgggttgcctcatactttagaaaaaaaatagaagccaaaaaacaggaactggtcaatcttgccaaaagcaaatacatcaatgtattgcagctacaactatcttctcctatttccatttccattataatgatgaatttatctctttcttaacaatagctgtttctccataagcactgaaaggcatgattacataccacctttcttataaaattaaacaaacgaaaaatgcaaaacagtaaaaaaactttaaaaaaaaacttaaaagcaataaccttcttcaattatgttcctatctctctacttcatttattctggagacaaacatctaaatagaattctttaaatgcactatgtcattttgtctaatttcttacctgccatgtaatcaactttccaatgtttcaaattgtttttcttagaaataaaactttaaagcccaaattgaaagccatttgtatacttttcccaatttcattctttctccaccattctcagaggcatccattatcctgatattttgtgaattatttcctgttcataatttttatatttttactacatacccactgtatatacaagcatatgatttttcatttttatattatacattttcttcatgtattatatattatacataattaatataatttaatttaactctcactatatgagtatatgtgaatatatattcatgtttatatatatatctcactatatgagtatatatgtatatatatttattcatgtttatatatgtatatatatctcactatgagtatatatatgtgtacatatatattcatgtttttatatgtatatatatctcactatatgagtatctatatatatattagttttatccatgttggggagtcccaggactactcaggttacattgattccatacatcctcagctggaatcatgacttttaagtactacatatattctaaaaattcacaaatttacctttcatttctgacatttccctgaattccacaacagtgtacacaattgcctgcttgacatctccctttggatgtgca

SEQ ID NO: 714630 - DNA, 2037 bp, Homo sapiens
tttttataaaggtacttccaaaacaataatgatgcaatttgtaaaatggtttactgaacaaatgaggatgaatctcaaatattatttttcctaaccatatggcttattggacaataaatgaagatcaaggacacaataatccttcattttacgtagccatgttccatgttataacaacagtccgaagtgccgatagatttaattattggatttgaagggagacaatgagtgacaaaccacttcaacttcatttaacatttaaaacagcaattttcatagataaattgccatggaataagacaaacttttatttaatgaactgaggtttatattcagtggtgaaactgacaaaacttggaatctgaccaattcctgaatttccacgatgccagtcccactcagggagcaaagcattgctgttttgaaggaagaaaaaaaatttggttgcagagccagggaccaagtcttcagaacttcacattcactttccagcctttcagaaaatagtctagaaatcatgccttgtgtagttgaaagtgaacgctcctttgaaagaaatacaagctgtgcactgtcatctagtgcccatccagatcttacctgcatgaggtgaggctcatgatattgcccaagcaactgcaaatgtcgccctaaaataaccaacacatcagctggtgcttcttcttctttcagataatggcctcttctaacttgagttgcattcccagaaaaatcacaratcagtccaacaatcccccttgtaactgtagacaaccatctgagatttcctggggaaatatacaaattattacccatataaattgttgccaattgttaccaatatcctcaacttcaactaagttctaaaaaccacataggtttttaagaataattctataataatttgtgttgctattttccacaatttacaatttcaaacctttatgtctcccaaatttccagcgtcctccattgctgtaaatctcagctattgggttgcctcatactttagaaaaaaaatagaagccaaaaaacaggaactggtcaatcttgccaaaagcaaatacatcaatgtattgcagctacaactatcttctcctatttccatttccattataatgatgaatttatctctttcttaacaatagctgtttctccataagcactgaaaggcatgattacataccacctttcttataaaattaaacaaacgaaaaatgcaaaacagtaaaaaaactttaaaaaaaaacttaaaagcaataaccttcttcaattatgttcctatctctctacttcatttattctggagacaaacatctaaatagaattctttaaatgcactatgtcattttgtctaatttcttacctgccatgtaatcaactttccaatgtttcaaattgtttttcttagaaataaaactttaaagcccaaattgaaagccatttgtatacttttcccaatttcattctttctccaccattctcagaggcatccattatcctgatattttgtgaattatttcctgttcataatttttatatttttactacatacccactgtatatacaagcatatgatttttcatttttatattatacattttcttcatgtattatatattatacataattaatataatttaatttaactctcactatatgagtatatgtgaatatatattcatgtttatatatatatctcactatatgagtatatatgtatatatatttattcatgtttatatatgtatatatatctcactatgagtatatatatgtgtacatatatattcatgtttttatatgtatatatatctcactatatgagtatctatatatatattagttttatccatgttggggagtcccaggactactcaggttacattgattccatacatcctcagctggaatcatgacttttaagtactacatatattctaaaaattcacaaatttacctttcatttctgacatttccctgaattccacaacagtgtacacaattgcctgcttgacatctccctttggatgtgca

SEQ ID NO: 714631 - DNA, 661 bp, Homo sapiens
cacaaatccaggattcaaacacacatctgtctcactgaaaaggtcttattcataaccactgggaagtatcactcatgagttttaactgttaagaagaaacagacatggcagtcgtaaaataaagggatgggtgtgaagggaaatattcttggttcaggcttacttgtagcatgcattctatcttttaatttgctaaattactatgtttaggaaaaagtgccccatttggacagaacaaaggctctcagtataacgggagagagaygagtaaatgaaggattataatacaatgtgactgactattggcagaataaatggcccaacctttcaggaaggcaaatcaacattatttgaaaatttaaaactccaccagtactcttctcaaagtctgtcagtattcatcaggggaggatactgaaagaatagacaaactcttaacaatggtggccctaagagtgaaatgtatgtataaagtgctggaattttaaaaataatgggcatgtattaattctacaataaaaaaattataaaacacaattaagaaatgctctatcggctgggtgcagtgacttatgcctgtaatcccagcactttgggaggcccaaggcgagaggatcacctgaggtcgggagttcaagaccagcctggccaacatggtgaa

SEQ ID NO: 714632 - DNA, 591 bp, Homo sapiens
cagctagtagggaggctgaggcaggagaatagcttgaacccgggagacggaggttgcggtgagctgagatggtgacactgcactccggcctgggcaacaagggctaaattacgcctcaaaaaaaaaaaagtttggagatgggagagtggtgacggctgcacaacgaggtgaatgcacttagtgccactggactstacacttaaaaatggctaaaatggtcaactttgttatgtatattttactaaaaaagaacttcaaaagccattccaaactgctgacccttcatcctggaggccgtggtgtatctgctccaggaaaaataaccggtgggtgaggcaagccagggaggaggttggggttatgaagctaggagcccagaggcacagaaaaaaagaagagtagagaaaggaaaggaaggccagagggaaaggggagcaagggacccagaagaagggatatggtgagctactctctgcagggcagggctccgccccccagcagctttcaaaccacagttgacgcagaaactttcatcagcacaagaggcgagggtggcccgtgccctgcgaacccccagcaccatgctcccgg

SEQ ID NO: 714633 - DNA, 1248 bp, Homo sapiens
tgaactttttgaaattgcatgcaacattgtttgtgtctacacatatgtgcatttttgaggggaaatgattcataattgtcaacagactctcaaaggattctgtagttggacaaaagatatagaagagtccttggacaaaagactgaaaaaccctaaacagaaacattcttttaaatcttcttctacagaaagtaatttgaaggccttccctgacttaaagtggatgctgctttggaaagcactggaaaaatggatcctgtctttcttagccaaggactggtctcttttctccaatgtgtccctaacagagtggtgaggctggctcttcccaccagtacaggtaatgtggtaaagataggaccacgtggacgaagaggtattaccttctctaattacagctaacaaagacctaggcctaacctcaactgcaccttctgtctctgggaagtcacttatagagtagacctataattaggatttggtaccggaaacataattctcaggatggtgaatctctaaattatgtccccagagacatacctgagacaaaaccctaagggctgttggccgtaagagggtgtgtgtggtattctacattcagtagggatttataaatgaggatgatatcactcagaaggggcaggtgtccaagaggcccttttgacttctgcaatggggcctgacagccccgtgaactgagctccataatttatgcctccggcatagaatctgtgcaaagcaggaatggccgtatcagcatttggggatttaaagcagctttttttttttttttttttttgagatgaagttttgctcttgttgcccaggctggagtgcaatgacacaatctcagctcactactacctccacctcccgggttcaagcgattctcctgcctcagcctcctgagtagctgggattacaggcatgcgccaccmcgcccagctaattttgtatttttagtggaggctggtttctccatgttggtcaggctggtctcaaactcccaacttcaggtgatccaccctcttcggcctcccaaagtgctgggattacaggcgtgagccaccatgcctggctaaagcagctttttttatccacagacctctttcccaaattgtaaggaggattcagctcattgatttcactttattttaaaagaaaataattattgatgtgtaaagtaaatgaaaacacagtcaagtgggagtgtaattgaaagtaatttaagagttcaatggttgatga

SEQ ID NO: 714634 - DNA, 581 bp, Homo sapiens
cctcccaggttcaagcgattctcctgcctcagcctccctagtagctgggactacaggcatgcaccaccacgcatggctaatttttgtatttttagtagagacagagtttcaccatgttagccaggctggtctcgaactcctgacctcaggtgatctgcctgtctgggcctctcaaagtgctgggattacaggtgtgagccaccgcgcctggcctcaacaactttcttctccccattaggattacctccattgtgggctcttttcgagggaggaggcactgcattctcactcccagtctaaagctgctttcccttctcggtgatgttttctgcttccatgcctttgtacatgctgtgtctgttctattgattttccttttccyatctcctgtgtatggcaaactcccacttgtttttcatgattctgctcaagtgttctttcctgtatgaagcccaagctgtccacttggagagacatctggccagccccccgttgttccagccatccccagttcaggcatcagacatgtggtgaagaagccatcctagatgcccagccccagctaccatctgatgcaacca

SEQ ID NO: 714635 - DNA, 1173 bp, Homo sapiens
ggaaaaatgagaccatgtttacttcttacatatattttaataatttcctagggcacctcaccagctttcaatcagtccagttcagtggattgcactcaaccaggatttcttggattgttccattgtatcttgtacaagggtgttctctcctcttgcatttcacacaaagggtgctcactctgagagtacatcttcctcattgtcttagtcctcagaaatggatatcggtgtgcagcaggtttactggggagtgctgtggggatcaatagctagtggggacagggagagcatgaatgggcagaggtagaagtcaaactgctgtgcagttgcaacaaagacctcggtggagcccacagggagctccgcagctcagatagcccttcagagtggctccaaatcaggcaagggggctgggccttttacccagcatcaaccagtcatgggatgcaggctgcccttggggaagtagtgtaaatgtgggtgaaccagcttattttagtcaagggtaattcctagggagagaggagagaggttagctatgagctgtcaatagtcaacgaggtactaaagtaggtttctgggctgcacatcatggcatccactagagcccaccctagtacctgctctgtatagtaacaagactgcatttcagaacagcacctacaagatcctggttggcctcttttcctaaggaaacttacaagaggaaggctaataggacgaaattcagctgttgcagctggagctgaacttgagcctaaaattgatactgatcatgattccctcctctacaacccattcctagattcccctcttagctagcaccttttctagtctaggtggtttacctggcggagtgacacagaccttcattcctgaaggacctaagtctttggtcaccatacttttttaggccacggctggtatacttgtcctttactgtcaaaactggttagtggttgyatgagaagtgctggattacctgggtgtcaaacctttatcctgctcccactgtataacagatacctgacctcttcttgctgctcaggtcagttaaacccactaatattatgactgtttggcttgccggcaggcatgtggagcctgaaatggcagagcagcagtgacagtttcaagtttcaaggagctcttcttgtgtctcctagtgcaagt

SEQ ID NO: 714636 - DNA, 1552 bp, Homo sapiens
tgcctcactcaccagcttctcaaccatccctattcctttgaatgtcaatcattctgagttacctggtaacttatgcttgttcttgcctctatacttggtgaaacctctctccaattttgatgaggcttattccccattctggtttagtttgaaartttttcttggtctcctgagaccgactgaggcacttttcgtctgtgcccatttattgtgctgttgtcattcctttcataggatttgccacacagtgatgaaattgcttgcttactttgcttttttaaccgctagcttacaaatatatcttctgtgcttaacacagtgcttggcatgtagtcaatgttcagcattatttgttgaatgagtaagttcttgactgcaatgaaagtgtatttacacagattaagatgatatgggataggatatgtcttcatattacatctacttggaagttacttttggaagtccacagatctctcaagacaatcaaggagctttagaatatgtaactgcatgattttaagtaaagcatttccttattttgaagcacaacacatctactacgtattgatcaagaatgcaattccattataggagagagtgcatgtgttcatatgaataggaaacaaggtttatttaaagtattggctgttactttcaggaggtgtaaggcaaacacaattctaacctccttaaatgcaattaaatagtgaggggaaatcattgattaagattgcacttccacttggcctcttccacctgaaaagtgctacttgttggatgtgtgacagcaccagaaaatgcagaagaacaaatgaataagcataatacacatttagacctaatactatgaaattttaaactgacttcatttaaagttaggtgtgtaactttaaaagtaaacgttttaatttatatattttactgaatagtagatatttgatcatagtaatataccaatatttttctctagccacttgcatttttttaaaaaacagaggcaggatctcactctatctcccagactggagtgcagcgttgcaatcatagctcactgcagctttgaactcctaggctcaagtgatcctcctgccgcagcctcccaagtagctgtgaatacaggtgctgcaactacatctggctaattttaaaaatgtgtttagagaaaggatctcactatgttacccaggctggtatcaaactcctggcctcaagaggtcctcccacttcagcctgggattacattgcatttgtgtattaatatttttcctagttgttgaagagaagctatctctatctacactttcaatgataaaccataatgttttattaattaaatataaaataaagcagctgaaaacagaaataaattcccaagtcattgtgatgattctggaccaataatactagaaaacacaatggtaaatataagtgtatgaaattttaaacacacacatatacatatctatataattagaaaaccaaataaaataaaataataataataggcataatgaaaaaccaaagaataggaaatatctacaaccaatggtac

SEQ ID NO: 714637 - DNA, 1552 bp, Homo sapiens
tgcctcactcaccagcttctcaaccatccctattcctttgaatgtcaatcattctgagttacctggtaacttatgcttgttcttgcctctatacttggtgaaacctctctccaattttgatgaggcttattccccattctggtttagtttgaaagtttttcttggtctcctgagaccgactgaggcacttttcgtctgtgcccatttattgtgctgttgtcattcctttcataggatttgccacacagtgatgaaattgcttgcttactttgcttttttaaccgctagcttacaaatatatcttctgtgcttaacacagtgcttggcatgtagtcaatgttcagcattatttgttgaatgagtaagttcttgactgcaatgaaagtgtatttacacagattaagatgatatgggataggatatgtcttcatattacatctacttggaagttacttttggaagtccacagatctctcaagacaatcaaggagctttagaatatgtaactgcatgattttaagtaaagcatttccttattttgaagcacaacacatctactaygtattgatcaagaatgcaattccattataggagagagtgcatgtgttcatatgaataggaaacaaggtttatttaaagtattggctgttactttcaggaggtgtaaggcaaacacaattctaacctccttaaatgcaattaaatagtgaggggaaatcattgattaagattgcacttccacttggcctcttccacctgaaaagtgctacttgttggatgtgtgacagcaccagaaaatgcagaagaacaaatgaataagcataatacacatttagacctaatactatgaaattttaaactgacttcatttaaagttaggtgtgtaactttaaaagtaaacgttttaatttatatattttactgaatagtagatatttgatcatagtaatataccaatatttttctctagccacttgcatttttttaaaaaacagaggcaggatctcactctatctcccagactggagtgcagcgttgcaatcatagctcactgcagctttgaactcctaggctcaagtgatcctcctgccgcagcctcccaagtagctgtgaatacaggtgctgcaactacatctggctaattttaaaaatgtgtttagagaaaggatctcactatgttacccaggctggtatcaaactcctggcctcaagaggtcctcccacttcagcctgggattacattgcatttgtgtattaatatttttcctagttgttgaagagaagctatctctatctacactttcaatgataaaccataatgttttattaattaaatataaaataaagcagctgaaaacagaaataaattcccaagtcattgtgatgattctggaccaataatactagaaaacacaatggtaaatataagtgtatgaaattttaaacacacacatatacatatctatataattagaaaaccaaataaaataaaataataataataggcataatgaaaaaccaaagaataggaaatatctacaaccaatggtac

SEQ ID NO: 714638 - DNA, 1552 bp, Homo sapiens
tgcctcactcaccagcttctcaaccatccctattcctttgaatgtcaatcattctgagttacctggtaacttatgcttgttcttgcctctatacttggtgaaacctctctccaattttgatgaggcttattccccattctggtttagtttgaaagtttttcttggtctcctgagaccgactgaggcacttttcgtctgtgcccatttattgtgctgttgtcattcctttcataggatttgccacacagtgatgaaattgcttgcttactttgcttttttaaccgctagcttacaaatatatcttctgtgcttaacacagtgcttggcatgtagtcaatgttcagcattatttgttgaatgagtaagttcttgactgcaatgaaagtgtatttacacagattaagatgatatgggataggatatgtcttcatattacatctacttggaagttacttttggaagtccacagatctctcaagacaatcaaggagctttagaatatgtaactgcatgattttaagtaaagcatttccttattttgaagcacaacacatctactacgtattgatcaagaatgcaattccattataggagagagtgcatgtgttcatatgaataggaaacaaggtttatttaaagtattggctgttactttcaggaggtgtraggcaaacacaattctaacctccttaaatgcaattaaatagtgaggggaaatcattgattaagattgcacttccacttggcctcttccacctgaaaagtgctacttgttggatgtgtgacagcaccagaaaatgcagaagaacaaatgaataagcataatacacatttagacctaatactatgaaattttaaactgacttcatttaaagttaggtgtgtaactttaaaagtaaacgttttaatttatatattttactgaatagtagatatttgatcatagtaatataccaatatttttctctagccacttgcatttttttaaaaaacagaggcaggatctcactctatctcccagactggagtgcagcgttgcaatcatagctcactgcagctttgaactcctaggctcaagtgatcctcctgccgcagcctcccaagtagctgtgaatacaggtgctgcaactacatctggctaattttaaaaatgtgtttagagaaaggatctcactatgttacccaggctggtatcaaactcctggcctcaagaggtcctcccacttcagcctgggattacattgcatttgtgtattaatatttttcctagttgttgaagagaagctatctctatctacactttcaatgataaaccataatgttttattaattaaatataaaataaagcagctgaaaacagaaataaattcccaagtcattgtgatgattctggaccaataatactagaaaacacaatggtaaatataagtgtatgaaattttaaacacacacatatacatatctatataattagaaaaccaaataaaataaaataataataataggcataatgaaaaaccaaagaataggaaatatctacaaccaatggtac

SEQ ID NO: 714639 - DNA, 806 bp, Homo sapiens
gaaaagcagaactgagtayagcaggggtgggtacttgcagtaaactctgaaaaataatgtagccttaccaattgtagtccaggggaaatgttaaataggttggagacatcaatgtaaggaaatttatgtagccataaaaacgatagaattcaaaactaaaaaccaataaagaaaagtgttcatgaaatcacattaggtgaagtacaaaatacaattttttaaatacactcttattacaactatgttaaagctatataagccaacaaataaatattggaagtaaacaggaagacagtagttattccacaatggaggtaaaattatggatttttttaaattcactttttaatgttttaagttttgttaaaaatgactttttgatacacttttacatagaaaagagttaagactatgattttatttttaatttgctaaactgtcaaacctatgaccttgtaccctttctgcattagacaccaaagcctaatgggataaataattaataggcaggttcttataaatttttatagacttaacctatgtcatctaaccttttagccacagtacattcaagtgctggaaatgagtttctttgttgaaaagaaatactagtttttaactgcttttgcaaaaatgtacatacaagcaaataggaggacttaaaaatctattgatattctagcattatacaaatatcttatatctataattcattattcctctatgtctataaatatactgaatgcttattcaatacaaattaacatgtataggctttctttcttcattcaatgagggcctacaag

SEQ ID NO: 714640 - DNA, 2413 bp, Homo sapiens
  misc_feature 1069, 1070, 1071, 1072, 1073, 1074, 1075, 1076, 1077, 1078,1079, 1080, 1081, 1082, 1083, 1084, 1085, 1086, 1087, 1088,1089, 1090, 1091, 1092, 1093, 1094, 1095, 1096, 1097, 1098,1099, 1100, 1101, 1102, 1103, 1104, 1105, 1106, 1107: n = A,T,C or G
  misc_feature 1108, 1109, 1110, 1111, 1112, 1113, 1114, 1115, 1116, 1117,1118, 1119, 1120, 1121, 1122, 1123, 1124, 1125, 1126, 1127,1128, 1129, 1130, 1131, 1132, 1133, 1134, 1135, 1136, 1137,1138, 1139, 1140, 1141, 1142, 1143, 1144, 1145, 1146: n = A,T,C or G
  misc_feature 1147, 1148, 1149, 1150, 1151, 1152, 1153, 1154, 1155, 1156,1157, 1158, 1159, 1160, 1161, 1162, 1163, 1164, 1165, 1166,1167, 1168: n = A,T,C or G
cacagaagaaagaaataaaacagctcctatttacatagtaaagtaatatacttacttctagcttatttgataatgtatataattcaaattacttttagttgttttatttataactgtattctcaagttccttaatttgaacaattttaaatgataatacagtggttaaaatggaatgaaaaatttagtttcctaaaataaaatgtatcacaatcactgaaaacctaaattatctaagttgtaacacagtgtgctgtcctatttctgatgactctggttagaaagcaattggtggacagttttgcagagactcctaagctacacatcatcactgtacagaaaactctatacatcattagcaacgtatcaatgcaagcaatataattccctagagaagaatagtttgcacttaacatcaatttaaccattttctctagacacatcctattatgaagtttcataactcagcagaaacattcggtatgtagcagggggcaaacattatgtaaaagtggggaatgatcaaaaacttcactctcagatggactctaatctttaactagagaatatactatattataatttaaattacctcgatgccttacttttagaagagcaaattgttctcacgttttacaacttgataggcagttgctctaatccataaaaaaagaaaaaaggagaaactgagtctttgccctttcttactctctgcaatccttattattcagtgttacatggaggtttatcttagcaaagtcctccgtgataacttattcattaatcttcagaatatcccaaacaagtgaatattttccccttatgttgaaaatgaggttaacattatcttcatctccatagaatgagtcactagaaaaggtggattggagctaagaattcctgaaatcccagtccaagcatgtccagtttcataaaccaccttttaaaattcattctttcatttcagagcatggcaagctccataccagctaatttttctctgtgactataaatataccatatttgccctaaaagcataaaaagaaaaaaaaaatcttaatgggaattcnnnnnnnnnnnnnnnnnnnnnnnnnnnnnnnnnnnnnnnnnnnnnnnnnnnnnnnnnnnnnnnnnnnnnnnnnnnnnnnnnnnnnnnnnnnnnnnnnnnncccaatttcctggaaataaaaaagccacaacttatctgaaatgaagaggcagaaagctctagttgatagcttcacatcatctggaaaatcaattttgtaaaactattgggtggctactctattctcttcattctgattaaccacaaataaaagaaactccgttaaaaaaatcctaagagtcaaagttgagtgtcctcatcttactggttacactggaagcctgtgttaaaatagaaaactctactcagcccagcctacctcgagtcagtttagataaaaagcttgagaaggatctgatgggcttctttccattttctcattctttctcggtatgttcttgttcctgtgctttctaatcttctacaattctaattttctttcttctattcttctctgcttcaacttagaatgacttggaacctaattatgttttatatccttattactcattgatttaaaaaaatccttgagtcctcttcttaatacaatgaaaatgctgaatgtttgtcataaaatatcagtaaatttcaatccctttctataggcataagggtttttcagtaactgtattaatgaccctttacagaaaaggagtctttatgcctgataagtgtaaaatatcagaaagttaacttcacttttctgaaacactcaactctggctccagtagtatatgaagctctaaattaagttaaaggtgtttaaaatgcattactttgtatttggacctgtttcatcagcaatacttaagtactgtgttggtcagcaagtgacagagtcccattaattagctcagggaccagtgttattcattcttttggcattgaagcaattctcattacatctaagctgatatgggaatgataaatgacaataggctactacaaatgttactatatattgagccaaagtaatggaacctcaagcagaagtgtgcagaggaaaacagtgcagtgatatggagacaatataaagtgttatcacagtgtcataaacaatttgagtgtatttgaaaagcactccagtggctaatgaagccaaaagataggtcttcattaggaaaggactccaacagttcaggcataacccagccagttacmtcccaaatagtgatctgcaacattactgagcatcacaattatctggaaaagttttctctaaaaaatgagagaggagagagattcccgtgtccgtcttactatgtcttccatttcttcaccaaagtttctgagttgatatatctga

SEQ ID NO: 714641 - DNA, 619 bp, Homo sapiens
gcctcagccacctgagtagatgggaccacaggtgcgcgccaccaggcccggctaatttgtaaattttatttgtagagaaggggtctccctgtgttgtccaggcttgtctctgactcctgggctcaaaggatcttcccatcttggcctcccaaagtgctrggattacaagcgtgagccattgcgcctggctccaaatctgatttgagtgtaaaaagttagacacaccataagctgtaggtttattactgggtggtgaaaaacaattcaggttttctttataatagtgattatgaagtgttcttcccagactagctttatcgtcatctgggaaattgttaaaaatgcaaattcgcaagtttgagagccatggttccaagaaactgcataagcatacgaaataagttgcagcctcccgacttataccctggtacttctagtctaaaacaggatttgactctactaatccaggttagtcttgcctttcccattactcatgtgctttcgttgaaaccaaagactttttcttttgtgcccatttctactcactgcctggccgtctgcacgacgatctgtgtttcctggtagttctccagtctagtagctactataaactactctc

SEQ ID NO: 714642 - DNA, 1117 bp, Homo sapiens
atgaatagcaggctttgaagaaataaaagtagcttctcctcattaaatcttgtgggaaatcctgacgttagaattcatctgaggctaaccattccaccttgtgatctttaggttttgaattccattgaagttttctatcaacctaaatatttcctccatcytcattttatttcacatttcttgacagtttggagggaaggatatcaaccgatactctgttttgttggaataagtagaattgtagagccctaaaacttcacaagtcattgtttccaacttgatttaagaatttttcccacaccatacaaaacagcatgttccatggttaacaaaggatcagcaaaaaaattggcatgataagttacataaccaaccaatagaaataactgtgtttccaaaatacaaatagaatctcaagacacgaagaagaacatgggcataaagtcttagagctctcaggaccctgctgcagagcagtgctgtgccaggctagcagaggcatttactgagttgtgtaggtttgctggagatagaagggccatgtgtacaggtgtagcagccaccctgaggcaagactccagaatagcactgtcccatggaaccttctgcaatgatggaaatgttctatatctgcagtgtccaatacagtagcactagatatgtgtggctaatgaacacttgaaatgtggctagtgctactgaggaactgaattttcaattttatttaattttaatagattcagatttaaatagaccacaagtagcaagtggctgccatattcgatatctcagctctagaatagccctgtgctaagaatgaccaagaggcaagcaagaattgggtgtaaaatgatcctgggctgtaataggtccagataaggggtggaaagtcactcctctctcttcacctcctggttattaattcctggtatgtcatcagatggcatcagtttaaagagaacataatatatgtagctcccatggcatgcaaaccttgtgagattattgaagcaatacgctctgggggaaaaataactgtttgactttctggaatatgtgatataagttcccagtcttttgtttttttaatcataaattttaacacgatccatttggt

SEQ ID NO: 714643 - DNA, 1094 bp, Homo sapiens
catgaaagaatgatttcaggtcttatatttcttggtgacaatgattgccttttccttcccaaagaagttagtccagcataggcacctgttgcaataaaacctagcagactgattggctacccttctatcattcacctcagcccttctaaaaccttagattggtggactgcaatctaggaaagctgtttcctccaatgaagctgttttttgaagatttgaagatcataaatcatggttccgtgtattcayctgatggagttgttccagaaaggaaacataaacagtgatttttgcctccttagggttctccatcctagaactcatcaccaccccagtcctcacattggttggcatttctcttgcatactaccaaatacaatagctgatacttcagacagaaaatgagcttacaggctaaaataaagttcataaaatgggggagggaaaaaagagcactgacactgtattgaaacagtgcttttatctgactgttgtattatgggtaattattgttttcattataattttctggcattttctaagtttttggccaaaagcacaatagggcttcttaatttgtattatcagaataagtgaggtaacatctttttaaaataagatttaatttcatcatctcaaggattcatagaattccatatttgcaagtaagtttttatcaaagctttataatcccctttaaaatttattttgttttgcatgtttgaatatcattttttaaaagtcaaatagatgtcatgatatgttcagtagtcccccaaaccactctcaggttcaatgatctattagaagaactcacagaactcaggtttatttcagtgaaagtgtacagattaaacacatagagtccaggagagaagaggcgcatgctttcagttctcctctcccggtggagtcacagggacaatgcttaattaattcagtaagtgtgtgacaatatgcaaaaatattgacaaccagggaagctcaatctgataacttggaactttggggtctagatttattattggtcattgctcaatagaccaataatatatacttatactgatacatacttacgtcatttgaaaaagcca

SEQ ID NO: 714644 - DNA, 1094 bp, Homo sapiens
catgaaagaatgatttcaggtcttatatttcttggtgacaatgattgccttttccttcccaaagaagttagtccagcataggcacctgttgcaataaaacctagcagactgattggctacccttctatcattcacctcagcccttctaaaaccttagattggtggactgcaatctaggaaagctgtttcctccaatgaagctgttttttgaagatttgaagatcataaatcatggttccgtgtattcacctgatggagttgttccagaaaggaaacataaacagtgatttttgcctccttagggttctccatcctagaactcatcaccaccccagtcctcacattggttggcatttctcttgcatactaccaaatacaatagctgatacttcagacagaaaatgagcttacaggctaaaataaagttcataaaatgggggagggaaaaaagagcactgacactgtattgaaacagtgcttttatctgactgttgtattatgggtaattattgttttcattataattttctggcattttctaagtttttggccaaaagcacaatagggcttcttaatttgtattatcagaataagtgaggtaacatctttttaaaataagatttaatttcatcatctcaaggattcatagaattccatatttgcaagtaagtttttatcaaagctttataatcccctttaaaatttattttgttttgcatgtttgaatatcattttttaaaagtcaaatagatgtcatgatatgttcagtagtcccccaaaccactctcaggttcaatgatctattagaagaactcacagaactcaggtttatttcagtgaaagtgtacagattaaacacatagagtccaggagagaagaggcgcatgcttycagttctcctctcccggtggagtcacagggacaatgcttaattaattcagtaagtgtgtgacaatatgcaaaaatattgacaaccagggaagctcaatctgataacttggaactttggggtctagatttattattggtcattgctcaatagaccaataatatatacttatactgatacatacttacgtcatttgaaaaagcca

SEQ ID NO: 714645 - DNA, 2024 bp, Homo sapiens
gaagatacctaagcgggatgggaagaaatctttcactggtaactttttatatttttaatatcccagccatatgaatatattacatatttcatattattattttttttaagccttgagctttcacaaagaaatgctcctgctggccaactactttaaatgtcttagagcagcacacccagccctggcattccccagtgatcttttccgtcccacccctgggttcccgcaggctgtcccctgggtctaagaaactcttcgaccttcctctccctacctagttaactccttttctgcttgcaggaacacgcggcagatcgcctcctccccggtgcacccgtctgtatgcaggtgcgcttccccagatgagggctaggacgcgcctccggggtctctattcacacctgcagcgggagcttatcatcatcactcaccgaccaaaaaaaaaaaaaagaaaaaaaggtgggggggtggggcggaggggaagaaggtcgaatcagatcacccctagaggtctctctgccctcgcaatcactctcaagtcctagagtaccaaacttaactgcagagggagcacgaaatggtgggtattttgaagcgctaatttttagggatcccctcccatccaaaacagggatgaataggtgaggaacaccggagcggggccctggcccttctcggaacgttgagcagacctaacatgacgctggtccgttcaaacgtcgcagttgtggcccacacagagcccagtctgttccaggggcgcgccctgcacccctctgcctgcccgaggtcttccctcccctccgctccccagaaacgcacccactgagacatgtgcggggagggggcacgcttactcccacatcccgcccgagacccgcggagcagccaagacccggccaaaaaggggagggcgtggcaggcaagggccgggggcgggagcgcgggcggccgcggactcacgtactggctgtggcggcgccgcggaaacccggccgccagcgggacaaaagcgcggaccgcacggccggaagaacccgcgccggccctggggcacttccgcgccctctctgggacgctggaggactgactcgatggtccgggccgacggcgccggcgggagggagggaggggagcgcctcctcggctatttattgaggaccagctgcagggcgcgcgctccaggcgcggccaggaggccgtcggcggggcttcctgtttccgtgcccattagcttctggggtaggctgggggaggggcacaggtaataaagtaaatacctgcctacctggttcctgaacacgtgattcattgccaggtgtgggtgcggggacgttcccggaagtgggggcctggcgggaaatggaatccgggaggggcgcaggacagcgctgggctggggacccattgccttctcagctggttgggggctggcccgagagcaccagcccttcctggtcgtcagcaccagaagcgcccccggttaggcactggggatgcggagtgggagcgcgcccctggagccgtccctgggaccgggccacgctcccacccggggcgccagcttggcagcgacctcgccccctgcccaccccaccgccggtgtcggcttccaaacccagggcctaaaatgactttgaagacctttttttttttttwaaattaatgtttgtgggtacatagtaggtgtccctatttgtcgagtacgtgagatatcttgatacagacaggaatgcaatgcgtaataatcatatcagggttaatggcgtgtccatcacttcaagcatttatcctttgtgttacaagcaatcaaattatattcttatttttaaatatacaactaagttattggctatagtcagccttttttaaaaacagcaacatctaaatatttttcatattaagtttaaataattgcaaagggtatatttttggcatgctgttaatattaagaacaaaattgctttcaagtgtatccaatggaatctaaatccctgaagatttggtattatccacttttaaca

SEQ ID NO: 714646 - DNA, 668 bp, Homo sapiens
agcctctgcatttggggtcgtttcttctataacaatagataactgggacaggcgcagtggctcacgccagtaatcccaacacttgggatgccaaggtaggcagatcgcctgaggtcgggagttcaaagaagagcctgaccaaaatgggagaaaccccatctctactaaaaatataaaaattaactgggcatgttggtgcatgcctgtaatcccagcactttgggagccacggccggtggatcacctgagttcaggagttccagactagcctggccaacctggtgaaaccccgtctctactaaaaatacaaaaatagctgggcgtggtggcaggtgcctgtaatcccagctattctggaagctgaggcaggagaatcacttgaacctgggagccagaggttgccagtgagctgagatcgcrccactgcactccagcctgggcgacagtgagactccatctcaaaaaaaaaaaaaaaaaaaaaagtgtggggattacaggcagagccaccatgcctgctgtctgtgtctgttttgttgagccaccaacaggctgttaacttgagtacatttcttctgctctctgacttagtgtactcatctggaaaatgggggtgaatgtgctcccacactgctgagctgtagagggccttaaatgagttaatctctccc

SEQ ID NO: 714647 - DNA, 1405 bp, Homo sapiens
cttctgtgtccctcaagccatctgtgaccgtcccacttcataaaagcaaaggtcacttgctcattgaaacttcctctgtgccaggcaagagctgcatcgccccaacaggcccctcaagcaagatgctattatcattatcatgatgcccttttttgcagatggggaaaagtgaggctcagaaagaccaagtccgcaggccccatctctactgaaaatacaaaaacattagcgcccgtaatcccagctactccggaggctgaggcaggagaattgctgagatcgcgccattgcactccagcctgggcgacaagaccaaaactctgtctcaaaaaaaaaaagaaaaagaaagtaaagggggagaaggaaaggaagagggtggttgggaacacagaagaggtgacattgggtagggactcaagctggaaagggggacaaagtggaagctgggtgcagtggctcatgcctgtaatcccagcactttgggaggccaaggcgggaggatcacttgtgcctgggagttctagaccaacctggccaacacagggagacctcgtctctgcaaaatatttaaaaacaattagctgagctaggtggcacacatctgtggtcccagctacttgggaggctgaattgggagaagcacttgagtttggaggtctaggctgctgtgagccgtgatcatgccaccatactccagcctgggcaacagagcaagatcctgtcaaaaaaaggaaggaaggagtggggttgacatgcaaggccatttgaggatgggctgggacattgtggactcatttccctcctccccagaggaccagaaggagcaagagatccccttacctgtgggcagcaggtatctcagcattagtaacaccagggcccaccgccggcctccaggggcaccctgccacargccagccattcacggcttcaggaagacttgggggctgctctttgccctcgttccagccccccagccaagcccagagacatgtccagcagctccaggcggccaggtgcctaagatctggcgggtatcaaatgtgcccagtcagcctaatccctgcgaggctgggcggggctgggaaggatcccctcgcctattcccaggccctgattggctccctgggcccttggttctgcctgtctgggctcccaggaagacagggctccatgggcattgaggggagcgggagtttcagctgccaggctcagctgcgggtgtcaggaaaagtctccctagaatgttccccagacccagagctgcactgcgactttcatgggccacaatcacttttgcaatttacccattacttttttttttttttttgaaaggaagtcctattgtgttgcccaggctggaatgcagtggtgccatcttgtctcacagcaaactccgcctccc

SEQ ID NO: 714648 - DNA, 1357 bp, Homo sapiens
tgaggacgaccctgccccaggcgacaccgagctgtgtctggggacatctgtggttgtcagagttaggggtgttcctggcacagagcaggtggaggccagggatgctgctcagcagcctgcagtgcccaggacggccccaccgagggaaccatcccacctcactatccacggtatggagggggaaaccccgtattcattatataactgggaaaaaacctgacttccgccaggcgcagtggctcacrcctgtaatcccagcattctgggaggctgaggtgggtgaatcacctgagtcaggaattcgagaccagcctgatcaacatggcaaaaccctatctctactaaaaatacaagattagccgggcgtggtagtgagcgcctgtaatcccagctacttgggaggctgaggcaggagaattgcttgaatccagcaggtggaggttgcaggaagccaaaatcgcgccactgcactccagcctggaagcctggataacaagagctacactcagtctcaaaaaaaaaaaacaaaaaaacacctgacttaacttcctgctcatgctggacaccagaataaattcctaaggcgggcggtgtaaaccggggacccccagctcctgggattcacctactttctccccctccaattcagggtgtggatttcaatgtatgcagccttctgggacctcagcagggcagaggatcatgggacacagagtctcttggggatacgtggaatcccctaacccagggaggtctcgcccgggttatcctgccctaggggacactggacaatgtctggggacatctgtggttgtcacaacaggggtgtgttcttgtcatggcgtgggtggaggcgaggaatgctcctccgctccctgcaatgcccaggatgggcccaggagggcaagaccgtgttaaaagggcacagtcagtccgcctctctctagcaggctgcagggcacaggcagtgggcacacaggccagcacctgagacccaggatggggttttctggaaggaagcaaacccggccactgccttgcagcacggttctggactgagcccgagcgaggcctgcagtggacgtggctgccggctctccccagtgagcccaggagaaagtgggtgggcgggcggtggggtgctgggctgggggaggtgccgcacacctggagttccggatcaactccacctgtcttggcgtcaatgcgaagatgcacgggctctcctgaagcttctcgttgttctgtgggactgaagacaaacacggggtcaggggcatgtctggtccctggcaggtcccccgagcccagtcgcttttcccagcctgcgcctcttcagaccaggaaacaggaaatg

SEQ ID NO: 714649 - DNA, 1357 bp, Homo sapiens
tgaggacgaccctgccccaggcgacaccgagctgtgtctggggacatctgtggttgtcagagttaggggtgttcctggcacagagcaggtggaggccagggatgctgctcagcagcctgcagtgcccaggacggccccaccgagggaaccatcccacctcactatccacggtatggagggggaaaccccgtattcattatataactgggaaaaaacctgacttccgccaggcgcagtggctcacgcctgtaatcccagcattctgggaggctgaggtgggtgaatcacctgagtcaggaattcragaccagcctgatcaacatggcaaaaccctatctctactaaaaatacaagattagccgggcgtggtagtgagcgcctgtaatcccagctacttgggaggctgaggcaggagaattgcttgaatccagcaggtggaggttgcaggaagccaaaatcgcgccactgcactccagcctggaagcctggataacaagagctacactcagtctcaaaaaaaaaaaacaaaaaaacacctgacttaacttcctgctcatgctggacaccagaataaattcctaaggcgggcggtgtaaaccggggacccccagctcctgggattcacctactttctccccctccaattcagggtgtggatttcaatgtatgcagccttctgggacctcagcagggcagaggatcatgggacacagagtctcttggggatacgtggaatcccctaacccagggaggtctcgcccgggttatcctgccctaggggacactggacaatgtctggggacatctgtggttgtcacaacaggggtgtgttcttgtcatggcgtgggtggaggcgaggaatgctcctccgctccctgcaatgcccaggatgggcccaggagggcaagaccgtgttaaaagggcacagtcagtccgcctctctctagcaggctgcagggcacaggcagtgggcacacaggccagcacctgagacccaggatggggttttctggaaggaagcaaacccggccactgccttgcagcacggttctggactgagcccgagcgaggcctgcagtggacgtggctgccggctctccccagtgagcccaggagaaagtgggtgggcgggcggtggggtgctgggctgggggaggtgccgcacacctggagttccggatcaactccacctgtcttggcgtcaatgcgaagatgcacgggctctcctgaagcttctcgttgttctgtgggactgaagacaaacacggggtcaggggcatgtctggtccctggcaggtcccccgagcccagtcgcttttcccagcctgcgcctcttcagaccaggaaacaggaaatg

SEQ ID NO: 714650 - DNA, 1357 bp, Homo sapiens
tgaggacgaccctgccccaggcgacaccgagctgtgtctggggacatctgtggttgtcagagttaggggtgttcctggcacagagcaggtggaggccagggatgctgctcagcagcctgcagtgcccaggacggccccaccgagggaaccatcccacctcactatccacggtatggagggggaaaccccgtattcattatataactgggaaaaaacctgacttccgccaggcgcagtggctcacgcctgtaatcccagcattctgggaggctgaggtgggtgaatcacctgagtcaggaattcgagaccagcctgatcaacatggcaaaaccctatctctactaaaaatacaagattagccgggcgtggtagtgagcgcctgtaatcccagctacttgggaggctgaggcaggagaattgcttgaatccagcaggtggaggttgcaggaagccaaaatcgcgccactgcactccagcctggaagcctggataacaagagctacactcagtctcaaaaaaaaaaaacaaaaaaacacctgacttaacttcctgctcatgctggacaccagaataaattcctaaggcgggcggtgtaaaccggggacccccagctcctgggattcacctactttctccccctccaattcagggtgtggatttcaatgtatgcagccttctgggacctcagcagggcagaggatcatgggacacagagtctcttggggatacgtggaatcccctaacccagggaggtctcgcccgggttatcctgccctaggggacactggacaatgtctggggacatctgtggttgtcacaacaggggtgtgttcttgtcatggcgtgggtggaggcgaggaatgctcctccgctccctgcaatgcccaggatgggcccaggagggcaagaccgtgttmaaagggcacagtcagtccgcctctctctagcaggctgcagggcacaggcagtgggcacacaggccagcacctgagacccaggatggggttttctggaaggaagcaaacccggccactgccttgcagcacggttctggactgagcccgagcgaggcctgcagtggacgtggctgccggctctccccagtgagcccaggagaaagtgggtgggcgggcggtggggtgctgggctgggggaggtgccgcacacctggagttccggatcaactccacctgtcttggcgtcaatgcgaagatgcacgggctctcctgaagcttctcgttgttctgtgggactgaagacaaacacggggtcaggggcatgtctggtccctggcaggtcccccgagcccagtcgcttttcccagcctgcgcctcttcagaccaggaaacaggaaatg

SEQ ID NO: 714651 - DNA, 1357 bp, Homo sapiens
tgaggacgaccctgccccaggcgacaccgagctgtgtctggggacatctgtggttgtcagagttaggggtgttcctggcacagagcaggtggaggccagggatgctgctcagcagcctgcagtgcccaggacggccccaccgagggaaccatcccacctcactatccacggtatggagggggaaaccccgtattcattatataactgggaaaaaacctgacttccgccaggcgcagtggctcacgcctgtaatcccagcattctgggaggctgaggtgggtgaatcacctgagtcaggaattcgagaccagcctgatcaacatggcaaaaccctatctctactaaaaatacaagattagccgggcgtggtagtgagcgcctgtaatcccagctacttgggaggctgaggcaggagaattgcttgaatccagcaggtggaggttgcaggaagccaaaatcgcgccactgcactccagcctggaagcctggataacaagagctacactcagtctcaaaaaaaaaaaacaaaaaaacacctgacttaacttcctgctcatgctggacaccagaataaattcctaaggcgggcggtgtaaaccggggacccccagctcctgggattcacctactttctccccctccaattcagggtgtggatttcaatgtatgcagccttctgggacctcagcagggcagaggatcatgggacacagagtctcttggggatacgtggaatcccctaacccagggaggtctcgcccgggttatcctgccctaggggacactggacaatgtctggggacatctgtggttgtcacaacaggggtgtgttcttgtcatggcgtgggtggaggcgaggaatgctcctccgctccctgcaatgcccaggatgggcccaggagggcaagaccgtgttaaaakggcacagtcagtccgcctctctctagcaggctgcagggcacaggcagtgggcacacaggccagcacctgagacccaggatggggttttctggaaggaagcaaacccggccactgccttgcagcacggttctggactgagcccgagcgaggcctgcagtggacgtggctgccggctctccccagtgagcccaggagaaagtgggtgggcgggcggtggggtgctgggctgggggaggtgccgcacacctggagttccggatcaactccacctgtcttggcgtcaatgcgaagatgcacgggctctcctgaagcttctcgttgttctgtgggactgaagacaaacacggggtcaggggcatgtctggtccctggcaggtcccccgagcccagtcgcttttcccagcctgcgcctcttcagaccaggaaacaggaaatg

SEQ ID NO: 714652 - DNA, 1357 bp, Homo sapiens
tgaggacgaccctgccccaggcgacaccgagctgtgtctggggacatctgtggttgtcagagttaggggtgttcctggcacagagcaggtggaggccagggatgctgctcagcagcctgcagtgcccaggacggccccaccgagggaaccatcccacctcactatccacggtatggagggggaaaccccgtattcattatataactgggaaaaaacctgacttccgccaggcgcagtggctcacgcctgtaatcccagcattctgggaggctgaggtgggtgaatcacctgagtcaggaattcgagaccagcctgatcaacatggcaaaaccctatctctactaaaaatacaagattagccgggcgtggtagtgagcgcctgtaatcccagctacttgggaggctgaggcaggagaattgcttgaatccagcaggtggaggttgcaggaagccaaaatcgcgccactgcactccagcctggaagcctggataacaagagctacactcagtctcaaaaaaaaaaaacaaaaaaacacctgacttaacttcctgctcatgctggacaccagaataaattcctaaggcgggcggtgtaaaccggggacccccagctcctgggattcacctactttctccccctccaattcagggtgtggatttcaatgtatgcagccttctgggacctcagcagggcagaggatcatgggacacagagtctcttggggatacgtggaatcccctaacccagggaggtctcgcccgggttatcctgccctaggggacactggacaatgtctggggacatctgtggttgtcacaacaggggtgtgttcttgtcatggcgtgggtggaggcgaggaatgctcctccgctccctgcaatgcccaggatgggcccaggagggcaagaccgtgttaaaagggcacagtcagtccgcctctctctagcrggctgcagggcacaggcagtgggcacacaggccagcacctgagacccaggatggggttttctggaaggaagcaaacccggccactgccttgcagcacggttctggactgagcccgagcgaggcctgcagtggacgtggctgccggctctccccagtgagcccaggagaaagtgggtgggcgggcggtggggtgctgggctgggggaggtgccgcacacctggagttccggatcaactccacctgtcttggcgtcaatgcgaagatgcacgggctctcctgaagcttctcgttgttctgtgggactgaagacaaacacggggtcaggggcatgtctggtccctggcaggtcccccgagcccagtcgcttttcccagcctgcgcctcttcagaccaggaaacaggaaatg

SEQ ID NO: 714653 - DNA, 1357 bp, Homo sapiens
tgaggacgaccctgccccaggcgacaccgagctgtgtctggggacatctgtggttgtcagagttaggggtgttcctggcacagagcaggtggaggccagggatgctgctcagcagcctgcagtgcccaggacggccccaccgagggaaccatcccacctcactatccacggtatggagggggaaaccccgtattcattatataactgggaaaaaacctgacttccgccaggcgcagtggctcacgcctgtaatcccagcattctgggaggctgaggtgggtgaatcacctgagtcaggaattcgagaccagcctgatcaacatggcaaaaccctatctctactaaaaatacaagattagccgggcgtggtagtgagcgcctgtaatcccagctacttgggaggctgaggcaggagaattgcttgaatccagcaggtggaggttgcaggaagccaaaatcgcgccactgcactccagcctggaagcctggataacaagagctacactcagtctcaaaaaaaaaaaacaaaaaaacacctgacttaacttcctgctcatgctggacaccagaataaattcctaaggcgggcggtgtaaaccggggacccccagctcctgggattcacctactttctccccctccaattcagggtgtggatttcaatgtatgcagccttctgggacctcagcagggcagaggatcatgggacacagagtctcttggggatacgtggaatcccctaacccagggaggtctcgcccgggttatcctgccctaggggacactggacaatgtctggggacatctgtggttgtcacaacaggggtgtgttcttgtcatggcgtgggtggaggcgaggaatgctcctccgctccctgcaatgcccaggatgggcccaggagggcaagaccgtgttaaaagggcacagtcagtccgcctctctctagcaggctgcagggcacaggcagtgggcacacaggccagcacctgagacccaggatggggttttctggaaggaagcaaacccggccactgccttgcagcacggttctggactgagcccgagcgaggcctgcagtggacgtggctgccggctctccccagtgagcccaggagaaagtgggtgggcgggcggtggggtgctgggctgggggaggtgccgcacacctggagttccggatcaactccacctgtcttggcgtcaatgcgaagatgcacgggctctcctgaagcttctcgttgttctgtgggactgaagacaaacayggggtcaggggcatgtctggtccctggcaggtcccccgagcccagtcgcttttcccagcctgcgcctcttcagaccaggaaacaggaaatg

SEQ ID NO: 714654 - DNA, 1343 bp, Homo sapiens
  misc_feature 670, 671, 672, 673, 674, 675, 676, 677, 678, 679, 680, 681,682, 683, 684, 685, 686, 687, 688, 689, 690, 691, 692, 693,694, 695, 696, 697, 698, 699, 700, 701, 702, 703, 704, 705,706, 707, 708, 709, 710, 711, 712, 713, 714, 715, 716: n = A,T,C or G
  misc_feature 717, 718, 719, 720, 721, 722, 723, 724, 725, 726, 727, 728,729, 730, 731, 732, 733, 734, 735, 736, 737, 738, 739, 740,741, 742, 743, 744, 745, 746, 747, 748, 749, 750, 751, 752,753, 754, 755, 756, 757, 758, 759, 760, 761, 762, 763: n = A,T,C or G
  misc_feature 764, 765, 766, 767, 768, 769: n = A,T,C or G
tatcatacaattttatagtttgctagtaggttacaagtaaatagtcacccaaataaaaacatcatgttttccactggttgttgctcttttttaggtgagtatttgatgtataccaacagagagaggataataacaaatcgctaatttctttcatcactatataaaggtggcttcaggatagaatagtatcagggcaatgatgaatttgaaatctaacatcaattcagtgatgcatcaagataaaagcagagacaacaggggcaccttgstgagtactgaacattttatttatttatttattttgagatggagttttgctctttttgcccaggctagagtgcaatggtgccaacctcgcctcactgcaacctctgcctcctgggttcaagcgattctcctgccttggcctcccgaatagctgggattacagacatgcaccaccacacccgtctaattttgtatttttagtagagacggggtttctccatgttggtcaggctggtctcgaactcccgacctagatatctgcctgccttggcctcccaaagtgctgggattacaggtgtgagccaccgcgcccagatgaattccaaatttaacaaagcagactaagagaaacaattcatttaaaaaacatactatttggccaggcatggtggctcacacctannnnnnnnnnnnnnnnnnnnnnnnnnnnnnnnnnnnnnnnnnnnnnnnnnnnnnnnnnnnnnnnnnnnnnnnnnnnnnnnnnnnnnnnnnnnnnnnnnnnttacagatacaagtttaagagggacccctaagcaaaaaatgccaaccctttttctcccaatcattgaaacaccaggagggtgtaacagttttgcagcctagctgtagcaggctgatgcccccaagatgcccatatctaatcccgggaactggtgaacatgaccttatatggcaaaaggagctttgcagatataatgaagttaagggtctttggcttttggggttgatgtactcactcggatccttgtaagagcagagcaggtgatggagagggtgggaggtgtagtgacagaagcaggaaactccagtcattcgagacgggcagcacaggctgaggagtgcaggccacctctacggccaggaaacagattctcccgcagagcctcggaagctaccgaccctgctcccaccttgactcagtaggacttactgtagaattctggccttcagacctgtaagggaatacattttggttgttttaagtcactaagtgtgtggtaatttgttgcagcagccacaggaaactagtattgtagtgaagcctcaaaaccccctgaaggggctgggctcagtgg

SEQ ID NO: 714655 - DNA, 570 bp, Homo sapiens
  misc_feature 168: n = A,T,C or G
ctgaggcaggagaatagcgtgaacccgggaggcggagcttgcagtgcgccaagatcgcgccgctgcactcaggcctaggcgacagagcgagactccgtctcaaaaaaaaaaaagaaaaggtttctaacagaacagtctgcatttccacctggaaaatggctctcattnacaaacttaccccttcaattgaacaagggggaagcccaagaattgcagggccattctaattaataaatgaaataagcttgggcttcagagaaagaaaaagatcagaaaccattgcatgcaagaagtctaggcagaggagcaggtagccacgagatttaaaacaagtgtatttgcagtatgttaaaccatacaggaaaatacttcatataagatatacataaggccgggcacagtggctcacgcctgtaatcctagcactttgggaggtcgaagtggatggatcacctgaggtcatgagttcgaaaccagcctgacygacatggtgaaactctgtctctactaaaaatacaaaaaatagctgggcatggtggcaggcgcctgtaatcccagctacttgggagg

SEQ ID NO: 714656 - DNA, 580 bp, Homo sapiens
gatattgagtgaactaaatcaaatgtgaataattctcaaacatcagaattaaatttaaaaaagcaagttgaagagggccaagttacagtatgataccatttgcacaaaattttaaaaccacttaagcaatattatgaaaataaccatacaaagtaaaaatatgtatgggaatgatagatgtcagactcaggatactatgtaattgcttactgggccagggtaaggaaatgtaattgagcaggaatatataagaggctccaactggatttgtgatgttttattttttagccatgyatggttgtataggtacacatatgacaattttttatagtaatgaaccttctacagccaggcttgtatctaaacgttagctgattcgatcaggagtgggtggacatctgataaatctagaccaatcctattctttttcatgtatgtgaaatattttctttttcccaaaagggaaaggcaatagtgccaattgtggcagacaatgccctttagctgaaatattgcaattattgttcttccttgccatcttctgcccaatactcatctttctagcctcagctgcagttga

SEQ ID NO: 714657 - DNA, 1155 bp, Homo sapiens
gcatgggaacttgctcagaagctccaaaatgttgtcgccagcacctgatatttctacatccctaacttctggattgtgaaaggtggtgcccttctcccaaactccaccccttagcccacttacagctccagggaaagttgaggaagagaaagattctgtctctatcaaatcctaatagggagcagagccaagagagacaggaagaggcatgctcatttccaaccttttttggcaagctcaagcgggagcaaaagccattgccaattctattttttaatacagatttaaaaagggttgtgtctacacatgcaaaggggagtgcacagtgcactgtgttaatttaagcagcacaacawtttttttaataaaaagaaaggctgactattcagatatttgttttacatttggtagatccaaattgggggaggagaccaaagtgcaataatttctcctctagttatgcgtgtgctttccagccctacatttatcgctcttccagttccaggctgggccagccagagaccatccctgggacttttcagtttgaagtgaggagagagaaactctttccttttggagacagaattgagttgctagatgtagtggaccatgatgtgagcgcactttggtagtctgagttggataactattaggagagagcaagaggccaggtgcggtggctcacacctgtaatcctagcactttgggaggctgaagtgggtggatcacttgagatcaggagttcgagactagcctggtcaacatggtgaaaccccgtctctactaaaaatacaaaatttagcttggcgtggtggcgggcgcctgtaatcccagctcctcaggagggtgaggcaggagagtcacttgaacctgggaatcggaggttgcagtgagctgagatcatgccactgcactccagcctgggcaacagagcaagactgtctcagaaaaaaaaaaaaaagagattgagagagaacaagaatgatagtgaaagctagagaataaaagagtgattccaattgtatagtttgatgaaatgagaagtgaaggaaatgcgtgtagtttaaaggcaaatacacatgcttgggcctgaaaagttaacacaaattggagttgtttggtaaaatggtagttgagtaatttggaaaaaaaacc

SEQ ID NO: 714658 - DNA, 1155 bp, Homo sapiens
gcatgggaacttgctcagaagctccaaaatgttgtcgccagcacctgatatttctacatccctaacttctggattgtgaaaggtggtgcccttctcccaaactccaccccttagcccacttacagctccagggaaagttgaggaagagaaagattctgtctctatcaaatcctaatagggagcagagccaagagagacaggaagaggcatgctcatttccaaccttttttggcaagctcaagcgggagcaaaagccattgccaattctattttttaatacagatttaaaaagggttgtgtctacacatgcaaaggggagtgcacagtgcactgtgttaatttaagcagcacaacaatttttttaataaaaaraaaggctgactattcagatatttgttttacatttggtagatccaaattgggggaggagaccaaagtgcaataatttctcctctagttatgcgtgtgctttccagccctacatttatcgctcttccagttccaggctgggccagccagagaccatccctgggacttttcagtttgaagtgaggagagagaaactctttccttttggagacagaattgagttgctagatgtagtggaccatgatgtgagcgcactttggtagtctgagttggataactattaggagagagcaagaggccaggtgcggtggctcacacctgtaatcctagcactttgggaggctgaagtgggtggatcacttgagatcaggagttcgagactagcctggtcaacatggtgaaaccccgtctctactaaaaatacaaaatttagcttggcgtggtggcgggcgcctgtaatcccagctcctcaggagggtgaggcaggagagtcacttgaacctgggaatcggaggttgcagtgagctgagatcatgccactgcactccagcctgggcaacagagcaagactgtctcagaaaaaaaaaaaaaagagattgagagagaacaagaatgatagtgaaagctagagaataaaagagtgattccaattgtatagtttgatgaaatgagaagtgaaggaaatgcgtgtagtttaaaggcaaatacacatgcttgggcctgaaaagttaacacaaattggagttgtttggtaaaatggtagttgagtaatttggaaaaaaaacc

SEQ ID NO: 714659 - DNA, 1155 bp, Homo sapiens
gcatgggaacttgctcagaagctccaaaatgttgtcgccagcacctgatatttctacatccctaacttctggattgtgaaaggtggtgcccttctcccaaactccaccccttagcccacttacagctccagggaaagttgaggaagagaaagattctgtctctatcaaatcctaatagggagcagagccaagagagacaggaagaggcatgctcatttccaaccttttttggcaagctcaagcgggagcaaaagccattgccaattctattttttaatacagatttaaaaagggttgtgtctacacatgcaaaggggagtgcacagtgcactgtgttaatttaagcagcacaacaatttttttaataaaaagaaaggctgactattcagatatttgttttacatttggtagatccaaattgggggaggagaccaaagtgcaataatttctcctctagttatgcgtgtgctttccagccctacatttatcgctcttccagttccaggctgggccagccagagaccatccctgggacttttcagtttgaagtgaggagagagaaactctttccttttggwgacagaattgagttgctagatgtagtggaccatgatgtgagcgcactttggtagtctgagttggataactattaggagagagcaagaggccaggtgcggtggctcacacctgtaatcctagcactttgggaggctgaagtgggtggatcacttgagatcaggagttcgagactagcctggtcaacatggtgaaaccccgtctctactaaaaatacaaaatttagcttggcgtggtggcgggcgcctgtaatcccagctcctcaggagggtgaggcaggagagtcacttgaacctgggaatcggaggttgcagtgagctgagatcatgccactgcactccagcctgggcaacagagcaagactgtctcagaaaaaaaaaaaaaagagattgagagagaacaagaatgatagtgaaagctagagaataaaagagtgattccaattgtatagtttgatgaaatgagaagtgaaggaaatgcgtgtagtttaaaggcaaatacacatgcttgggcctgaaaagttaacacaaattggagttgtttggtaaaatggtagttgagtaatttggaaaaaaaacc

SEQ ID NO: 714660 - DNA, 1155 bp, Homo sapiens
gcatgggaacttgctcagaagctccaaaatgttgtcgccagcacctgatatttctacatccctaacttctggattgtgaaaggtggtgcccttctcccaaactccaccccttagcccacttacagctccagggaaagttgaggaagagaaagattctgtctctatcaaatcctaatagggagcagagccaagagagacaggaagaggcatgctcatttccaaccttttttggcaagctcaagcgggagcaaaagccattgccaattctattttttaatacagatttaaaaagggttgtgtctacacatgcaaaggggagtgcacagtgcactgtgttaatttaagcagcacaacaatttttttaataaaaagaaaggctgactattcagatatttgttttacatttggtagatccaaattgggggaggagaccaaagtgcaataatttctcctctagttatgcgtgtgctttccagccctacatttatcgctcttccagttccaggctgggccagccagagaccatccctgggacttttcagtttgaagtgaggagagagaaactctttccttttggagacagaattgagttgctagatgtagtggaccatgatgtgagcgcactttggtagtctgagttggataactattaggagagagcaagaggccaggtgcggtggctcacacctgtaatcctagcactttgggaggctgaagtgggtggatcacttgagatcaggagttcgagactagcctggtcaacatggtgaaaccccgtctctactaaaaatacaaaatttagcttggcgtggtggcgggcgcctgtaatcccagctcctcaggagggtgaggcaggagagtcacttgaacctgggaatcggaggttgcagtgagctgagatcatgccactgcactccagcctgggcaacagagcaagactgtctcagaaaaaaaaaaaaaagagattgagagagaacaagaatgatagtgaaagctaragaataaaagagtgattccaattgtatagtttgatgaaatgagaagtgaaggaaatgcgtgtagtttaaaggcaaatacacatgcttgggcctgaaaagttaacacaaattggagttgtttggtaaaatggtagttgagtaatttggaaaaaaaacc

SEQ ID NO: 714661 - DNA, 653 bp, Homo sapiens
caagactaaggatgaatgaacgagaacacaaattcccaatgtcaagaatgaaagatgacatgtaattatagctcctacagacatgaaaatgataataagggactgtaattaacaactttatgccaataaaatttgatgtatcttaattggacaaactccttaaaaaatacaacttacaataactgacacaggaaaaaattgaaaatctgaatactccctgttatgactatatcttatcagactcagatatactcagaatatatcctatcagaatttagttaaacaaattaaattcattttcaaaacttctttataagaaactccactaatacatttattgcagcattattcacaatagcaaagatatggaatcaatctaaatgtacattgacagatgactgaataaagaaaatgtggtatatatacacaatggaatactatttagccatagaaaagaatgaaaccatgtccttygcagcaacatggatggaactggagtccactatcttcagtgaaacaactcagaaataaagtcaaataccaaaagttctcagctgtaagtaaaagctaaataatctgtacacatggatatagactgtggaatgatcaatattggaggttcagaagggcagcagggtgggaagagggtggta

SEQ ID NO: 714662 - DNA, 653 bp, Homo sapiens
caagactaaggatgaatgaacgagaacacaaattcccaatgtcaagaatgaaagatgacatgtaattatagctcctacagacatgaaaatgataataagggactgtaattaacaactttatgccaataaaatttgatgtatcttaattggacaaactccttaaaaaatacaacttacaataactgacacaggaaaaaattgaaaatctgaatactccctgttatgactatatcttatcagactcagatatactcagaatatatcctatcagaatttagttaaacaaattaaattcattttcaaaacttctttataagaaactccactaatacatttattgcagcattattcacaatagcaaagatatggaatcaatctaaatgtacattgacagatgactgaataaagaaaatgtggtatatatacacaatggaatactatttagccatagaaaagaatgaaaccatgtccttcgcagcaacatggatggaamtggagtccactatcttcagtgaaacaactcagaaataaagtcaaataccaaaagttctcagctgtaagtaaaagctaaataatctgtacacatggatatagactgtggaatgatcaatattggaggttcagaagggcagcagggtgggaagagggtggta

SEQ ID NO: 714663 - DNA, 586 bp, Homo sapiens
gcaggtctagagatgacgtccaggagccagggcctggagtcagaaatcttaggaatctaccggtactctattctacggtgggygagctggcacccaagtcacaagacaaagtccttcccactcttccttctcctttccacaagcagaggagtctctccctgtggccaccactgccccaggcctgcgacaagtactgtctggctactgctgatgttcattcaaggcccaggggctcttcaatcagcttgtggtgaatgctgccaggcctaggaatctattttggggcagtgggcccacctgtaagccagggaagtccagaaataccatctaaagccaagccctggaatcaggaacccctagaacccctttggtgctttaccctgctgtggctaagctggtacctaagctgatttttggttcttatgaaggtgcatgaaggtgcttttttgtgtggagagttgttcaatttgttgttcctttgggaggctgctatttagccatatggctccacctccctctccatccaaaaagaaaactttaaatgaaaatatgatacatccaaagaaagtgtttttgaaataaaaaa

SEQ ID NO: 714664 - DNA, 704 bp, Homo sapiens
tcgctttgtagtatttagacctttacattttaaatctttatttatgctgtatcaataatttggggtagaaaaagaatctgtaagtggcacttgaaacttatacatttttgtcctcgctcaaaataggtgattttattctgcttagcctagaatataatgttgatttgtttatagctgctgtttttcttcactgatacagaatctggaaacgggtattttgcatgtagtgatgtatcatctttgtattacttctttagttaacttattttttaatgccacagattgagagtatttctgttctgtttattgtggaaaatgacctttttagcaaaggtttatttttaaaawttgtagttgatatctgttaccagagtaagtttggaataggttttttagtgaggtgatttaagactatatatggccaggtgcggtggctcacgcctgtaatcccagcactttgggaggctgaggtgggtggatcacgaggtcaggagatcgagacatcctggctaacacagtgaaaccccatctctactaaaaatacaaaaaattagcccggcgcggttgcgggcacctgtagtcccagctacttgggaggctgaggcaggagaatggcatgaacccgggaggcagagcttgcagtgagtggagatcatgccactgcactccagcctgggcgacagagagaaactctgtctcaaaaa

SEQ ID NO: 714665 - DNA, 704 bp, Homo sapiens
tcgctttgtagtatttagacctttacattttaaatctttatttatgctgtatcaataatttggggtagaaaaagaatctgtaagtggcacttgaaacttatacatttttgtcctcgctcaaaataggtgattttattctgcttagcctagaatataatgttgatttgtttatagctgctgtttttcttcactgatacagaatctggaaacgggtattttgcatgtagtgatgtatcatctttgtattacttctttagttaacttattttttaatgccacagattgagagtatttctgttctgtttattgtggaaaatgacctttttagcaaaggtttatttttaaaaattgtagttgatatctgttaccagagtaagtttggaataggttttttagtgaggtgayttaagactatatatggccaggtgcggtggctcacgcctgtaatcccagcactttgggaggctgaggtgggtggatcacgaggtcaggagatcgagacatcctggctaacacagtgaaaccccatctctactaaaaatacaaaaaattagcccggcgcggttgcgggcacctgtagtcccagctacttgggaggctgaggcaggagaatggcatgaacccgggaggcagagcttgcagtgagtggagatcatgccactgcactccagcctgggcgacagagagaaactctgtctcaaaaa

SEQ ID NO: 714666 - DNA, 704 bp, Homo sapiens
tcgctttgtagtatttagacctttacattttaaatctttatttatgctgtatcaataatttggggtagaaaaagaatctgtaagtggcacttgaaacttatacatttttgtcctcgctcaaaataggtgattttattctgcttagcctagaatataatgttgatttgtttatagctgctgtttttcttcactgatacagaatctggaaacgggtattttgcatgtagtgatgtatcatctttgtattacttctttagttaacttattttttaatgccacagattgagagtatttctgttctgtttattgtggaaaatgacctttttagcaaaggtttatttttaaaaattgtagttgatatctgttaccagagtaagtttggaataggttttttagtgaggtgatttaagactatatatggccaggtgcggtggctcacgcctgtaatcccagcactttgggaggctgaggtgggtggatcacgaggtcaggagatcgagacatcctggctaacacagtgaaaccccatctctactaaaaatacaaaaaattagcccggcgcggttgcgggcacctgtagtcccagctacttgggaggctgaggcaggagaatggcrtgaacccgggaggcagagcttgcagtgagtggagatcatgccactgcactccagcctgggcgacagagagaaactctgtctcaaaaa

SEQ ID NO: 714667 - DNA, 624 bp, Homo sapiens
atgttttaagttatcaggatataatttcatccttattcattagtccttttcatcctttattcttttagggaagaatacagctgtcttcttctttgttagcactttgccaattgagaagtatcccagtgttacataaaaagcctttctcttagcagtattagttcatgagctaccactaagttttgcaagccattttctaaaatggtcatttaaaatactatgttttcttatgaaacaagtttacatttaaaatttaaaaggcagtaacaaagtttcacttcgttcaatgtaaaactttagctccgccttcaaaacactatggttatattacttatttaaatgtggcctgcacattacttctcggccttttggctaagatcaggtgtagttaagatcaagtttagtatctgttctcatcagtaaatgtgrcctatgttgcaaattcaaaacgttatttctaaaattttgctgtatcaaataaactacatctcaaatttgacaggcatgccaacccatacccattttgttttattttctctcctaaccacagcacaaataatgacttcttaaattggttacaactagcaataatattaggtagatggttcaagaaagagactttca

SEQ ID NO: 714668 - DNA, 728 bp, Homo sapiens
tttttagcaatccttaattgtttgctcctttctgcctttcctgatgtcctaggatttgaccatcttggtagacacaactggcccttcctgtggagctggagtgcatgtcccagcctctgctggctgccttgcctcattatcatgcataccttttcaaggcatctgataaagaccattcctgaacacatctgaatgaagcttaggattgccatgatgaggcagcaggagagcctcctgtgctgtgtacatggctgtcgtcttcaacactcactttaatgtagagaaaagaaagataaggttgggtgcagtggctyacacctgtaatcccagctactcggaaggctgagacatgagaatctctggaacccgggaggctgaggttgcagtgagccgagatcacaccactagactccagcctggtggagacagtgagaccctgtctcaaaaaaaaaaaaagaaaagaaagataagcagagaagaaactaagaaactggaatttattaattcataatagcagtgattagaaataaattatttattatatgcatgacattgagctaaatcctctacaaacatcccttatttaattctcccaataacacactgcaactgcttttactatccctatttacggatgggaaaagtaaggcaagtcagagatctcccaaatagttaagtgtgacctgggatttgtatccgggtctgtctgactcctgagctagtacccg

SEQ ID NO: 714669 - DNA, 728 bp, Homo sapiens
tttttagcaatccttaattgtttgctcctttctgcctttcctgatgtcctaggatttgaccatcttggtagacacaactggcccttcctgtggagctggagtgcatgtcccagcctctgctggctgccttgcctcattatcatgcataccttttcaaggcatctgataaagaccattcctgaacacatctgaatgaagcttaggattgccatgatgaggcagcaggagagcctcctgtgctgtgtacatggctgtcgtcttcaacactcactttaatgtagagaaaagaaagataaggttgggtgcagtggcttacrcctgtaatcccagctactcggaaggctgagacatgagaatctctggaacccgggaggctgaggttgcagtgagccgagatcacaccactagactccagcctggtggagacagtgagaccctgtctcaaaaaaaaaaaaagaaaagaaagataagcagagaagaaactaagaaactggaatttattaattcataatagcagtgattagaaataaattatttattatatgcatgacattgagctaaatcctctacaaacatcccttatttaattctcccaataacacactgcaactgcttttactatccctatttacggatgggaaaagtaaggcaagtcagagatctcccaaatagttaagtgtgacctgggatttgtatccgggtctgtctgactcctgagctagtacccg

SEQ ID NO: 714670 - DNA, 580 bp, Homo sapiens
taggtagagtttcctcccttattcccctttcccctcctggcttttggaatcctcagtgtctactgttaccatctttgtgtccatgtgttaaagggtaggagtaattttgaggcttcaagcttctgctgatttttaagcatttttctgaaataaaactttcaaattagttcataaatcaatgtaacagatgacatctgtcaatatacattattatatgcataaatcatatgcataaataacatgcattattttattatgattttataaaagattgacacaacataattcaaaataacttatttactacaaataggactcaccacatgaaaattagaatytaaagcaattaaaaaaactattaggaaatgaaaaaaaatcccatcatataaatcctcaattttggccatattttatgaaagggccaaaagcaatcaaaaaaaaaaaaaaaagagagagagaaagaagtgagaaagaagtaggaaaaaaagaagaaagacatgtggctattattacagcaacatgaaggtggtcaaccacttcaagtttttgtggtcagtgaggtcacaagagctacaggctg

SEQ ID NO: 714671 - DNA, 580 bp, Homo sapiens
taggtagagtttcctcccttattcccctttcccctcctggcttttggaatcctcagtgtctactgttaccatctttgtgtccatgtgttaaagggtaggagtaattttgaggcttcaagcttctgctgatttttaagcatttttctgaaataaaactttcaaattagttcataaatcaatgtaacagatgacatctgtcaatatacattattatatgcataaatcatatgcataaataacatgcattattttattatgattttataaaagattgacacaacataattcaaaataacttatttactacaaataggactcaccacatgaaaattagaatctaaagcaattaaaaaaactattaggaaatgaaaaaaaatcccatcatataaatmctcaattttggccatattttatgaaagggccaaaagcaatcaaaaaaaaaaaaaaaagagagagagaaagaagtgagaaagaagtaggaaaaaaagaagaaagacatgtggctattattacagcaacatgaaggtggtcaaccacttcaagtttttgtggtcagtgaggtcacaagagctacaggctg

SEQ ID NO: 714672 - DNA, 628 bp, Homo sapiens
aaccctcttggctctgtctccagatgtgtctcagaaccccctgctatcacctgggacaggtctcactcctctttggccccctaatctttcttttgctcctgaagagactggcctccatgtcatccaragctgactcctgtcccaggcaggtggaatatatatccatcacaaggtgaccttgaacctggggtgaccgtccccttttcattgccaaggtccaggtaaagcttgtcaatataggcttccaggaatataaatttaaagagtcatattttttttactcatgtgaattgtaatctctgtaaaatcactgttaatttagttatgttaatatatgtaaaaatcacatcttatttacataatatgttaatttcaaaatgctgcttttcctactttctctttatgccaggtttattgacactaaggccactttttgaatctaacacattttccggaacacgttgtcttcactactaagctgtgataaagcgtgtttaaaaataagagtccctggccgggcgcggtggctcacgcctgtaatcccagcattttgggaggccgaggcaggcggatcacgaggtcaagagattgaggccatcctggctaagacggtgaaaccccgtctgta

SEQ ID NO: 714673 - DNA, 628 bp, Homo sapiens
aaccctcttggctctgtctccagatgtgtctcagaaccccctgctatcacctgggacaggtctcactcctctttggccccctaatctttcttttgctcctgaagagactggcctccatgtcatccagagctgactcctgtcccaggcaggtggartatatatccatcacaaggtgaccttgaacctggggtgaccgtccccttttcattgccaaggtccaggtaaagcttgtcaatataggcttccaggaatataaatttaaagagtcatattttttttactcatgtgaattgtaatctctgtaaaatcactgttaatttagttatgttaatatatgtaaaaatcacatcttatttacataatatgttaatttcaaaatgctgcttttcctactttctctttatgccaggtttattgacactaaggccactttttgaatctaacacattttccggaacacgttgtcttcactactaagctgtgataaagcgtgtttaaaaataagagtccctggccgggcgcggtggctcacgcctgtaatcccagcattttgggaggccgaggcaggcggatcacgaggtcaagagattgaggccatcctggctaagacggtgaaaccccgtctgta

SEQ ID NO: 714674 - DNA, 1732 bp, Homo sapiens
tagcataacctgaggtcactgaatactaaggaatcatgcacaatgcataactgtttctcattctttaatcttttgacttcgagtgtaccagctataatacagaaattactttctccctctctgttttataagctctgctttgactttcagtcactttgtttaagatactaccatgtttcagaaagagctgcacacagaaaagattaaacatctatggacagcaacaccaccccaggaatagttcagaattctttcttccgaagtacacaaatcctaataaaaatcagaagcaaaaccatcaatacttatgacaggtaactgaaaccatctacaaaccttctactcaaaagaagaaaccaagttactaaggaagaaccaaagctcaaaaaacctaacagtttggacatgtggggaaagacttacagtcttcccagaccctgtttgagcrcaagccatcaaatctcgtcctgcaagtatgataggaatactgtatttttgcacaggagtaagcttagtataaccagctttagcaatgttgttattcagtgtctgacagagattagcttcttcaaaagtctgaaaatttaaaaaaaagcagtgattacattctatatatcatatgcagatcatttataagcatatttcattcgagctactttccaagttctgttaattctactttatatactaaagtgactttagtaacatgcctccactcagaagtaaatattcaaagcctgtatattataatatgatttgacagaatcatgaagtattctccacaaatggtggctttaaaaacatttttcctgcccccttaaaacctatgagatatgaagaattctgctcagtaatggcttgttctaagtataattatcaataggagacagagggctccccctctcagaaaaatcactgccctaagacacactttctcacaatcttgggaaaacatcttgaatcactaggaaaagcattttttaagtaagtttaaataaaattctcatcctggtatggggagtggggatgaaatctattactctcttttgacatagcaattaattctattatagatggtaagacatcattctaaatttccaacctaagaccttatatacgaaaggtgaaatctatgtgttgatatcagctttacaaactacataatgtattttaaaggcaaagtgtgctacatagctaatacagaaacaattaatacactgaccagaattgctggtggtgcatcatgtccagacacttccacaagaatagtgtcgtatttgtcgaagtttatgcctgtctgataatgtgcaaagatggagtcctcatcctcaggtggaggagggggtatgtaggtcacttttggtccttggaatttaaattaaaaacataatgtacgttacagagactacaagaaaatataagagaaaatagacaaaaattgacaagatcaaattttaaatactatggaacttcccactgcttacctttaaagttttcactgttcaaatttttaaaagataactttgtttttaagtaaaatacttaagcattattaaaacacaacatacttctatgtgagtcacacaaatgttaatataccttgagtatcactactttctcctccttctgcttctgacttccaagaatcttgaagaggatcaaataaaaaagagatacatgttttttaaaattgaaaggtaaaagaactctcactataaaaatcaaacacctt

SEQ ID NO: 714675 - DNA, 627 bp, Homo sapiens
tgtttttgtcaggtttgttgaagatcagatggtggtagatatgttgtgtttatttcttaggtctctgttctgttccattggtctgtatttctgttttggtatgrgtaccacgctgttttggttactgtagccttttagtatagtttgaagtcgggtagcatgatgcctccagctttgtttgtttgtttgtttgtttgtttgtttgtttttggttaggattgtattggatatatgggcccttttttgattccatatgaaatttaaagaatttttttttcaaattctttgaagaaagtcaattgtagcttgatgcaaatagcattgaatctataaattactttggggagtatggccatttttacaatattgattcttcctatccatgagcatggaatgtttttccatttgtttgtatcctctcatatttccttgagcagtggtttatagttctccttgaagaggtctttcacatcccttgtaagttgttttcctaggtattttattctctttgtagcaattctgaatgagagttcactcatgatttggctatggcccaaaaggctttgcccactcccagggattctcatttcatttactcctggacttaacagaggtttgtttgcaaaa

SEQ ID NO: 714676 - DNA, 1191 bp, Homo sapiens
tttgtgtttgaattttaattccagctttattagtaacagctagaaactggaaacatgacaaaagtccttctaactggtaaatggataaacgaactgcagcatatttattcaattgcatactaatcaataatgaacaaactgctgatacatacaacatggaaaatgaaagaagccagatacaagagagtatgtactatatactgcatgatttaatttacatgggattctctaataataaacatayatggataaaaagcagatcagtaattgtcttgggtagggacaggtagggtagggagtagatagattgattgaaaaggatgagagggaacttttgatgttgtgagaatgttctatatcattacataattaactacatatatttgccaaaattcatctaattttacataaaattaataaattttagcttatgtaaaggataattcaataaagttgatttaaaatttttaaaaggcaggagaggatcactaaatcaaaatgctgaaaatttaaatgactatttagtatttagattggaagaaatctcaattttttagaaagtaatccatgaaaatgacaataaataataatctatgtgattgttagactgaggcttaagtctatattgtggtttctgtctacaaagaactaatgcatccagttttacctcataacaatggttggttgtctttagtgggtttttccccagcacataagtgtgctccaggcttttctatcttataaacaaacaaacaaacaaaaaatctcaccttaatatcctgcttcaattattaatttatattcctctttctccttacatgcaagcttctcaaaaaaaaatagatctcttcttattttcactagtcattgtatacactcctcaacctacagaaattaggccattacccacctccattactccagtgaagtcactccctggacatctcctaattcaacaatcataccagttttgtccttacttcacttctctatggtcacattatcatggactttcttgatatcctatttcttcatattctctctttcttgctaacagctccctttcaagtttatctttctgtttccttcataactgttggtgtttcctgggaatgctacaaacccttctcttattttacgcactctttccaagcaattttttctgtactcatggcttttattgactgcttg

SEQ ID NO: 714677 - DNA, 1191 bp, Homo sapiens
tttgtgtttgaattttaattccagctttattagtaacagctagaaactggaaacatgacaaaagtccttctaactggtaaatggataaacgaactgcagcatatttattcaattgcatactaatcaataatgaacaaactgctgatacatacaacatggaaaatgaaagaagccagatacaagagagtatgtactatatactgcatgatttaatttacatgggattctctaataataaacatatatggataaaaagcagatcagtaattgtcttgggtagggacaggtagggtagggagtagatagattgattgaaaaggatgagagggaacttttgatgttgtgagaatgttctatatcattacataattaactacatatatttgycaaaattcatctaattttacataaaattaataaattttagcttatgtaaaggataattcaataaagttgatttaaaatttttaaaaggcaggagaggatcactaaatcaaaatgctgaaaatttaaatgactatttagtatttagattggaagaaatctcaattttttagaaagtaatccatgaaaatgacaataaataataatctatgtgattgttagactgaggcttaagtctatattgtggtttctgtctacaaagaactaatgcatccagttttacctcataacaatggttggttgtctttagtgggtttttccccagcacataagtgtgctccaggcttttctatcttataaacaaacaaacaaacaaaaaatctcaccttaatatcctgcttcaattattaatttatattcctctttctccttacatgcaagcttctcaaaaaaaaatagatctcttcttattttcactagtcattgtatacactcctcaacctacagaaattaggccattacccacctccattactccagtgaagtcactccctggacatctcctaattcaacaatcataccagttttgtccttacttcacttctctatggtcacattatcatggactttcttgatatcctatttcttcatattctctctttcttgctaacagctccctttcaagtttatctttctgtttccttcataactgttggtgtttcctgggaatgctacaaacccttctcttattttacgcactctttccaagcaattttttctgtactcatggcttttattgactgcttg

SEQ ID NO: 714678 - DNA, 1191 bp, Homo sapiens
tttgtgtttgaattttaattccagctttattagtaacagctagaaactggaaacatgacaaaagtccttctaactggtaaatggataaacgaactgcagcatatttattcaattgcatactaatcaataatgaacaaactgctgatacatacaacatggaaaatgaaagaagccagatacaagagagtatgtactatatactgcatgatttaatttacatgggattctctaataataaacatatatggataaaaagcagatcagtaattgtcttgggtagggacaggtagggtagggagtagatagattgattgaaaaggatgagagggaacttttgatgttgtgagaatgttctatatcattacataattaactacatatatttgccaaaattcatctaattttacataaaattaataaattttagcttatgtaaaggataattcaataaagttgatttaaaatttttaaaaggcaggagaggatcactaaatcaaaatgctgaaaatttaaatgactatttagtatttagattggaagaaatctcaattttttagaaagtaatccatgaaaatgacaataaataataatctatgtgattgttagactgaggcttaagtctatattgtggtttctgtctacaaagaactaatgcatccagttttacctcataacaatggttggttgtctttagtgggtttttccccagcacataagtgtgctccaggcttttctatcttataaacaaacaaacaaacaaaaaatctcaccttaatatcctgcttcaattattaatttatattcctctttctccttacatgcaagcttctcaaaaaaaaatagatctcttcttattttcactagtcattgtatacactcctcaacctacagaaattaggccattacccacytccattactccagtgaagtcactccctggacatctcctaattcaacaatcataccagttttgtccttacttcacttctctatggtcacattatcatggactttcttgatatcctatttcttcatattctctctttcttgctaacagctccctttcaagtttatctttctgtttccttcataactgttggtgtttcctgggaatgctacaaacccttctcttattttacgcactctttccaagcaattttttctgtactcatggcttttattgactgcttg

SEQ ID NO: 714679 - DNA, 1191 bp, Homo sapiens
tttgtgtttgaattttaattccagctttattagtaacagctagaaactggaaacatgacaaaagtccttctaactggtaaatggataaacgaactgcagcatatttattcaattgcatactaatcaataatgaacaaactgctgatacatacaacatggaaaatgaaagaagccagatacaagagagtatgtactatatactgcatgatttaatttacatgggattctctaataataaacatatatggataaaaagcagatcagtaattgtcttgggtagggacaggtagggtagggagtagatagattgattgaaaaggatgagagggaacttttgatgttgtgagaatgttctatatcattacataattaactacatatatttgccaaaattcatctaattttacataaaattaataaattttagcttatgtaaaggataattcaataaagttgatttaaaatttttaaaaggcaggagaggatcactaaatcaaaatgctgaaaatttaaatgactatttagtatttagattggaagaaatctcaattttttagaaagtaatccatgaaaatgacaataaataataatctatgtgattgttagactgaggcttaagtctatattgtggtttctgtctacaaagaactaatgcatccagttttacctcataacaatggttggttgtctttagtgggtttttccccagcacataagtgtgctccaggcttttctatcttataaacaaacaaacaaacaaaaaatctcaccttaatatcctgcttcaattattaatttatattcctctttctccttacatgcaagcttctcaaaaaaaaatagatctcttcttattttcactagtcattgtatacactcctcaacctacagaaattaggccattacccacctccattactccagtgaagtcactccctggacatctcctaattcaacaatcataccagttttgtccttacttcacttctctatggtcacattatcatggactttcttgatatcctatttcttcatattctctctttcttgctaacagytccctttcaagtttatctttctgtttccttcataactgttggtgtttcctgggaatgctacaaacccttctcttattttacgcactctttccaagcaattttttctgtactcatggcttttattgactgcttg

SEQ ID NO: 714680 - DNA, 664 bp, Homo sapiens
gatatatgggactgtatcaaactaaaaacattaaacttccatgcagcaaaataaagagcacagtgaaagggtaacctacagaatagaaaaaaaaaatacaaaccacatgtctgataatggttaatattcagaaatattaaaaactagaatgtraaaactactacaaataaatttattaaaaaatgggcaagggaagaaaactagcctgacagcctgatgctgccaccactcatgactccattgcctttgtagtagaaccaccatgcaccctcatacaccaaccacacagggacccggaaactagtttccccagcatcatcgcctccagcacagccacaccacagcttccacaaacaagaactaactgcctataccactgggttatttgcagagactgctaatgttgaaaaagctgaaaaacttatatagacgttacactactgttcctagccagaaccaaagttaaagcactttaccccaccaacactataggacagacaatctatatggggaaaaagtctttccctctgaaagctactccataaaactgggttaaatgactgttccattagatgtacagatgttaacataggcacataagaaacatgaaaaagcaaggaaacatgacttcttcatgacaagccccacagtaaacatcatactg

SEQ ID NO: 714681 - DNA, 664 bp, Homo sapiens
gatatatgggactgtatcaaactaaaaacattaaacttccatgcagcaaaataaagagcacagtgaaagggtaacctacagaatagaaaaaaaaaatacaaaccacatgtctgataatggttaatattcagaaatattaaaaactagaatgtaaaaactactacaaataaatttattaaaaaatgggcaagggaagaaaactagcctgacagcctgatgctgccaccactcatgactccaytgcctttgtagtagaaccaccatgcaccctcatacaccaaccacacagggacccggaaactagtttccccagcatcatcgcctccagcacagccacaccacagcttccacaaacaagaactaactgcctataccactgggttatttgcagagactgctaatgttgaaaaagctgaaaaacttatatagacgttacactactgttcctagccagaaccaaagttaaagcactttaccccaccaacactataggacagacaatctatatggggaaaaagtctttccctctgaaagctactccataaaactgggttaaatgactgttccattagatgtacagatgttaacataggcacataagaaacatgaaaaagcaaggaaacatgacttcttcatgacaagccccacagtaaacatcatactg

SEQ ID NO: 714682 - DNA, 596 bp, Homo sapiens
cagcagctgggcgcggtggctcacgcctgtaatcccagcactttgggaggccgaggtggcggatcatgaggtcaggagatagagaccatcctggctaatacggtgaaaccgcgtctctactaaaaatacaaaaaattagctgggcatggtgacgggcgcctgtaatcctagctactcgggaggctgaggcaggagaaacacttgaacctgggaggcggaggttgccgtgagccgaaatcatgccactgcactccgacctgggcaacagagcgagactcagtctaaaagaaaaaaataatcagcagccagggctcatctttttcacttctaccttccagccagaactggacacccctgccaagaggggttgaggaggcatgtacttcctagaaatgcagcccaacaggacccacttccactctaggctggacctccagcagtgtgctcttcgccycagcctacagacttgaacatctcagtcatgttcttcattgtcccatcccatccctctcctcaaagccttggggtaattcccattgcctttaacacttcccacccacaaggcggcctggtcctgactcagcagagggatagtg

SEQ ID NO: 714683 - DNA, 845 bp, Homo sapiens
ttataggcgtgagccactgtgcctggctgagaccctgtcttaaacaaagaaacaaacaaataataataataaaaaaaacccttaaatccaaatagctaaaacattaaggaaaattgattatctcctataggtcaaggggtagggtagctttcaggttggttagttcagtggcttgatgtcagcaaggacgtaagttctctccttgtttcttttttgtcattttacggaaggtagctttttcttaattagctcccctcaagatcccaagatggctatggctcttcttaccgtcttttgctgagctgacaatctccagtggttttcctttcatgggaattagagagggctgcacacttatccctaaacaagctctaacaagaggaaggcaaaggactctgcaattgatttagastaaccaggacttccctctgagtcaagtgaggggcagggcaacaccggaacaaaaggaggactttgccagcaaggtggcggcagggatgcaggattgggcgtggtgactgggtaggcagccaatactatctgctatggttttgccattttcttttgtctttaaatcagacttctatagtgtttcctaacattttacttatagccccattatgaacttcacagttcgtagttcaaagtcacacagttagttatcttcttgtcctagtgatgctgctcaagccattgctgaaacccctgtctttcttttttgctcacccccactgcatctttcccattctgagctaaggacagcttcagatgaagaagagcatttgaggttggaataatggttaagtggtgagttagtattcttgcaggccatggtccttcaagag

SEQ ID NO: 714684 - DNA, 3163 bp, Homo sapiens
gtgaaatgtgtaatgtgtttggcaaaagtggtttgggatggctggagtgtgtgtttatctctagtgtgaagtctggccagaaaggtagattgtgatctttttcttttttttctttcagacagagtctcactctgtcacccaggctggagtgcagtggtgcaatctcagcacacggcaacctccacctcccaggttcaagtgattctcctgcctcagcctcccaggtagctgggattatagacacctgccatcacgcctggctaatttttgtagttttagtagagacggggtttcgctatgttggccaggctggtctcaaactcctgacctcaggtgatcctcctgcctcgacctcccaaagtgctgggattacaggcgtgagccactgcgcctggcctgattgtgatcttaaatgctagttctagggttatggaagtctgtactttggtctcataatatttttgtttctctggtgtagaaattattttgttatgttttacatactagttgaaagcaagagtctgtttttattttttcctcatcttcwacagtatctaatagagtagcttgcacataataagagttcaaagttgagttgaattgaattctgataaaatggtttaattttcccaagaaaatctagaagcctggactctttctactgaattaatcaaaaggagaaaatacataacttttttaattgtacaccttatatgagtctgtactgtagatattcatttttttgtcttctttatatctcctacctcacttttcctttttgtaatatgtaatcaccacaacaggcagtcttgggatcaaggagaggggcttgggagatatttaactcctcagtatctccatcaagtccccattctttgataggacagttaatcttttcataatcttcaatgcagtgctatgcagaggcatgttcttgtacctccttccaatcagagaactgcgtgtgtccctcaatgcagaaaatctggaaccaccatcaagaacaaacttatatacctttgagaaaggctgagagaaaaaaaaaaaagccgtatgtattaggtatcactattctctttacaggtgaaaaagctgattcataaaggttaaaggtctaagattatttagctagtaagcaaatgagttggaattagaacacaggtcttatattattttctttcctctattttttaggtatcccaaattccacttaaggttgatgaatggcctactggtcagttgaaaaaattcaatttgtgtagcattgtctagcacaaatgctgaaagtaggtctcctcatctgctaagggatataagcaaattcaaagcctctggcctttcttgtgacacatgcatgaaagtaggtaataaaaagaaaagtaaatattattttatgccacagtaagtataatgttaaaataatttcagtacgtttaattttctttcatatatatatatatgtatgtatatataattttttttttcttccttgagatgaagtcttgctctgtcacccaggctggaatgtagtggcgcaatcttggctcactgcaacctccgcctcccaggttcaagcaattctcctgcctcagcctccctagtagctgggattacaggtgcccaccagtacacctggctaatttttgtgtttttagtagagacagggttttgtcatgttggccaggctcatctcgaactcccgacctcgggtgatccacctgcttcggcctcccaaagtgctaggattacaggcatgggccactgcgcccagcccgataatttttattacagtaagtttgattagagtatgagtgaccaaaatctatttctaaaacatagagttattggtgaattagaagggggtggatgttattccttattgtcaacatggttcatgtagactgtggagatgaatggattacatttggcttttattaatgcttacaagctgtatttttccttttttgcttttttctagttcttattgaacaggattgatttgaaaaattcacatgtaaactcaggatgctgggctcttatatcgtttcatggtggatgatttgtgtaaaattgcaactgagtgaatttcattcaagcagtaggaatcttgaagatgtgagtccattactagcaaatgttatgttctgagtatattgtctgagtttttttttttacctgcagtcacggagcagtgacagttcataccattgtacatagccgtatcatacttcattaagcagttttgtattgctctaaaatcactgtttttgcttttttcctcaacaatatgtgtctgagttttttttctcttagtaggattaataataatctactttccctggctgtgatgctctttagagatcaaacagcatttctaagttgcaaggaatcttccaccctgttgtcttctgcttttacacacccacacagtcacatgttaatgaatatgatagttctgtaggttattatttctttatgcatataaatatgtttcatggtacttaaagacagggtagggtagtaatactgacactgatgttagagggaaaagtagtgaataaagccaataaaaaaaccagtaaaggatatatccatctgtgaggttttgcttatgctcattatagcaaactcttcattcattcactagataaaccactaattcgcattttaccagatgtttcccttaagcaatatgaagctactccttttccgctttgattctattttgcaatatatcttttctatcagcattagattcaaagttacccctggactgtgccctcagtttactcatctggcctttgtcactgaacaagaattgtactcgtggaggtgtattggcctttttgaatgagcgtcttcactcctgcctcactgcttttacttatgatgttcttgtttggaatttttcttcctcctatctgaatcctatcctgatgagccagttcatattccctcctttcaagaagccttcctcttcagtccacactgaccacctccttctctgaacacagcataaattaccttggctattgttaactaagtgtttcatgtcacctacctatagaaatattgaatcttttaaagcataggatgaggacctatcattctgatcatgaaacaagttcttctgcccagaatttaataacatattgttgaacag

SEQ ID NO: 714685 - DNA, 1033 bp, Homo sapiens
cctaatttttaagagttatagatttaaaaaatggaaatactctgaactgtaagaacaacggtggttttgagcctgttttgttttccaaacgcaacaaacaacacaatgaaaatctatttgaagatggaggagaagatccatttatgacagtgaaaacattgaaaacacaaatacaacaaaacattaggaacaagaaatgtgtaaatccaatgtgtgaaaaatatatacaacactcccttcagatcmcaaaagcttaacaaatggtaaaacgtatgtgttcttgaacaggcggacagacagccttaacatcatgaaaacgccagctctctcgataatctatatacttacaggagtcttcccccaacaacactgggtgtcttccctgcaactagaaaaattggtttcaaagtttatgtggaatataagacaagcaatgatagcaaaacaaactaataacaaccctagtaaagaagagaaatcaaagggaatgatccttattttgtattgaacacagttgatgccagcactaaagcagtgatactgccgcacgcacatgcaagagaccagagaaccagaacagaaggtaacaaaacaggcctgactatgtgagaactgagaatgtgacaagggaaccacctaagcccacaggactgtgctccagaggcacgcaccctttatcacactcaagagggcggacatgctttaccaccggagaacggggaaaacaaccgtattatttcaacaaataatttcaaaacaaaaaacaaagagggattgaaagagacttaaaagaaccataaaccaaaggcaatgtgtagatctgaactctgattctttatttttttttatttgaactctgattctaacaaaccaactggaagaaaaattctaagacaatcaggataatttaattcctgactagatatgtgatgatgataaggaactaatgtcaattttaagatgtaataatggtattgtagttttgtttttttaaaatgcattgtatagcaaggaagggtctacatatgtaaca

SEQ ID NO: 714686 - DNA, 1369 bp, Homo sapiens
gaagataatttaaatacttacccgtttggttatatgcctaattctttatgcctttacttttctgtttagtggcaccatttattccttgctttgtgaggtgttagctagaatctttgctgtgtaatgcttagttctttagaaattcaaagttcttggctcagcctcttgggttgtcctgccttttatagatgcagtaaatttgatcaccatcaagggctgttaaacaacatgcagtgataaaaatagttccctttgctgacattaggtgttttctaaaacagctcgataaattctggtcaacagaaactctttgtgatttcaaaagtcagaaagtgaactgttgacatggatctgggcagatggaaaataaattgccctgtagttgctcagaaatatgtcctaggtgctttttaccatgactagtggttgactgtgccttcactcgatgatgttataatagaagttatgcaagctcacgaggttacaagaggacttgtaggcggcgacttgtttgcaaggtgatgtatctgcaggaggcgtaatgggtagggtgagtgggagtggtaagttggtgagttttgcaaagagcattgattttaaatttcatttatcaggttcttgggaagggggatggtgatattggtaactgcaacaaagaaaccctggctctaaagtaaggccaggaagcagtagtagcagatgtagatctgttttcccccttactttctactccagtccttcctgcatttagcaaacttcactcctcaaactatactttcacatcaccattatctttattgcctattatattaaccctaacccaaaacaagtggaaaagtacaccaaactggaagtacagaggccaggtacctggttcctttctgtgtctacccagccaggtaaagttgagcaagtttcataacctttctggagccattgtctcttcttgagaagaatcartttgcactatatgatatctaagtacattttactaagacatctcaattaattttcaagcccttctatttctcatgaccaccctgactttttagacttgtttcctattagttctaaaacagggtatgtccagatacacaactttgtacctgcataatagttcttaaaataacttttgaacctttgtggtggagcctcgactctctagttctatgctctctcatcttgcctgtcctcatcttccttaccttgcaggccctaggaaggattgagctgcattccaatctacctgctgttcttttgcactggcttggttttaatgtgtatctccttcacctctcatgctccccaatctgctctcttcaacctttctttttttgcaaacttcctcaatcaaaatctcttctttcaa

SEQ ID NO: 714687 - DNA, 1264 bp, Homo sapiens
ctcacaagagggctctaccatgtcctgatgactccagcatagctttctctgtcctttcatctcactaaccatacagaaagccactaatgtgtgtacccaaccatactgctttgattttttcgttgcatgacatgtgttttaatagacatgaaatgcagatggggtgaggaaaaactgcttctgtaaaaattcctcctttctccattattggcttgcttactcaacttgcatctgtatcttctagtaaattgttttgctctcagagtttaacaaaaaaattcctttcttatcatgtttggagaattgcaatgyttttcattttttgtaaaaccaaggacactcctataattcattttgcatgtagctgcttcgtgtaggacaatctgtctttaaggagggatacagcactttaaatagagttttccctttaaatcaagcatctagttatttaaagaaagttattgattctggggatttaggttctgtggctcgggggggaggccctggcacctgtattttgaacaagtgagttaagtgagtgcaacgccgcagacacccacgagcctttgggactcgctattctcatctagaatggagaaattgagtggcaatcttgcatgtttgaccgaacttgggaggcttcattttggggtgccccaacttgtttttttagagaaatagaaaatgttttaaacaccagcaagcatctaatacagcttgcagacaagaagttacaaggaaaggcaaaagcacagcttctgctttgatgcattttgcaaaccagggtggggagggtgcagaatgggagcttaggctgagtgcctgtgggggtgggggttggggctgaggtcaaagtccaggcctaaagctgctgagaggcacatctgattggcattttgactcaacactatggattttttgctgaaggatttgcggggacagggaagggatagctccctccatcctcccctcaccccctccaccagaaaaccagttcttcacctcagggctctgtcttagataatcatcactccaactttctgcccatcaaggtgcaaggaggagcttggtttggtgggtgtgctgagggttgaatgggaggatgtaaattgcagtgaccaagacatggatggatgctcttgcaggcgaaagcatgtggtcttcacacattccccctcctccagcctcccactgcctgaggaccagcctcatcatcccagacaccggaagaaccaggatccttccctggccagtgcccccaact

SEQ ID NO: 714688 - DNA, 1264 bp, Homo sapiens
ctcacaagagggctctaccatgtcctgatgactccagcatagctttctctgtcctttcatctcactaaccatacagaaagccactaatgtgtgtacccaaccatactgctttgattttttcgttgcatgacatgtgttttaatagacatgaaatgcagatggggtgaggaaaaactgcttctgtaaaaattcctcctttctccattattggcttgcttactcaacttgcatctgtatcttctagtaaattgttttgctctcagagtttaacaaaaaaattcctttcttatcatgtttggagaattgcaatgcttttcattttttgtaaaaccaaggacactcctataattcattttgcatgtagctgcttcgtgtaggacaatctgtctttaaggagggatacagcactttaaatagagttttccctttaaatcaagcatctagttatttaaagaaagttattgattctggggatttaggttctgtggctcgggggggaggccctggcacctgtattttgaacaagtgagttaagtgagtgcaacgccgcagacacccacgagcctttgggactcgctattctcatctagaatggagaaattgagtggcaatcttgcatgtttgaccgaacttgggaggcttcattttggggtgccccaacttgtttttttagagaaatagaaaatgttttaaacaccagcaagcatctaatacagcttgcagacaagaagttacaaggaaaggcaaaagcacagcttctgctttgatgcattttgcaaaccagggtggggagggtgcagaatgggagcttaggctgagtgcctgtgggggtgggggttggggctgaggtcaaagtccaggcctraagctgctgagaggcacatctgattggcattttgactcaacactatggattttttgctgaaggatttgcggggacagggaagggatagctccctccatcctcccctcaccccctccaccagaaaaccagttcttcacctcagggctctgtcttagataatcatcactccaactttctgcccatcaaggtgcaaggaggagcttggtttggtgggtgtgctgagggttgaatgggaggatgtaaattgcagtgaccaagacatggatggatgctcttgcaggcgaaagcatgtggtcttcacacattccccctcctccagcctcccactgcctgaggaccagcctcatcatcccagacaccggaagaaccaggatccttccctggccagtgcccccaact

SEQ ID NO: 714689 - DNA, 1888 bp, Homo sapiens
cacctggagcccgtgaggtgggcattgctttcccggcatctcaaaaaatcttggctcagagagggtaagagattcaccttggctacaaagccagaccgcagccaagattctaagtctgtctgaaaccacagttgaagccctttctcccaggaaacacctccagctaggctgggaactgagggaggagaaggctagaccagtggctctcaaagtatggtttccaggccttctgtttcagaactctgggggtgaggcccaagaatctgtgttttagccagtcctcaggttggaggagtgctgagctggaccacattgtctttgaggaaggaactaaaatgagcatatgagcatgagagggcatataggagaccaggttagaccacttcagctcttatgggcagaatgggggtgacaaagactcaccaggccccatggagcactcttttcagtgaggctttgtccttgggcactgtatttggcctgcctcatccaattttagcaagaatcctgctaagtccatttggagagactcccccagcctcaatacttgaccacccccaatatctgatcaaactcccccacccacccttgatatctgaccacacttgctaagttgggttggcgagaatccccctacccttgatgtctcctcttagtgattttccawcccctggcccctgactgctgctgggctggaaatcctcattgtccttgctgtactcagagttaagccccatttctctcccctgttgcagtagtcttgacacttatcaaaatggtcccgaataaagtctttcttgcattttaacaagtgtcagaataatttttgctttagcagagggaaagggaggagtctcattctcccctcccccagttccaaatacggcatctcaaaccaaaacgactcagaggataattttaccaaaatcaccccacagggctctgcaggcctggagtttggttgttatgaaatgccccaacctacaaaagcggattggggtagcagctggaattcgtcagaggcacacacggtgagcaccctgggcatgggctttgaccctgcctccacccccaatcccagcccccaccacctgcttctcatcccaactttgtgacccaggtcgcaggccacgccccctgctggccagggccgacacacgcctccacaggacagacttcctggggttcccgaggcaatttgctgtgagctttcgctaaaaaccgacctccctcagactctaagcgggtggcccatcagcacatgacaacaggcaagctagggctggaggtgtggcccaagccatggtccttcaggggaacaggcagcccagccagaggccggacctaccgcttaccgagcctggaaaagtcccgctgagtcagttaggtctcatccagagagagcaagaggaggctcctttctttttttctttttccagagagagcaagaggaggctcctttctttttttctttttccagagagagcaagaggagcctcctttctttttttcttttgtttttttcttttcttttttttttttttttgagacggagtcttgctgtgtcacccaaactggagtgcaatggcaagatctcagctcactgcaacctccgcctcccagattcaagcgtttctcctgcctcgcctccccagtagctaggattacagacacctgtcactacgcccatctaatttttgtattttttgtagagacggggtttaaccatgttggccaggctggtctggaactcctgacctcaggcgatccacccgcctcagcctcccaaagtgctgggattacaggcctgagccaccgcacctggccagaggctcctttcaaagcaggcactggtcttctcacagaagctcgttttctgcctagcctg

SEQ ID NO: 714690 - DNA, 2056 bp, Homo sapiens
aacttaacaacgtacagatgtcatttatcctgtacattgtgtcaagagacatattttaaagttggtatataatgtkatttctctgattcctgaatctaaaggaagttgaggcataacggaaagaggacaggtgttggagctcgacttacctgggttcaaattccagcattactacttagtgggctccacatctttttaagtgggataatagtatctaccaatgggattgctgtcatggtaaatggtgattaagtgcctaacaaactgtaggcacttatacaaaggcggcttttgttattacctgacaacaacaggctttctctaaaattgctaactaaagatttgcaaagataaatatactaactttgaatatgtataaaataacagggagcagttgggcctatggccaacagaaaaatacataatgtacctgaaggcattcaaaaacaaaaaacagcaaaacaattacaaataacagtaacaacaacaacaaacccactgtgcctacctgaccaaaccattggtctctaaacattcaaattcaaacactgtataatttaagaaaggtcattagaaattaatttgcctttcagcaaatttatgtaccagacaggcaaaaggcttttacattttttaacaaatagttttcaaactcattttaagtttccccttgttcctctgaccaacacatcctaactttgttttactgctcccatgccgattcagagatcttgaacgttcagacaaccacaagaagggtattcagtttctctgtctgactacctgaattcccgggaaagccaacagaaatagaacagaatggagttacagaggatgtttcatttccttcaggcttctgccacattactatgattttcttcacggtagaggcccatggaactatgtaaatagctatgacttctctaaggaaaagactgaatttttagttgtattacatttccttgtattttattattgttctacattgtgtttcaggaaagttttggaaaatacaaagattttacccatgggagggaaactgctaaaaacaattacctgggtttggagctttttttcaaaaaaggttttcctttcgcaactatttgggagtttacttccttgcaaaagatgcgttttctgaaaattttccattggcagcgggccaatgccataattactttcaattaaaccctcaagtgtttccctttctctttgttatcaccacaaacaattccttcctctgagtggcagatttagtctaactcagcaagcttccagagcagcgtatgaggccacaagacaacagaaattaaaacttttgtcttgttttatgtgttcaatccagctgtcgttgaatctccagtgtccagctcaatgtgagggacacattggaggccagagtgtttgtagaaagaagaggttgcagatgaagattgtgggagacagagaggttctgtttcccaaagtttcgtgtggctgggcaggaatgtgaaattattagtcaaaaatttatcgcaggataaaaccacaatcagatcaaatatattaaagaaatgactcataaatcaagactacgtgtgcacccattaagttggaaatacctacactctcccagaacttatttcacgctccaaatatattcctaaccatacaattttatggtctgtctcatgtagagtagcataccagccctaactattttaattccattatttaacttttcaaaccatgtttctacaaagtatttaagatttcttgcaggtaacttccacaattgtaggaaggcagtggcagcttaacaacttttccccaccttctctccaaaccagtcctctcccatttccacaccagcccaactctagccctcgtgtcctaattaaggcaaaaaatacatatctgaagaacaaaagcttcagcttaaccaaagtactaagcctagaagttaggcctaaacctcatgggtcaggaaaacttaaaaaggcagaaattgttcactttcacaaatgaaaatccaagatggcttctttgacttgcttgggtgaaaattgctttctct

SEQ ID NO: 714691 - DNA, 2056 bp, Homo sapiens
aacttaacaacgtacagatgtcatttatcctgtacattgtgtcaagagacatattttaaagttggtatataatgttatttctctgattcctgaatctaaaggaagttgaggcataacggaaagaggacaggtgttggagctcgacttacctgggttcaaattccagcattactacttagtgggctccacatctttttaagtgggataatagtatctaccaatgggattgctgtyatggtaaatggtgattaagtgcctaacaaactgtaggcacttatacaaaggcggcttttgttattacctgacaacaacaggctttctctaaaattgctaactaaagatttgcaaagataaatatactaactttgaatatgtataaaataacagggagcagttgggcctatggccaacagaaaaatacataatgtacctgaaggcattcaaaaacaaaaaacagcaaaacaattacaaataacagtaacaacaacaacaaacccactgtgcctacctgaccaaaccattggtctctaaacattcaaattcaaacactgtataatttaagaaaggtcattagaaattaatttgcctttcagcaaatttatgtaccagacaggcaaaaggcttttacattttttaacaaatagttttcaaactcattttaagtttccccttgttcctctgaccaacacatcctaactttgttttactgctcccatgccgattcagagatcttgaacgttcagacaaccacaagaagggtattcagtttctctgtctgactacctgaattcccgggaaagccaacagaaatagaacagaatggagttacagaggatgtttcatttccttcaggcttctgccacattactatgattttcttcacggtagaggcccatggaactatgtaaatagctatgacttctctaaggaaaagactgaatttttagttgtattacatttccttgtattttattattgttctacattgtgtttcaggaaagttttggaaaatacaaagattttacccatgggagggaaactgctaaaaacaattacctgggtttggagctttttttcaaaaaaggttttcctttcgcaactatttgggagtttacttccttgcaaaagatgcgttttctgaaaattttccattggcagcgggccaatgccataattactttcaattaaaccctcaagtgtttccctttctctttgttatcaccacaaacaattccttcctctgagtggcagatttagtctaactcagcaagcttccagagcagcgtatgaggccacaagacaacagaaattaaaacttttgtcttgttttatgtgttcaatccagctgtcgttgaatctccagtgtccagctcaatgtgagggacacattggaggccagagtgtttgtagaaagaagaggttgcagatgaagattgtgggagacagagaggttctgtttcccaaagtttcgtgtggctgggcaggaatgtgaaattattagtcaaaaatttatcgcaggataaaaccacaatcagatcaaatatattaaagaaatgactcataaatcaagactacgtgtgcacccattaagttggaaatacctacactctcccagaacttatttcacgctccaaatatattcctaaccatacaattttatggtctgtctcatgtagagtagcataccagccctaactattttaattccattatttaacttttcaaaccatgtttctacaaagtatttaagatttcttgcaggtaacttccacaattgtaggaaggcagtggcagcttaacaacttttccccaccttctctccaaaccagtcctctcccatttccacaccagcccaactctagccctcgtgtcctaattaaggcaaaaaatacatatctgaagaacaaaagcttcagcttaaccaaagtactaagcctagaagttaggcctaaacctcatgggtcaggaaaacttaaaaaggcagaaattgttcactttcacaaatgaaaatccaagatggcttctttgacttgcttgggtgaaaattgctttctct

SEQ ID NO: 714692 - DNA, 753 bp, Homo sapiens
caagcttgtggtctaaaaagaatatgaagacaatagcaaatggacgtttttaacacagtttcttagtatttacagtattttttcttctctagctgccatcccttcaaagctggtcaatggtttttctggggcttttttcacctcacattcagagcaaggaggcatttgcaatttctgttaaacaatacagaaaagacaattcgaagaatcaaaataacacattttaaggtaaaaattgaaaagtctaaaagaataagaatggaaattcaaagatctcaacaaatatcttagagaaaatgaacacaggacagaaatgaaacaaatgtgaagatgttaattatatttcataaaagtacataacaatattttgcctaaaaacagcaaaacatttcaaaaactattttgaaaaaactttgcccaagccattcaattctgtttaatctaattcaaagtttgaaaataagttaaatctaactccacgttttagtattaagtgaaataaatattaagaatgtcaatgatacaatatttttggtcaagtataatacagtacaaataaaaattcagaattaagctcttgacttgtgtttattttgtttgttcttgtragtaatatgtacttcttttcacctcctctgcttcctcaaatcctctttagtctcctttgtacaaaaagaaatatatgcctgtgtgatcatccctgtttatttttgttttgtttcctggtctgtgagagggagggtggaagtgagg

SEQ ID NO: 714693 - DNA, 2020 bp, Homo sapiens
aaatagactttgctttatgttttagctctgatacttatccattgatgaccttgatcaagttatttttcgctgggcttcgggttctttggctgtaaaatgggtctgcttctttatggaattaatttaagggtaaaattagaaaacataaacaggtattcagcatggattaacaaatagtgatcgttcctttttttctttctcctcctttgattattgtcattactaacattaatggttacaaaacaatatttatgatcagttgacactgacattattttatgtcacagaatcaacagtgatgcaattaccaaacatagaaaaataagaggaaaggtagagagaagagaaggaaaggaaatgaagaaggtgctgagtagaggggctgcaaaaacgtttcttacgaatgctccttttttaacaataaagctaaaatataacaaaaattttaggtgggaaattaaagaaagaaaaaaataaaattaaaaagagaaataagctttcctgtattaggctaacttgtcccagaggcagcaatgggcacagcccagacccagggaatgtcttgataatactatctaagaagccaggacacaaaggaatstgttccggagattctcccagcacttcctccacacagggagaagaaaaccaaagtttcctttgttttataatatgagtttatagattcttgttctctgtaactagtaacttcaagtattctgttttatctaaaaagtacaatgaaggtcataagaagcctgagtgggcctgaactacagctgtctaggcaccatagtgaaggttagaagataaaccagtgcaaggctctttaaagcaaaatctagataacagacatctggattgcttggcaatggtcatgtgtaatccttagttatgaacctgtcacaatttaattaattgttctgcctctgtatccttgcttttgagccactgtaactgtaagcttgcttcaagctagcccaccccctttttaaagtgtgtataaaagtcaagtgctgtctttgttctgagcccagtgtttgtatgttaagtctgctgggtgtgagtgcactcaataaagatcctgccataccccaaggtctctctggtcctcctgattctgcaacaaattgtctatattcatgttttgctttggaaagaaaagatacttgagaaaatataggcttcaagatgacaccaaattgtgtttatatatttaaagatttatccaataaaacttgggtttggggttataatggtaatcactgaatatagaattaaaccaatgggcttacttctagggaagctcccttggaaacaacataatttaattcttaaataaaacctcttaatttaaaaaagctacactacattacagggtaagaggtggggtcactgagagaaaactgcaactatagctaagatctaaggagagtaaccaatgttatctaaagagtaaatataattttatcgaaaactattgcagtaacttttgcttccacaaatgtatttttatttttccctttttggccacacaaatgaaatatagacaatctaataaattacctttgttatccttaaattgcctcaacactaagagccaaattgagcttcaaaaatagttctatactttaatcattcattccacaaacatttactgaatttctattatgagccaggcactgactgaaaatagaacaataaaaaaagtcaaggactttgatgtcagtggaggttatactctagtggagaaagcataaatacatacataaacaagaacatattaaaaagagtatcagagagatttaagtgtaatgatggaaagtgcctgcaggtcacatccagtggcaacctctgtaagatgatagcacaggctttgagatcaggcatatctatgttcaagtcccagttctttcacctactaattatctatcaggggaagttctgcaatatccttgggctttaatttaatcaactgaaaataaggatattaatatccatcacagacaatttctataca

SEQ ID NO: 714694 - DNA, 2020 bp, Homo sapiens
aaatagactttgctttatgttttagctctgatacttatccattgatgaccttgatcaagttatttttcgctgggcttcgggttctttggctgtaaaatgggtctgcttctttatggaattaatttaagggtaaaattagaaaacataaacaggtattcagcatggattaacaaatagtgatcgttcctttttttctttctcctcctttgattattgtcattactaacattaatggttacaaaacaatatttatgatcagttgacactgacattattttatgtcacagaatcaacagtgatgcaattaccaaacatagaaaaataagaggaaaggtagagagaagagaaggaaaggaaatgaagaaggtgctgagtagaggggctgcaaaaacgtttcttacgaatgctccttttttaacaataaagctaaaatataacaaaaattttaggtgggaaattaaagaaagaaaaaaataaaattaaaaagagaaataagctttcctgtattaggctaacttgtcccagaggcagcaatgggcacagcccagacccagggaatgtcttgataatactatctaagaagccaggacacaaaggaatgtgttccggagattctcccagcacttcctccacacagggagaagaaaaccaaagtttcctttgttttataatatgagtttatagattcttgttctctgtaactagtaacttcaagtattctgttttatctaaaaagtacaatgaaggtcataagaagcctgagtgggcctgaactacagctgtctaggcaccatagtgaaggttagaagataaaccagtgcaaggctctttaaagcaaaatctagataacagacatctggattgcttggcaatggtcatgtgtaatccttagttatgaacctgtcacaatttaattaattgttctgcctctgtatccttgcttttgagccactgtaactgtaagcttgcttcaagctagcccaccccctttttaaagtgtgtataaaagtcaagtgctgtctttgttctgagcccagtgtttgtatgttaagtctgctgggtgtgagtgcactcaataaagatcctgccataccccaaggyctctctggtcctcctgattctgcaacaaattgtctatattcatgttttgctttggaaagaaaagatacttgagaaaatataggcttcaagatgacaccaaattgtgtttatatatttaaagatttatccaataaaacttgggtttggggttataatggtaatcactgaatatagaattaaaccaatgggcttacttctagggaagctcccttggaaacaacataatttaattcttaaataaaacctcttaatttaaaaaagctacactacattacagggtaagaggtggggtcactgagagaaaactgcaactatagctaagatctaaggagagtaaccaatgttatctaaagagtaaatataattttatcgaaaactattgcagtaacttttgcttccacaaatgtatttttatttttccctttttggccacacaaatgaaatatagacaatctaataaattacctttgttatccttaaattgcctcaacactaagagccaaattgagcttcaaaaatagttctatactttaatcattcattccacaaacatttactgaatttctattatgagccaggcactgactgaaaatagaacaataaaaaaagtcaaggactttgatgtcagtggaggttatactctagtggagaaagcataaatacatacataaacaagaacatattaaaaagagtatcagagagatttaagtgtaatgatggaaagtgcctgcaggtcacatccagtggcaacctctgtaagatgatagcacaggctttgagatcaggcatatctatgttcaagtcccagttctttcacctactaattatctatcaggggaagttctgcaatatccttgggctttaatttaatcaactgaaaataaggatattaatatccatcacagacaatttctataca

SEQ ID NO: 714695 - DNA, 2020 bp, Homo sapiens
aaatagactttgctttatgttttagctctgatacttatccattgatgaccttgatcaagttatttttcgctgggcttcgggttctttggctgtaaaatgggtctgcttctttatggaattaatttaagggtaaaattagaaaacataaacaggtattcagcatggattaacaaatagtgatcgttcctttttttctttctcctcctttgattattgtcattactaacattaatggttacaaaacaatatttatgatcagttgacactgacattattttatgtcacagaatcaacagtgatgcaattaccaaacatagaaaaataagaggaaaggtagagagaagagaaggaaaggaaatgaagaaggtgctgagtagaggggctgcaaaaacgtttcttacgaatgctccttttttaacaataaagctaaaatataacaaaaattttaggtgggaaattaaagaaagaaaaaaataaaattaaaaagagaaataagctttcctgtattaggctaacttgtcccagaggcagcaatgggcacagcccagacccagggaatgtcttgataatactatctaagaagccaggacacaaaggaatgtgttccggagattctcccagcacttcctccacacagggagaagaaaaccaaagtttcctttgttttataatatgagtttatagattcttgttctctgtaactagtaacttcaagtattctgttttatctaaaaagtacaatgaaggtcataagaagcctgagtgggcctgaactacagctgtctaggcaccatagtgaaggttagaagataaaccagtgcaaggctctttaaagcaaaatctagataacagacatctggattgcttggcaatggtcatgtgtaatccttagttatgaacctgtcacaatttaattaattgttctgcctctgtatccttgcttttgagccactgtaactgtaagcttgcttcaagctagcccaccccctttttaaagtgtgtataaaagtcaagtgctgtctttgttctgagcccagtgtttgtatgttaagtctgctgggtgtgagtgcactcaataaagatcctgccataccccaaggtctctctggtcctcctgattctgcaacaaattgtctatattcatgttttgctttggaaagaaaagatacttgagaaaatataggcttcaagatgacaccaaattgtgtttatatatttaaagatttatccaataaaacttgggtttggggttataatggtaatcactgaatatagaattaaaccaatgggcttacttctagggaagctcccttggaaacaacataatttaattcttaaataaaacctcttmatttaaaaaagctacactacattacagggtaagaggtggggtcactgagagaaaactgcaactatagctaagatctaaggagagtaaccaatgttatctaaagagtaaatataattttatcgaaaactattgcagtaacttttgcttccacaaatgtatttttatttttccctttttggccacacaaatgaaatatagacaatctaataaattacctttgttatccttaaattgcctcaacactaagagccaaattgagcttcaaaaatagttctatactttaatcattcattccacaaacatttactgaatttctattatgagccaggcactgactgaaaatagaacaataaaaaaagtcaaggactttgatgtcagtggaggttatactctagtggagaaagcataaatacatacataaacaagaacatattaaaaagagtatcagagagatttaagtgtaatgatggaaagtgcctgcaggtcacatccagtggcaacctctgtaagatgatagcacaggctttgagatcaggcatatctatgttcaagtcccagttctttcacctactaattatctatcaggggaagttctgcaatatccttgggctttaatttaatcaactgaaaataaggatattaatatccatcacagacaatttctataca

SEQ ID NO: 714696 - DNA, 2020 bp, Homo sapiens
aaatagactttgctttatgttttagctctgatacttatccattgatgaccttgatcaagttatttttcgctgggcttcgggttctttggctgtaaaatgggtctgcttctttatggaattaatttaagggtaaaattagaaaacataaacaggtattcagcatggattaacaaatagtgatcgttcctttttttctttctcctcctttgattattgtcattactaacattaatggttacaaaacaatatttatgatcagttgacactgacattattttatgtcacagaatcaacagtgatgcaattaccaaacatagaaaaataagaggaaaggtagagagaagagaaggaaaggaaatgaagaaggtgctgagtagaggggctgcaaaaacgtttcttacgaatgctccttttttaacaataaagctaaaatataacaaaaattttaggtgggaaattaaagaaagaaaaaaataaaattaaaaagagaaataagctttcctgtattaggctaacttgtcccagaggcagcaatgggcacagcccagacccagggaatgtcttgataatactatctaagaagccaggacacaaaggaatgtgttccggagattctcccagcacttcctccacacagggagaagaaaaccaaagtttcctttgttttataatatgagtttatagattcttgttctctgtaactagtaacttcaagtattctgttttatctaaaaagtacaatgaaggtcataagaagcctgagtgggcctgaactacagctgtctaggcaccatagtgaaggttagaagataaaccagtgcaaggctctttaaagcaaaatctagataacagacatctggattgcttggcaatggtcatgtgtaatccttagttatgaacctgtcacaatttaattaattgttctgcctctgtatccttgcttttgagccactgtaactgtaagcttgcttcaagctagcccaccccctttttaaagtgtgtataaaagtcaagtgctgtctttgttctgagcccagtgtttgtatgttaagtctgctgggtgtgagtgcactcaataaagatcctgccataccccaaggtctctctggtcctcctgattctgcaacaaattgtctatattcatgttttgctttggaaagaaaagatacttgagaaaatataggcttcaagatgacaccaaattgtgtttatatatttaaagatttatccaataaaacttgggtttggggttataatggtaatcactgaatatagaattaaaccaatgggcttacttctagggaagctcccttggaaacaacataatttaattcttaaataaaacctcttaatttaaaaaagctacactacattacagggtaagaggtggggtcactgagagaaaactgcaactatagctaagatctaaggagagtaaccaatgttatctaaagagtaaatataattttatcgaaaactattgcagtaacttttgcttccacaaatgtatttttatttttccctttttggccacacaaatgaaatmtagacaatctaataaattacctttgttatccttaaattgcctcaacactaagagccaaattgagcttcaaaaatagttctatactttaatcattcattccacaaacatttactgaatttctattatgagccaggcactgactgaaaatagaacaataaaaaaagtcaaggactttgatgtcagtggaggttatactctagtggagaaagcataaatacatacataaacaagaacatattaaaaagagtatcagagagatttaagtgtaatgatggaaagtgcctgcaggtcacatccagtggcaacctctgtaagatgatagcacaggctttgagatcaggcatatctatgttcaagtcccagttctttcacctactaattatctatcaggggaagttctgcaatatccttgggctttaatttaatcaactgaaaataaggatattaatatccatcacagacaatttctataca

SEQ ID NO: 714697 - DNA, 2020 bp, Homo sapiens
aaatagactttgctttatgttttagctctgatacttatccattgatgaccttgatcaagttatttttcgctgggcttcgggttctttggctgtaaaatgggtctgcttctttatggaattaatttaagggtaaaattagaaaacataaacaggtattcagcatggattaacaaatagtgatcgttcctttttttctttctcctcctttgattattgtcattactaacattaatggttacaaaacaatatttatgatcagttgacactgacattattttatgtcacagaatcaacagtgatgcaattaccaaacatagaaaaataagaggaaaggtagagagaagagaaggaaaggaaatgaagaaggtgctgagtagaggggctgcaaaaacgtttcttacgaatgctccttttttaacaataaagctaaaatataacaaaaattttaggtgggaaattaaagaaagaaaaaaataaaattaaaaagagaaataagctttcctgtattaggctaacttgtcccagaggcagcaatgggcacagcccagacccagggaatgtcttgataatactatctaagaagccaggacacaaaggaatgtgttccggagattctcccagcacttcctccacacagggagaagaaaaccaaagtttcctttgttttataatatgagtttatagattcttgttctctgtaactagtaacttcaagtattctgttttatctaaaaagtacaatgaaggtcataagaagcctgagtgggcctgaactacagctgtctaggcaccatagtgaaggttagaagataaaccagtgcaaggctctttaaagcaaaatctagataacagacatctggattgcttggcaatggtcatgtgtaatccttagttatgaacctgtcacaatttaattaattgttctgcctctgtatccttgcttttgagccactgtaactgtaagcttgcttcaagctagcccaccccctttttaaagtgtgtataaaagtcaagtgctgtctttgttctgagcccagtgtttgtatgttaagtctgctgggtgtgagtgcactcaataaagatcctgccataccccaaggtctctctggtcctcctgattctgcaacaaattgtctatattcatgttttgctttggaaagaaaagatacttgagaaaatataggcttcaagatgacaccaaattgtgtttatatatttaaagatttatccaataaaacttgggtttggggttataatggtaatcactgaatatagaattaaaccaatgggcttacttctagggaagctcccttggaaacaacataatttaattcttaaataaaacctcttaatttaaaaaagctacactacattacagggtaagaggtggggtcactgagagaaaactgcaactatagctaagatctaaggagagtaaccaatgttatctaaagagtaaatataattttatcgaaaactattgcagtaacttttgcttccacaaatgtatttttatttttccctttttggccacacaaatgaaatatagacaatctaataaattacctttgttatccttaaattgcctcaacactaagagccaaattgagcttcaaaaatagttctatactttaatcattcattccacaaacatttactgartttctattatgagccaggcactgactgaaaatagaacaataaaaaaagtcaaggactttgatgtcagtggaggttatactctagtggagaaagcataaatacatacataaacaagaacatattaaaaagagtatcagagagatttaagtgtaatgatggaaagtgcctgcaggtcacatccagtggcaacctctgtaagatgatagcacaggctttgagatcaggcatatctatgttcaagtcccagttctttcacctactaattatctatcaggggaagttctgcaatatccttgggctttaatttaatcaactgaaaataaggatattaatatccatcacagacaatttctataca

SEQ ID NO: 714698 - DNA, 2020 bp, Homo sapiens
aaatagactttgctttatgttttagctctgatacttatccattgatgaccttgatcaagttatttttcgctgggcttcgggttctttggctgtaaaatgggtctgcttctttatggaattaatttaagggtaaaattagaaaacataaacaggtattcagcatggattaacaaatagtgatcgttcctttttttctttctcctcctttgattattgtcattactaacattaatggttacaaaacaatatttatgatcagttgacactgacattattttatgtcacagaatcaacagtgatgcaattaccaaacatagaaaaataagaggaaaggtagagagaagagaaggaaaggaaatgaagaaggtgctgagtagaggggctgcaaaaacgtttcttacgaatgctccttttttaacaataaagctaaaatataacaaaaattttaggtgggaaattaaagaaagaaaaaaataaaattaaaaagagaaataagctttcctgtattaggctaacttgtcccagaggcagcaatgggcacagcccagacccagggaatgtcttgataatactatctaagaagccaggacacaaaggaatgtgttccggagattctcccagcacttcctccacacagggagaagaaaaccaaagtttcctttgttttataatatgagtttatagattcttgttctctgtaactagtaacttcaagtattctgttttatctaaaaagtacaatgaaggtcataagaagcctgagtgggcctgaactacagctgtctaggcaccatagtgaaggttagaagataaaccagtgcaaggctctttaaagcaaaatctagataacagacatctggattgcttggcaatggtcatgtgtaatccttagttatgaacctgtcacaatttaattaattgttctgcctctgtatccttgcttttgagccactgtaactgtaagcttgcttcaagctagcccaccccctttttaaagtgtgtataaaagtcaagtgctgtctttgttctgagcccagtgtttgtatgttaagtctgctgggtgtgagtgcactcaataaagatcctgccataccccaaggtctctctggtcctcctgattctgcaacaaattgtctatattcatgttttgctttggaaagaaaagatacttgagaaaatataggcttcaagatgacaccaaattgtgtttatatatttaaagatttatccaataaaacttgggtttggggttataatggtaatcactgaatatagaattaaaccaatgggcttacttctagggaagctcccttggaaacaacataatttaattcttaaataaaacctcttaatttaaaaaagctacactacattacagggtaagaggtggggtcactgagagaaaactgcaactatagctaagatctaaggagagtaaccaatgttatctaaagagtaaatataattttatcgaaaactattgcagtaacttttgcttccacaaatgtatttttatttttccctttttggccacacaaatgaaatatagacaatctaataaattacctttgttatccttaaattgcctcaacactaagagccaaattgagcttcaaaaatagttctatactttaatcattcattccacaaacatttactgaatttctattatgagccaggcactgactgaaaatagaacaataaaaaaagtcaaggactttgatgtcagtggaggttataytctagtggagaaagcataaatacatacataaacaagaacatattaaaaagagtatcagagagatttaagtgtaatgatggaaagtgcctgcaggtcacatccagtggcaacctctgtaagatgatagcacaggctttgagatcaggcatatctatgttcaagtcccagttctttcacctactaattatctatcaggggaagttctgcaatatccttgggctttaatttaatcaactgaaaataaggatattaatatccatcacagacaatttctataca

SEQ ID NO: 714699 - DNA, 621 bp, Homo sapiens
tttcatattgatttctgtgcactttttatcagagcaatcaatgaaaatctaagttaacaaagatgtggcatcattgagagaaatgtagtgtcatgaaatatgaactacttcaagctagtagttcataccatgtctgatggatgctatgttttgctgtgtttttctcataaatttaaaatmtggtagatgcaatctcaaagagagctttgatacatagccaataagagtggtgtctctaaatggccaacattttagatatcaatgtcaattttttccatgagcttgtttttcatttcagggctgaaaaacttcatgagtctcattttgttgttattttgcttcctaaaactgcagcttcaacttattactcaaatctctaaatatctctctatcaagcattattgatttgctgaatgtttaaaagcacaaagggcacagttaaagggcttttctgtgagtgtggttactcacccctcataaataaattctgtatagatataatttttatgggaaatttccttaaaatggaatattatgccctctccccaccaagttttctattatcagaccctttacctaaacactgttcatttacacctttttaacataagcatattgata

SEQ ID NO: 714700 - DNA, 621 bp, Homo sapiens
tttcatattgatttctgtgcactttttatcagagcaatcaatgaaaatctaagttaacaaagatgtggcatcattgagagaaatgtagtgtcatgaaatatgaactacttcaagctagtagttcataccatgtctgatggatgctatgttttgctgtgtttttctcataaatttaaaatatggtagatgcaatctcaaagagagctttgatacatagccaataagagtggtgtctctaaatggccaacattttagatatcaatgtcaattttttccatgagcttgtttttcatttcagggctgaaaaacttcatgagtctcattttgttgttattttgcttcctaaaactgcagcttcaacttattactcaaatctctaaatatctctctatcaagcattattgatttgctgaatgtttaaaagcacaaagggcacagttaaagggcttttctgtgagtktggttactcacccctcataaataaattctgtatagatataatttttatgggaaatttccttaaaatggaatattatgccctctccccaccaagttttctattatcagaccctttacctaaacactgttcatttacacctttttaacataagcatattgata

SEQ ID NO: 714701 - DNA, 656 bp, Homo sapiens
  misc_feature 28: n = A,T,C or G
cttcggtgcttgctcttaagaatgtgtntatacgtgactctgtgtgcatgtattccagttgacttacatttaaaaatactaccaacatatttgataccatggtcccatgaattcattcatggcattcttttagcatttcctgggttgttgaaatcggcctagtgcctacctgggtgctcaggagctgaagcagtatatatgtagaaggagtattccagcagatatgttttctgctcctgagtttaaatttagattttatcaattcttctacagattctggctcacatagactttgygctcaagcatagccgtatgatagaatcacatcgccaataaacagtataaaaactctactgcaaatagcctctgttagaagagcctcccatctcaattcattttagagtaatcaataaaataggcttggaccacaatgttggcaaatagatttttcaaaaataataatactgttgcaaagaggccggtggcacaggttaaaaaaaaataccaaaaaattagaaatatctaatagagaaatctgcaaatgatggtggaatttcctttgcaggaggctgctcccctcaggcccgtcctgctgccattcggcagtgcattccagcctgcagaaaacctttctcctactgtacacaggtgagtca

SEQ ID NO: 714702 - DNA, 656 bp, Homo sapiens
  misc_feature 28: n = A,T,C or G
cttcggtgcttgctcttaagaatgtgtntatacgtgactctgtgtgcatgtattccagttgacttacatttaaaaatactaccaacatatttgataccatggtcccatgaattcattcatggcattcttttagcatttcctgggttgttgaaatcggcctagtgcctacctgggtgctcaggagctgaagcagtatatatgtagaaggagtattccagcagatatgttttctgctcctgagtttaaatttagattttatcaattcttctacagattctggctcacatagactttgtgctcaagcatagccgtatgatagaatcacatcgccaataaacagtataaaaactctactgcaaatagcctctgttagaagagcctcccatctcaattcattttagagtaatcartaaaataggcttggaccacaatgttggcaaatagatttttcaaaaataataatactgttgcaaagaggccggtggcacaggttaaaaaaaaataccaaaaaattagaaatatctaatagagaaatctgcaaatgatggtggaatttcctttgcaggaggctgctcccctcaggcccgtcctgctgccattcggcagtgcattccagcctgcagaaaacctttctcctactgtacacaggtgagtca

SEQ ID NO: 714703 - DNA, 457 bp, Homo sapiens
tgtaaaatacctagggctcctctttttttttcagcttccaccagtttgaagtaatcacccagagtcatctaacctggagctcacagtgtcttttctcaggcaactgctacatggatatttacagagtcaaaaattctcagaccaaggcctgcattggaaaggatctccttctctcctctacttcctgttttgctgtccttgarattatcttaccttacttacaccaggacctataggttgaaaatagtggtgcatattttgttggtgctctataacttggaagattgattcaatcccttctctgctggagatttataggatgactagggcaatatattatctctccattaacatcacttcattgccatggactagtagaaaaatcaatttaagatagtctagaattatgttttaatgtgtgctactattatatatacagatcaccataactatttga

SEQ ID NO: 714704 - DNA, 2679 bp, Homo sapiens
tgtggaaggaaaacgatgtcatagaagtagagaaaatagtgtttactagaggatgggaaggggaaaagggagggagggataaagagagattggttaacagatacaaaattatagttagatgaaagggtgactgtagttaacaatttattgtacattttcaaatagctgggagagattttgaatgttctcagcacaaataaattataaataattgaggtgataaattttctagttaccctgatttgatcattacacattgtacatatgtatgaaaataccacactgtaccacataaaataagattttttaatgatggaattttggttaccttgacaaatcctatgctcaaaatccctcatatcaaagcaagtagacctgggctccttgagattttccagtgaaacgtccttggtgtaacggtttaatttcaatataaagtatttttttctgattacttctttaaatcaacagactttgtttgaagggcattttattatctatccagatcaaagtaaattgttaaactatatccaaacataactctctctctctctctctctctctctctctctttttgacggagtcttgcctgttgcccaggctggagtgcagtggcrggaccttggctcactgcaacctctgcctccggggttcaggtgattctctcacttcagtctcctaagtagctgggactacagttgcccaccatgatgcccggctaatttttctgtatttttagtagagacagggtttcaccatgttggccaggctggtctcaaactcctgacctcaggtgatctgcatgcctcggccttccaaagtgctgggattactggcatgagccattgcgcccagccgcgaacataactttcaatcgctgagcactgttacattgctttaggatggtcatggttattccatggctgttttcacttattttatgtctgaatagccacagaataacagaataaactctattctgtaaaagattaatgaatactgagaaacctctaaatgccatttgcttttgcatatattctgaaagtgccacaatatatactccatggtaagttacaataacaaatgtccttggggatttccttccagggtttaagaatatttaaataaacattctgcctttgataacgatggaaggcaataagcagtgttttcttattaatatatgaatttaaataaaataatattagtaattacagactatgagaaagtagagacacagaaatttttacgtcttttaagtaacttcatttctaagaaaaataatttaatcacacagtaagtatgcagctgctactactgaatgggattcagaaataatttgattaagatttttatgcatataaaatccttaagaagcaataaagaacatgtatacaactgatcataaaatcaatgaaaacaaaattgagctaaggaaactgtggcatacaatctactagttaaaatgttactcttagctcttagacttgatagtagtcaaatagcaaccagagacaagaaacattatctccaatttcatccaacccaagagagaacacatttgtattgaatattggcatctaatgtggtgagagagattaggaatatgagtgtgtggcaacattgctcattgtttttacacaatgcaccaaaatgttatttgttttttaaaagtccggacatttgataggtaaaatatgtataaactgactttccctgacattattttgtctcctacttcaggataagttgagcgaataaaaagaaaatacaatcacttataattcagtaacagtatcagtaataataataatatttaaaactaagtatttcaatctccatatacatctaggagtcaatctgagattcaatccaggatctattctaagtgctgagcatagactaaacacatttaattttcacaagctccaggtgattctaggaattggcattttttttattactcccctctttagactttagtttatgttaaaaaaaattaaaatatgaagaaaccaagctctaaggggttaaaatgatttcaaagataatcataagttacaataataatttgtataaagtcagcgtttgctagattcccgtagcataactatttggtttttgacttggataattatatttcactgtcattcatgaagtcaaatagcaatggggaagaagcaggtaatgggcctacagatagctgatgaacggtattttatgtatgtgcatggggcatccaagaacaagtgaccactatggaggcagatgcaagcctggaggctcagagtgagatgatgaataacctaaggaattataaagaaatatgtgacaagtgaagatatacaactggattctattggtagaaagatgaatctaacaagatagcttaaaaaataagtgagataactgagtgacagtggtaggcagagagagtgagtccaaatagagacaaaacatggaagaaatataaactaagaaaaccacttaactaaatcgaaggaatattttttctcaagatagcttggtaaacagtagcaaatgctgatgagaggtcaaaatgagaaatgttaaagatgatttttttttcttttttctagcttttcttttttcactattgtttttaattgacatataataattgcagataattatgtagtgtaatattttgatatatgc

SEQ ID NO: 714705 - DNA, 727 bp, Homo sapiens
ctgcttgtcttttgcccccttttaatgggattgtttgttatcttgttgttgagttttaagagttctttgtatattttgtataacagctttttatcctatgtgtcttttgcaaatattttcttcaagtctgtgggtttccttctcattttgttgaaaaaaaacatatatttttaaataaagaagatagatagaaacactttgatgattaatgaaattcttgataattatatctgagttattaaatacttattaattttaatgacattttacattgtttacatgtrttaactttcttaaacttcaaaaataaaataattggaaaagggagcaatatacatgttcatctttagcaccataagaaagaaattcaaaaggaagatagagagcaaagctaaagctaaaactttaagcaacgaaacttctgtctttaatttaactgcatacaattttcaatcaggaacttatcttagtacttcataaacatactaaattaggaaagagatgaatgtatatctgaaaacaaaataatgcatcattttactgagagagtttacacagcttcaaagagcagatgttttggttctatcaaactgtagttgacaaatttgctagcagtgggagtggaaaattagttttcatttttagaaattatttgataccatttacagacctttgctatttatcacactgattaaaagctgtcatttgcagcatttatagtcttcaa

SEQ ID NO: 714706 - DNA, 2620 bp, Homo sapiens
gaattttgccatgttggtcaggctggtctcgaactccggacttcaggtgatccacccactttggcctcccaaagtgctgaggttacaggcatgagccaccgtgccctgcctaattattctattcttaaaatgggtgaaggttatatgggtgtatttaattgtcaaaaatatacagttaatttttgtgcctatgaatatgtgtacatttgagctcattttttaaaaaaaagaactaaaagaaatgatgggatggaaaatgggttgaagtatagatgaaataaaaaaggcacatgaatagtagtttttgaggctgggtgacgggtctattatactattttgtctactttgtgtttaaaattttctataataaaacactggtctaaaaagacaagttatctacaatgttcttaaaattttggttatcttttcaggggagggcaagaaaaagtgattttcaggcatgatagaggctgattctattccttggtcacacaagtttatccactttgtaataacgcactgagctttacatgaatgctttgtgcatgcatttctgtatgcatgttacaatatcaataacaattttaaatattacatttaaacacaaaaatcctaacagcatctcagaacaatggcagcactgttgtttgttttaaaacaggatatgttcactcatggcattatcagatgacttttaatattttgagatatttattcatgtcctaacccttggtaagtggcatggtttttatttttcatgatgcactttttttcagcaaagtcctcccccaaccgtgctgctcaccaaggccctggcacctagcacagtgccctgggaaacttgtaaatctgggttagatttgggacaaaacaggaagtagaggtcagttccttccaagagaagtaaataggtaatgcaaggaagattgaaaggccgcaactcagcagcaaatgtttttacattcatttgagaaacacttgcaaagagtttaccaaaaaatgttggtttaaagcagcagttttgaggactggctgcacactatggaaagctgttgtttatttatttatttatttttaagatgaaatctggctctgtcaccatcacccaggctggagtgcagtgtcgtaatcatagctcactacatcctccaactcctgggctcaaagtatcctccacctcagccaccaaaagtgctgaaattagaggtgtgaaccaccacccctctccattcctggggagcttttaacaatactgatgtcctggtttcactccaggaattctgggttcattggtctgttgcaacttgggtttagggggatttttaaaagcccccatgtgatcctaatgtgcagccagaggtgagaactactggttcatggtgagaggtgcattagctgtgcctcatttccatgtgtgctgtagcaatttgccccatggccattgctgcatttggatttttggaaaaaagctttgctgtgttaaaaattagagaacaacttcaagatgtactcaactgtgtggttcagtggcagcaggaggaagtgtctcccagcagatctatctttatgtcacttgcgttctgagtaagaggttgtctctggcacagtagtttatgatgaaaatcataaacaggcgtgctgaggtgggtggatcacgaggtcaagagttcgagaccagcctggccaacctggtgaaaccccatctctactaagaatacaaaaattagctgggtgtggtggcatgtgcctataatgccagctactcaggaggctgaggcaggagaattgcttgaacctgggaggtagaggttgcagtgatccaagattgagccactacactccagcctgggcaacagagcaagactctgtctcagaaaaaaaaaaagaaaagacaatcataaatagtctacaaataccaaaaagagatcaaaagaatttgcacataatactttggccggctgcgrtggctcatgcctgtgatcccagcactttgggaggccaagacgggctgatcatgaggtcaggagatcgagaccaccctggctaacatggtgaaaccccatctctactaaaaatacaaaaaaattagccaggcgtggtggtgggcacctgtagtcccagctactcatagctactcaggaggctgaggcaggagaatggcatgaacctgggaggcggaggttgcagtgagctgagatcgcgccactgccctccagcctgggcaacagagtgagactccatctcaaaaaaaaaaaaaggatttgcacacatgtggagtgcattatcatgctttcaaatttctcctatgatgaggaatgaaaaatataatattgggccttgatttcctaaatggccctccgccatttccccaaattattccaacttttcccaagacacttcagaaacattctctggagggaaatattgcaaatggtgaagagtactagatggatgagaatcccatgggattcttgcttaaactgcagaagagtcaccctccaggacttcaaaaatttacggaagctgcatgagtagtgtgggctatggaagtcatgggcgtcgacgtcaggccgacttggtcctgagtccctgtccagcctcttagttgctgtggggcttt

SEQ ID NO: 714707 - DNA, 2620 bp, Homo sapiens
gaattttgccatgttggtcaggctggtctcgaactccggacttcaggtgatccacccactttggcctcccaaagtgctgaggttacaggcatgagccaccgtgccctgcctaattattctattcttaaaatgggtgaaggttatatgggtgtatttaattgtcaaaaatatacagttaatttttgtgcctatgaatatgtgtacatttgagctcattttttaaaaaaaagaactaaaagaaatgatgggatggaaaatgggttgaagtatagatgaaataaaaaaggcacatgaatagtagtttttgaggctgggtgacgggtctattatactattttgtctactttgtgtttaaaattttctataataaaacactggtctaaaaagacaagttatctacaatgttcttaaaattttggttatcttttcaggggagggcaagaaaaagtgattttcaggcatgatagaggctgattctattccttggtcacacaagtttatccactttgtaataacgcactgagctttacatgaatgctttgtgcatgcatttctgtatgcatgttacaatatcaataacaattttaaatattacatttaaacacaaaaatcctaacagcatctcagaacaatggcagcactgttgtttgttttaaaacaggatatgttcactcatggcattatcagatgacttttaatattttgagatatttattcatgtcctaacccttggtaagtggcatggtttttatttttcatgatgcactttttttcagcaaagtcctcccccaaccgtgctgctcaccaaggccctggcacctagcacagtgccctgggaaacttgtaaatctgggttagatttgggacaaaacaggaagtagaggtcagttccttccaagagaagtaaataggtaatgcaaggaagattgaaaggccgcaactcagcagcaaatgtttttacattcatttgagaaacacttgcaaagagtttaccaaaaaatgttggtttaaagcagcagttttgaggactggctgcacactatggaaagctgttgtttatttatttatttatttttaagatgaaatctggctctgtcaccatcacccaggctggagtgcagtgtcgtaatcatagctcactacatcctccaactcctgggctcaaagtatcctccacctcagccaccaaaagtgctgaaattagaggtgtgaaccaccacccctctccattcctggggagcttttaacaatactgatgtcctggtttcactccaggaattctgggttcattggtctgttgcaacttgggtttagggggatttttaaaagcccccatgtgatcctaatgtgcagccagaggtgagaactactggttcatggtgagaggtgcattagctgtgcctcatttccatgtgtgctgtagcaatttgccccatggccattgctgcatttggatttttggaaaaaagctttgctgtgttaaaaattagagaacaacttcaagatgtactcaactgtgtggttcagtggcagcaggaggaagtgtctcccagcagatctatctttatgtcacttgcgttctgagtaagaggttgtctctggcacagtagtttatgatgaaaatcataaacaggcgtgctgaggtgggtggatcacgaggtcaagagttcgagaccagcctggccaacctggtgaaaccccatctctactaagaatacaaaaattagctgggtgtggtggcatgtgcctataatgccagctactcaggaggctgaggcaggagaattgcttgaacctgggaggtagaggttgcagtgatccaagattgagccactacactccagcctgggcaacagagcaagactctgtctcagaaaaaaaaaaagaaaagacaatcataaatagtctacaaataccaaaaagagatcaaaagaatttgcacataatactttggccggctgcgatggctcatgcctgtgatcccagcactttgggaggccaagaygggctgatcatgaggtcaggagatcgagaccaccctggctaacatggtgaaaccccatctctactaaaaatacaaaaaaattagccaggcgtggtggtgggcacctgtagtcccagctactcatagctactcaggaggctgaggcaggagaatggcatgaacctgggaggcggaggttgcagtgagctgagatcgcgccactgccctccagcctgggcaacagagtgagactccatctcaaaaaaaaaaaaaggatttgcacacatgtggagtgcattatcatgctttcaaatttctcctatgatgaggaatgaaaaatataatattgggccttgatttcctaaatggccctccgccatttccccaaattattccaacttttcccaagacacttcagaaacattctctggagggaaatattgcaaatggtgaagagtactagatggatgagaatcccatgggattcttgcttaaactgcagaagagtcaccctccaggacttcaaaaatttacggaagctgcatgagtagtgtgggctatggaagtcatgggcgtcgacgtcaggccgacttggtcctgagtccctgtccagcctcttagttgctgtggggcttt

SEQ ID NO: 714708 - DNA, 2620 bp, Homo sapiens
gaattttgccatgttggtcaggctggtctcgaactccggacttcaggtgatccacccactttggcctcccaaagtgctgaggttacaggcatgagccaccgtgccctgcctaattattctattcttaaaatgggtgaaggttatatgggtgtatttaattgtcaaaaatatacagttaatttttgtgcctatgaatatgtgtacatttgagctcattttttaaaaaaaagaactaaaagaaatgatgggatggaaaatgggttgaagtatagatgaaataaaaaaggcacatgaatagtagtttttgaggctgggtgacgggtctattatactattttgtctactttgtgtttaaaattttctataataaaacactggtctaaaaagacaagttatctacaatgttcttaaaattttggttatcttttcaggggagggcaagaaaaagtgattttcaggcatgatagaggctgattctattccttggtcacacaagtttatccactttgtaataacgcactgagctttacatgaatgctttgtgcatgcatttctgtatgcatgttacaatatcaataacaattttaaatattacatttaaacacaaaaatcctaacagcatctcagaacaatggcagcactgttgtttgttttaaaacaggatatgttcactcatggcattatcagatgacttttaatattttgagatatttattcatgtcctaacccttggtaagtggcatggtttttatttttcatgatgcactttttttcagcaaagtcctcccccaaccgtgctgctcaccaaggccctggcacctagcacagtgccctgggaaacttgtaaatctgggttagatttgggacaaaacaggaagtagaggtcagttccttccaagagaagtaaataggtaatgcaaggaagattgaaaggccgcaactcagcagcaaatgtttttacattcatttgagaaacacttgcaaagagtttaccaaaaaatgttggtttaaagcagcagttttgaggactggctgcacactatggaaagctgttgtttatttatttatttatttttaagatgaaatctggctctgtcaccatcacccaggctggagtgcagtgtcgtaatcatagctcactacatcctccaactcctgggctcaaagtatcctccacctcagccaccaaaagtgctgaaattagaggtgtgaaccaccacccctctccattcctggggagcttttaacaatactgatgtcctggtttcactccaggaattctgggttcattggtctgttgcaacttgggtttagggggatttttaaaagcccccatgtgatcctaatgtgcagccagaggtgagaactactggttcatggtgagaggtgcattagctgtgcctcatttccatgtgtgctgtagcaatttgccccatggccattgctgcatttggatttttggaaaaaagctttgctgtgttaaaaattagagaacaacttcaagatgtactcaactgtgtggttcagtggcagcaggaggaagtgtctcccagcagatctatctttatgtcacttgcgttctgagtaagaggttgtctctggcacagtagtttatgatgaaaatcataaacaggcgtgctgaggtgggtggatcacgaggtcaagagttcgagaccagcctggccaacctggtgaaaccccatctctactaagaatacaaaaattagctgggtgtggtggcatgtgcctataatgccagctactcaggaggctgaggcaggagaattgcttgaacctgggaggtagaggttgcagtgatccaagattgagccactacactccagcctgggcaacagagcaagactctgtctcagaaaaaaaaaaagaaaagacaatcataaatagtctacaaataccaaaaagagatcaaaagaatttgcacataatactttggccggctgcgatggctcatgcctgtgatcccagcactttgggaggccaagacgggckgatcatgaggtcaggagatcgagaccaccctggctaacatggtgaaaccccatctctactaaaaatacaaaaaaattagccaggcgtggtggtgggcacctgtagtcccagctactcatagctactcaggaggctgaggcaggagaatggcatgaacctgggaggcggaggttgcagtgagctgagatcgcgccactgccctccagcctgggcaacagagtgagactccatctcaaaaaaaaaaaaaggatttgcacacatgtggagtgcattatcatgctttcaaatttctcctatgatgaggaatgaaaaatataatattgggccttgatttcctaaatggccctccgccatttccccaaattattccaacttttcccaagacacttcagaaacattctctggagggaaatattgcaaatggtgaagagtactagatggatgagaatcccatgggattcttgcttaaactgcagaagagtcaccctccaggacttcaaaaatttacggaagctgcatgagtagtgtgggctatggaagtcatgggcgtcgacgtcaggccgacttggtcctgagtccctgtccagcctcttagttgctgtggggcttt

SEQ ID NO: 714709 - DNA, 651 bp, Homo sapiens
tttttccagttatccagtcttcagggaagatgactctgtctcaactcacagtaaatcctgactagcctaaatcaatcataaaattcctattccccttgcagtaattggtatagacaggggcatgcaatctattccagctgatgagttgcaaggggaaggtctattgaagggctgcttgaagggtttctttgttctttaaaagacacacacacaagtaagagacagtgcatcctcctctgtcgaatgctattgtgtctggatgtgactcctgcagtgatcttgtagtcatgaagggagctaacctgaggaccaagctgatacttcaaaawtgactgtatgaaaagatgcaaagatcttgtccttgatggggtcatcaagccattaagtaaaccaacttagagcttcctacgcttctgattttcctccaaagtgagacaactaatttcctactttataggacacagttgagtaaggattttctatttctggttctaagagccaaagacattttaacagatgggtcagctatgtatatagggtgagggtgaggttggggaggtaggttgaggcaggctgcaaaggctacatgctgggttgaggagtctgtttttttttcccataggatcctggggtgggttgcacaggaggaat

SEQ ID NO: 714710 - DNA, 663 bp, Homo sapiens
gtagctgggcacagtaggaagaagcattctcatcatggccacttagcttgctcgagattacacagaaccatgcctctggtttcctggtacagtgctccggcaggtgacggatgctcctgggtgacatatcacggatctctctgaggtgagatcttcatgattctatatcataggcatctctttatcttcaagttgggcaacatcagcagggttcccatgagtatgtgcccagcgaggctatttagttcctcttayctttttttttttctacttgccctcgtttttcctgagattttatttccttcctagctggcatacctttccctgctgtggtattcagacctaaatagtgtgtgcacctattacctctgcagagtaattactgtttggtaccatggtagagtttctgtgtccagatacggttgtgaatgcttggaatgtaacattgggaaagacagaactattgcttgtaagtggatttgtggacatcatggtgctatgagaaaactaagttgaagatgctcctgcatcttgctggttaaactagatataaaccagttgcttaataattcatagcctatcctatctgtttcccaccctccttatcttccagggactcatttattgaataactcattttacatgcctcttttatcatataca

SEQ ID NO: 714711 - DNA, 644 bp, Homo sapiens
atgatgatgataataaaaacaaccacaactaccaacatgaacctttgcttggcaccaaatgttaactctagaaagtaattactattattaccctcatcttacagatgcaaaactaaagattaaaaaggttaagtaaattgtctaagattgtgaagttagtaaatgacagaggtgagattcgaacaaaggaatttgygtctacactcagtgcttttaatccctaaattatattatctccgttaaaataagtgtaacatttttaggcactaaatttaaaataactgtatccagttttttaaaaaaaacacgtatcttactcaggttatcactggaatgataattcatttaaacataaagaagtaatatttttacttaaagtcttctcatccaaaaacatgctatttttctatttattcgattcttgctttatatccttgaataactttttttttttttttgagacaggatctcactctttcgctcaggctagagtgcagtgaatcaatcacagctcactgcagcctcaaactcctggtctcaagagatcctcccacttcagtctcccaagtagctgagactatacgtgtgcaccaccatgcccagctaattttgtggtacttttgtagagatggggtttcaccatg

SEQ ID NO: 714712 - DNA, 1330 bp, Homo sapiens
aaaagacaattccatgaaatactgcctgctgggagcaggacagtgggatagaagaaaaggtggagtaaggctggaaagaactttgaatgctgaatttccaactatggaaacacagcatagtaaatgtatatttttgaataaggaagtgataaagaaaacagtattttaatttaactctatggaggaataaacctgaaagagtagcataggaaggacttaagagtgcattataataaagtgaaatttaaaagtcccaaacccaagtagaaaagcctgtgttcaaattcatgttgcataatttctagttatgcaaccctgagtgaatgattgcttaactgcctcatctattaagcagggataacaatactgatcttgtgatcaagataaaatcatgtaagagcaccaagaacggtgcctaacaagtagcagatattcaggaataagasgccattattataatagtatttgagtaatgatactttaggtaatgagattgcaaatcaggtggctttggaactaaaaaatgggagaaaatgtgagagagtagagaggaagatgacctagagcatgaaggcatagagcattattgaaacagagaaacattccttaatgagtcttttaagagcagtagtggctgttttatgttttacatcatattataatggtttactgcctcccatttctgaagacctcagctattttatgcttcactctgctactttgttggtgccttggacagttataactttctagtccaagctaggtttttggtgaattgtgctagagatctgtgaagcatctttttttctggtcctaattttttaaataaattaaggtccattttacattcatctgttcatttgacttttgcttacaactctcttttgcaactgcccagacaggtttggttttttgttttttttttcctaccttttctgtggcagcaaggaagcctctttttggggggccagtaaacaaactaaggatctgagcaaggtcgcttcacatatttgcataaagcttaatgtgatgatctcccaggcagtccctatccaggaatcagagttcaaataggggtggcacaattaacttctaaagaagagaaaaagtaacctgaagagtaagcatatgtcagagaagccaaagaaactgcagaatgatgtcaaatgcactgaagtaggcaagaaacacaaaaacttttaaaatgtcattttgaaacaaaagaaagttgctaaagcccttaaaaatcaaatatcccaaattaatcaggataaaagataggtaagtagttaataaaataacttggtatagagaaatatcttgggaaact

SEQ ID NO: 714713 - DNA, 1297 bp, Homo sapiens
ataaaaatgttacggaattaaatagtggtgatggttgtacacctttgtgaataaactaaacccactgaattatacacttaaatttttttaaacgtagttacacataatattattaatctgtggctttggtaatgtcttagttcatatccatctctcaagaatgtataaagaaatatgtaaagacattctttcttctacctatttccttacttttcatggacacttgcctgtgtaaactgaagcagttttccttgtctccttccatamtttggagtaatttattgttaaagttgtgaatgatagctaagaaaagcaatgttaccctcactcccattttctgaaagcctgtttatctagttaggttcttgcatgtgtgcgtgcacttactaatatatacatgatttggttgctttcacaaaaatgggaacaaacctcagacacttaagttttaaactcaacagtgtcactgatatcctctagtaagagcacatgaaagctgccctgattctttagcaagtacatagaatggaggcagcatatttttataacacaatccagtcttccaccaattggaattcattcttcacactgccccctaaaatagaattattacattccgttttgctctctacaatctggaccccaacaacctttacagagttatggaggcagtacagtagccaaggctgggttctaggactaagctgtcttgagtttgaagcccagcctcattgttctgtgccttcatttcttcactagcctgaataccttatagatcctcataaggattaaatgaggatgctttgctagagtgaatacttactgctgtacctccagaacaatgtctggcacagaagcactcaagtattagctattattatcacgataccttcccataaattctatactctttactcaaacctgattcatcattcctggactacaccttgcacttagctactttagaattttcttttcctataggtccctgggcccgtaatgatttatccattcaaagctcctttctgtttcactggaaacctgatgcaaatgccaagaagccttcttaacttcaaccacttctactcttcttgcttgctggatttagcactttatcagttatttgtaaaactgtttatctccacagtttgagtataaatttcttgaagccaagaacagtattttgactatttctgcatcaccagatgtgccaagacatgcttggtattcattgattcaatcaaataatatatatggagtgtctgaggatacagaaggaaacaaaataaatgctctc

SEQ ID NO: 714714 - DNA, 780 bp, Homo sapiens
ttgttttattttccttcctaattaggttatatcagaaccttaagaaaataaaaaatctctctcattggaagaacagaaagctactgctgtgacctttatctttgtctccctgtaatacttctatggtatgctcaaaaacaaaagactggccaggcacgttggctgacgcctgtaatcccagcaatttgggaggccgaggcgggcggatcatttgaggtcaggagttcaagaccagactggccaacatggtgaaaccctatctctactaaaaatacaaaaaaaatgagacgggcatggtggcatgtgtctgtaatccagctacttgggagtctacggcatgagaatctcttgaacccaggaggtggagcttgctgtgagccgagatcacgccactgcactccagcctgggtgacagagtgaaaccctgtctcacaaacaaacaaacacagacttacattccagctcaccgcctagaatttgagccrcttggttgcctgggtgtggtcactcatagccagttttttttctgcaggattttcagtcaatgcatcatcggagcgactcaacatgggtgaaatcgagacgttggatgactactgagcacctgccagtggactggccatccctctcctgtctgccgactatggagtctccacctttggacacaacacttactcaccatttactctttatcactctgcaacaaatcacagaaccgatcatctcaggctttttcttctggccctttgtgtccaagattctttaatccatttttgttgg

SEQ ID NO: 714715 - DNA, 655 bp, Homo sapiens
tatataagatattaacattaggagaaactagaagaatgtatgaacactctctatactatttttgcaacttttctataagtttaaaattatctcaaaataatatgttttaaaaagaaggaakaaatgctttgctgctctctgtatgtttttcaaatatacatcatatgttagtaaagtggtataaatgtattaatttataggggggtagctatgacatactggtggtatgtgtgctaagatatttaacagtgggagttcatggttaaaaaggtttggagaccactcttcttcagcacgagcaagaagttctagagatgcctagtgtagtcaagctcacatacaaacagaaagtgaaatagtggctccaggggctgggggaggagagaatggggaagtattgttcaaggagtaaagagtctcagttttgcaggatgaaaagcgttctgtggatagatgctggtgatgttgtgcaacaatgtaaatattcttaatgtcactgaattatacacttagaatggtaaaaatggtaattttacaagtatcctatcacaattttaaaaagaaaaaaagactgcacagtttatcactcagctctgcactatctcacttttacatatttctcgcaggttagatttttcttcccacaggtttcacg

SEQ ID NO: 714716 - DNA, 1729 bp, Homo sapiens
tttaagaaaaatatgtcaggtaggttgtctaaaaattaaatgcatttaaactcatttgagagaatgccttttagtttaaaacatatttaaactaagtccatcttgtaatgttcctggagaagctaagcctgattgtaagccactactagaaagaataagactgtcatcagataacttctacagtggaaactacttctgagactggaatataaaaagcaagaatcaggctggacctgctggctcatgcctgtaatcctggcactttggcaggctgaggcaggaggattgcttcagcttaggagtttgagaccagcctgggcaacatagtgagacctcatctctaaaaacagatatatataatttaaaaacccccaagaatcaaaagtgttaactctgaattgcagtaaagggaaagaccatgctcgtagcaatgccagcatctgaagtggagccttatacatttcatcacttataatggaagtagttaactctgaaagagactaccaagagagtaaaaagagactaacttagctgggacagaaagaaaacaaaccttcagtagggggatcaggagagtggcaaggtcacctgtggctctttgtaaaacacagttatttgttaagtcaggagttcttggttccgtagctgccagaacatttgccctacttctcaggcatttctacaatattttccccacaatctcctggctgaaatgcacatttgcattccaagtcactttgaatgggaaaaccttaatgaaaaaggccattaatcacagatacatcatgaaatatactacaacaacattgtcacagctgcagcaggaagttgtggtgagccttcctggttattgtttaatttttttgtgataaataaacagagttcaaattgataacgaagaaactgtttgatcatctctgtgtgtgtgtgtgtgtgtgtgtgtgtgtgtgtgtctagacctcttctttccccagcatccctctctaattcccctcccattcaacacatcagttttctctctcattcattttgtttatttatttattaatttgtattgttagcagacacggagtttcaccatrttggtcaggctggtcttgaactcctgacctcaagtgatctgcctgcctcggcctcccaaagtgctgagattacaggcgtgagccaccgtgcccggcctctctcatttatttctgtccagggattaaatattactgacaagatgaactaggctgagtcagctatagtgaatccagattctaaggtaacctcaaaaaacaagcagatcagggcaaggactggaatctaaggtttaatgatttggtattttccaaagtctgaagttctaggtacctagatgctacctaaggatttctgttgcaactatgcattgctgccctgccagacagctgcagtcagcatctttgggctgacttggtttctgaccgccccccttggtttcaggccaggcactaacccttgaggaaaattcagactccctgaaggtggtctcacaaccccgcactcctaatcaattctgcctccccttctgcctaatctttcttccaaattgtctgctgcccttatccattaggacattgacagtaaccatgctttcaggaggcaagagtatggtgggaatttctttctttcttttttctttctttctcttttttttttttttttttttttttgagatggagtctccctcttgtttcccaagctggag

SEQ ID NO: 714717 - DNA, 586 bp, Homo sapiens
tatttatttattttgagacggagtttcgttcttgttgcccaggctggagtgcaatggcacagtcttggctcactgcaacctccgcctcccgggttcaagcrattctcctgcctcaccctcctgagtagctgggattacaggtatgcgttaccatgcccggctaatttttgtatttttagtagagatggggtttcaccatgttggccaggctagtcttgaactcctgacctcaggtgatctgccgcctcggcctcccaaagtgttgggattataggcgtgagccaccacgtctggcctggtatgttacattttaaactcattataaatgtttatggtagtttggacacctggatgaatttatcataatgatggctctttttttttcttttaacttctaacttttgatttttagtgccagaattcaaaatggcccttaaatatatataatagagctaacaaaattatttcactttttaaaatgtctttttttgagagtctgtacttgaagacatttccgttattagatgaactgttgacccaaggagttaaaaaagttacgttaagcaatatgttactgctatctttt

SEQ ID NO: 714718 - DNA, 643 bp, Homo sapiens
atcttcccgccatctctcctcccctgaagcaggtcataaaacctaggaaagatttttctgacttacttctgaagcaggtcaaaaggccctcgagtgagaggtgcctctctatacacggaggaaaggaacatccttttctctgaagacaatgggtcacagaaaagaatctgaacaaacaggccttgctaaattcccccrttttttgccattaggttgtaccccctttgcccaattatatttctccatgactgtctattcatcaaacataccataaaaatatacaaatttaactcttttttggggtcttcatttccttattaagactcccatgtcacgtaaaacttgtattaaatacatttgaatgcttttctcttgttaatctgctttttgttagaggggcctcagcatgaacctatgttgggcaaaagaaaaaaaaaaagatagctcttctcttctgtaactggatggtagtatctttagcatttgcatttgttgtggggggatgaaactttatgcacatatagtgtacagtaaaccggcatatataaatatagcatttttgcatgaaaaaaagatgtgatttagtaaatttctctgtgaacaccagagaccagacattctagggtaatgaggttatggctgt

SEQ ID NO: 714719 - DNA, 621 bp, Homo sapiens
cagcaaaactccatctcaaaaaaaaaaaaaaaaaagaacaatagcaacaacaaagaaaatcagttcagaagatgggaatgtgataaacctcatttctttaaaaatcttcagatgctttttagagtatgattctccagagttgctggtgataatttttcagtttgccttcatcttcagccttcttctaatatttgagctggatgtttactctttcctacatgaattggctttccctctgacttcgtttgacactgatstcctctggttgtctttcgggttgttctttctgtatccttcactgattctttttatttaagtgtagccaatcattgaccatctgttgttcttgttttgctattcctgtcagagagtgtctattttcaagatttcaatagctgtctatatacctggtcctggcttcactccttcatcttcaaatactgcttgaaatcctccaatttgggggttctgcctatttcacactcattgggttcataactgagctcattgctttggaagcagcaatcttcttggaacttctgtacttttgacaggggtcccttgattcattcatccagactcaaaaagagtgatctttaaaatgcacttccttcattttat

SEQ ID NO: 714720 - DNA, 621 bp, Homo sapiens
cagcaaaactccatctcaaaaaaaaaaaaaaaaaagaacaatagcaacaacaaagaaaatcagttcagaagatgggaatgtgataaacctcatttctttaaaaatcttcagatgctttttagagtatgattctccagagttgctggtgataatttttcagtttgccttcatcttcagccttcttctaatatttgagctggatgtttactctttcctacatgaattggctttccctctgacttcgtttgacactgatctcctctggttgtctttcgggttgttctttctgtatccttcactgattctttttatttaagtgtagccaatcattgaccatctgttgttcttgttttgctattcctgtcagagagtgtctattttcaagatttcaatagctgtctatatayctggtcctggcttcactccttcatcttcaaatactgcttgaaatcctccaatttgggggttctgcctatttcacactcattgggttcataactgagctcattgctttggaagcagcaatcttcttggaacttctgtacttttgacaggggtcccttgattcattcatccagactcaaaaagagtgatctttaaaatgcacttccttcattttat

SEQ ID NO: 714721 - DNA, 614 bp, Homo sapiens
  misc_feature 571, 596: n = A,T,C or G
tggacttaggagtcagggctgggttcaagccccacattccatcccttactaggctgggtaactaggcacattacttagcctctcctatttctgtttcttcatctayaaaatgaaactaaaaatagtacctactttatagggtaattttgtggattaatggcacatgaagcatatggtgcatgttcagtaaatgttggcgattattagcagtaaatttggtggttattgaattagtgacattgcagtatcactgttagggtgacctccattcccatcagatgatgtggcttgaagctattccaaacgggcaaggttaaaaaacaataggcaaactgggaaaacctatttgcaacacacatgaaaacaaaatgttgttattcttgctatgtaggaagtgcttgcaaataaataagaaaatgaataccaatggaaaattcaaaagaaacaaacatctgaagtgattttttttaaagacccactttaaataagttcaactctccttggaatcagacataaaaataaacaaaagacattttttgttgttgttgagtacagatcacagccagatttnggtgcaccctatatgagaggtgtgngagatactctctttttaa

SEQ ID NO: 714722 - DNA, 1232 bp, Homo sapiens
tgactttttgaaaaaagctagcagtttttgcctcaacaccagtgtaatttcaattatataataatggtttctttgttcaccctcagaaacttctaccaagaactccaggcacagactaagtcctgttccctcatgaagtcttcctcccctccttccgtttatctcaacttttctctttctttcctaaaatgccaccttgcaaatgtcctcataatagaatttaagcaaacattacatgactacttttacacatttcttatgtgcatgttatccctgcttaattgaacttaaaattcattagaatacagmcagtgtctcattcacttgtgatcaatcttttctggatgagcaaatcacttcctttttcaggaaaatttctgtgtggaaggagagagattggacagaatgactcagcaccgtttatgaatgattataatgagttggggtaaagagaggtaacagacatggggaaaaagatgacacacgatgataagaagtgcaagcagcattctaaaattcagttcacatcttcaaactctgagttcaagatgctttccactgtaccatgtggtccctatcactgagttctatagcatgttttctatgttttaaagcaaaaagtttctctggtttgtcctcctcaaattgtccaacaaaaatatatattgaaaactctcagatttgctacacatcacttgtgaaaaattgcttaagaaataattcctcaactcattcagtttcattaattttgtcctttgaaggatggaagaatatatctttctagcaaaaatcggatttgtgcatgacagctacttgagctcagaggtcaaagaatgaatttgggctgcctccctgcattcccatcccttcaatcttttgttgtgcttccacagcaggtaggatttgaaagagattctgcccttgctagaagaaaaaaaaattgtaaggtagaaaataatcaaaccttggcttgagaggagccaaaatgaatgccgcttccaatactaatgtaaaccttctaccaatacttaggatttacaaaaaaatttcaaaagtgtcatatttcatggccaaggagacctagtatggtggcgatgtatgctatgcttatgcctgggaatagagtaagaggttaggaagatcaggagataaattttcaaggaaaaaaatctgaaaaaagattggcatttccacaaatgtgtgaaagggaatgcagacagataaacctaaag

SEQ ID NO: 714723 - DNA, 1490 bp, Homo sapiens
taatttttatttgatagactttggtcttggctaaattaaaatgttctctttgctattcagcatttacatatttaaattatacaattcttataaatgtggtatctgagtgccttgtagcattcagaatttagcatgacaagttgctcgtaggctattccatcaagacattcccactacagctcagctgcaaacatctagagcaagctcccgtagggttgtattttaagctagctgtgagctaattatatggcaatttgtatcttagaatccatgtagaacaatatttggagcattaggttgagagattatgactgctaaaataatttcctgatgctgtcatgcatcgggttttgacagttgcacaacagtaataaagcctccatttattaggagcttaaaacatatcaggactttacatacatgataccttatccctaaaacaaatctgccattcagatatatacacaccatctatacatgttgcatatgtgggggctgagacaacataggttactagggaggaatttgagtgttggtctgacagtaaagcttgggttctttctactttagcatgagtacaaacatttcgttttaagtttgtgtacatgaaaaatagatgtaaaattgtctcagaagacttttgagattttaatgttgaataactgtttagaaacttggggtctttagactctcaaatggtagaacattcatgttctatttcttaaaattgatatagctttattggcaatagtactgaatttggagtaggggcatttgtgtgtatatatgtataaaataaagaacttaatatttcattgtggaagttacagtgagaagcatcctttggtattttttgtaattttggcactcattagaaataagccatttattctgtcacgttgaaacactgactatagtgaatttgtcactaaattttaatatgttcgttcggcagtagattttgattgattgtactggctggagcctattcttgatgctctttagctttacagtttatattttcagcagacattgatgccctgtgccccctccattgcagagtttcaattgcttgctgaagagttagtgttgaatttggtggccactctctgttcactaaaacctgtgtctgattagggtcagttttggaagtgcccacctaagactattccattacagtagccttttcttttttgcagctcttcagtacaagagcctcatgtcccactccaccccatccatcttttgtgcctattcttcagtgaaaatactcttatttaacccgaatmttttctgaaagtgcttcttctcacttctcatcccaggagagagactcgactttctctctcctatttttcttgccttcaaattgaaaccacctccttccattcatctggaaccacaggttctgggcccttgcatgtgctggtgtctctacttggagaacctttccttgacgtgttcacaggtgaactctaactcattccttg

SEQ ID NO: 714724 - DNA, 1490 bp, Homo sapiens
taatttttatttgatagactttggtcttggctaaattaaaatgttctctttgctattcagcatttacatatttaaattatacaattcttataaatgtggtatctgagtgccttgtagcattcagaatttagcatgacaagttgctcgtaggctattccatcaagacattcccactacagctcagctgcaaacatctagagcaagctcccgtagggttgtattttaagctagctgtgagctaattatatggcaatttgtatcttagaatccatgtagaacaatatttggagcattaggttgagagattatgactgctaaaataatttcctgatgctgtcatgcatcgggttttgacagttgcacaacagtaataaagcctccatttattaggagcttaaaacatatcaggactttacatacatgataccttatccctaaaacaaatctgccattcagatatatacacaccatctatacatgttgcatatgtgggggctgagacaacataggttactagggaggaatttgagtgttggtctgacagtaaagcttgggttctttctactttagcatgagtacaaacatttcgttttaagtttgtgtacatgaaaaatagatgtaaaattgtctcagaagacttttgagattttaatgttgaataactgtttagaaacttggggtctttagactctcaaatggtagaacattcatgttctatttcttaaaattgatatagctttattggcaatagtactgaatttggagtaggggcatttgtgtgtatatatgtataaaataaagaacttaatatttcattgtggaagttacagtgagaagcatcctttggtattttttgtaattttggcactcattagaaataagccatttattctgtcacgttgaaacactgactatagtgaatttgtcactaaattttaatatgttcgttcggcagtagattttgattgattgtactggctggagcctattcttgatgctctttagctttacagtttatattttcagcagacattgatgccctgtgccccctccattgcagagtttcaattgcttgctgaagagttagtgttgaatttggtggccactctctgttcactaaaacctgtgtctgattagggtcagttttggaagtgcccacctaagactattccattacagtagccttttcttttttgcagctcttcagtacaagagcctcatgtcccactccaccccatccatcttttgtgcctattcttcagtgaaaatactcttatttaacccgaatcttttctgaaagtgcttcttctcacttctcatcccaggagagagactcgactttctctctcctatttttcttgccttcaaatkgaaaccacctccttccattcatctggaaccacaggttctgggcccttgcatgtgctggtgtctctacttggagaacctttccttgacgtgttcacaggtgaactctaactcattccttg

SEQ ID NO: 714725 - DNA, 1055 bp, Homo sapiens
tttctttatgtaggcatgattgattagatcaatagtcatgagagaatctatccaaccttcagcttctagaggttgtggggttcagctgaaagagccaaccctctaatcacagttggctcctctggcaaccagccccccaatcctgaggctatccaggactctccagctaccagtcatctcactagcatacaaaaaacacttatcactttagagattccaagggtttgggttgttgtgtgccaggaaccaggggcagagaccaaatatatacttctaattatatcataaatgatatataaatatccatcattaacaggtttctcacaggcaacttaataataaaatcagattttcatagccagaaaagaccatgttcttttgaagtcttcactataaggtagttccacratgcagtttcaaacattctgaatgtaatttcaaataacagtaataaaaatgctttttaaagatccctttgcaatcaagaagttctagtcaatatggtaacttaattcattttagatgcatatttcaactttttatatttaatctgacctaaagtgtaatttccaaagtgatatttcctgaagccaaaacccagacttcatgtctctagagtaatcttgccttatattagtaagtctatatcccttcccaaagtagttctggctggcctgggcttgttgtaaataattggttcagtcagacagctttttaactgtcaacacccttaacaattcacacaatgtacatggaaagtattgtaccttaaattaaagatatgtttcctctaaataaagtttattgtttgggggagtttgctgaatggaaatgaagcagctttatgttctctagaaaagaagtgaaaaggcatctcatctcatttttcccttcctttatcccatttcaagcatgacccagaaattaaatattttatgtagacagaaaaagtaacatatcattaaaggatgcaaacctgcaaaatctaatagtcatgtaagcctgtgagattgccaaaaactgttctacatttttaatatctgaaaataatcaaa

SEQ ID NO: 714726 - DNA, 1055 bp, Homo sapiens
tttctttatgtaggcatgattgattagatcaatagtcatgagagaatctatccaaccttcagcttctagaggttgtggggttcagctgaaagagccaaccctctaatcacagttggctcctctggcaaccagccccccaatcctgaggctatccaggactctccagctaccagtcatctcactagcatacaaaaaacacttatcactttagagattccaagggtttgggttgttgtgtgccaggaaccaggggcagagaccaaatatatacttctaattatatcataaatgatatataaatatccatcattaacaggtttctcacaggcaacttaataataaaatcagattttcatagccagaaaagaccatgttcttttgaagtcttcactataaggtagttccacgatgcagtttcaaacattctgaatgtaatttcaaataacagtaataaaaatgctttttaaagatccctttgcaatcaagaagttctagtcaatatggtaacttaattcattttagatgcatatttcaactttttatatttaatctgacctaaagtgtaatttccaaagtgatatttcctgaagccaaaacccagacttcatgtctctagagtaatcttgccttatattagtaagtctatatcccttcccaaagtagttctggctggcctgggcttgttgtaaataattggttcagtcagacagctttttaactgtcaacacccttaacaattcacacaatgtacatggaaagtattgtaccttaaattaaagatatgtttcctctaaataaagtttattgtttgggrgagtttgctgaatggaaatgaagcagctttatgttctctagaaaagaagtgaaaaggcatctcatctcatttttcccttcctttatcccatttcaagcatgacccagaaattaaatattttatgtagacagaaaaagtaacatatcattaaaggatgcaaacctgcaaaatctaatagtcatgtaagcctgtgagattgccaaaaactgttctacatttttaatatctgaaaataatcaaa

SEQ ID NO: 714727 - DNA, 648 bp, Homo sapiens
tacttctggaaacatgtaattatcaaacagaatcctgatgaataatgttttatcttgtttaactaaagttaaaagaggaggtcctagcaaattattccactcaattctaccacttgaccactcaaagcaacttgactacrtaatgatcatgattaaaacttttatcctattaaaatatcctgtatttcaccattcctgaaaattccagtcaaatgttatagtttaaaatgtgtacaaattgtgtatgtataaaattgtaagacatagtaataaagtggttctcattgagactacagttttaaattaaattacaagcacttttatttttggcataactaaatttggaattactacgtttaacgatcactaaagtgaatgtaataattatttttaaaatactacatattcattttaagaaattacttgagaatactttcaaaaatgtcctgcatgtcacttaagccaacaaataatttccaagatacctagcattacacttaaattttaaaaagggtaaaaagccaaagttttttttttcagctaaggtcaactatttagctctgcaatctttcctttaaaaaatatttgtaataatttggtctctgatttatttcacaagtcttaaccttgctttataaataatcctat

SEQ ID NO: 714728 - DNA, 609 bp, Homo sapiens
tgcaacacattcacaaaccacctggagattcaaactcacagtgaaagtgcaatgacatattgtgctacttgacattagctattaccaaagacggttcaaaaggaagagaacacagacaatcttattagtataattggaaatgtgctgatatacccaccttaccaaacatcttctcttgcagtgtattatattacctgagaaaagtaacttacaatcagtgctaatatgctccttaacctgatttacaagggcaactagcaataaacagaacaaggcccgtgaactaccacacaggtgacttcaattctgtatatctggactggatgggaatacgggggcttacatgtttgtggccttcttggagtatgggaatgtcctgtcctgctataggactgcagtgagaattctggttataaaaagtctcccttgtaaaattcactgtaaatcgaggacaaaaaycatgagattgttttgttatactttaagttctagggtacatgtgcacaacgtgcaagtttgttacatatgtacgtatacatgccatgttggtgtactgcacccattaactcgtcatttacattaggtaaaatcatgatatttttaaggaca

SEQ ID NO: 714729 - DNA, 953 bp, Homo sapiens
aaggcctaaatcagtgcttactcaattatactaacagacccttaccatgctctgagtgtgatgtaaacacttcggtgacctggctagtcactcccatgctcaaataaacccagttttctggctttgtcagtgggcactctctcagtccgtctctgtggggaggtgggatatccatttttccaagtaaaaggcttgattttactcctcaaattccactagaaagaagtcaactgtggcattaacatgtatgatctctacattatagggggtctaacctaagcaagacatagagtacctgccctctaggactttttggaggcctcgacattgaactgccccatcaaagagaggaagcctatttggaatgacacacggggagtcttgtttgtccagccaatcctgcagattctaaaatttgtcattagatctgtcagaaagctgaatacttgtacagctcatcttggatcaaaaagaaagaactgagtttactctaaggctatatcctcagttttgttttgttyttctgagaagcattactttaatgagcttataattactatataaatcagaggatgtgaacacaataaacatacttggggaaattgtcatagaaatatttgcatagaaaacatgcaaactatagtgttttctcctgtttaaagaaaatttccaacaatataaatgtctaaacaagaagacattttattttcttgagagaccaagattttctactttttaaaattgtggtaaaatatgcataacctaaaatttaccattttaactactttattttttattttatttcatttttattttatttttttgagatagggtctcactctgttgtccaggctggagggcagtagcattatcctggctcactgaagcctttattttattttattttattttattttattttattttattttattttattttttgagataggg

SEQ ID NO: 714730 - DNA, 1574 bp, Homo sapiens
catgaaagtttgcagaaaaagttgtgagatacctttcatgctgtggaaatatttaattaaggaggctctaaagttgggaacaccaggggcagtagaagacgacctgctgaactgaaaacaggcacgaaatggaaggwagcctacatactgatgggtgaggtcttcttaatcccacttggttctgagaatgtcatacctatttgtacactttccaagaaagaaggagcttgagatattcctctctggaatgactgcaagacccgagaaagaagacctagtatatagacgtttgagggagtcctttggtgaaataccccagtccttggctgatcagtgaagcccaccagttggcaagctctatgtgtgtacacagggcttccaatcagttttttagtgcctcacttgtaaatacaaacagagaactaaggatcactagatatttgaggaatatcttcaacaggaaagaaaacaaaatgaataggtgaatgggtctctgaagaaacagagataatgtaggaaggggggaaaaaagtacaacagagacctaaggaaaaatactaaatccatgaagcaagaaacaaaaacagaagcttcagaaaacatttgaagttatacaggtctcttggaaattaaaaatatgttgcagaaaaaattcaaaattcaaaagtgtaaaagaaatctcagaaaatagaaaaaagaaatcccaaagtgaacttattttactgctggtcaaaatttttaattgaaatgttttcttctttaatcataattgcccatttttcatattattcccttattctcatataactaggttttatgcttctttgagatggtcaaccttttaatcacttgacattctcctagtccattgggtcttcttcacttatcttcctacccagcttggaccccatggttggaagtctgagctattccatcttgatccccttttaccccttgtcctctgttcatgcccagcaaattccttccctgtccctccatgtgtcctcaagttttctgtccctgttccttctattctgagtcagtgaatggtttttagagaagaatcacacagtggtgcacagtagccccatgagaatagtcttcaaccccaactgcatttttgcagggcctacccattctctctattgggacattcttctatttaaccttttatgaatcctacttctttagggctcggctttattaagtcacttagagaagcctttcctgctatctagactaaattagtaaccctgttaatgtgctctcattatgcttgatgtttattttttaaatgtttgaaataatcacaaacttatagaaaaattgtcagtacagagaattttttttcttgaaccgtttgagagttgtagcctgatgctttatcacctccaaatacattcatgtatatgtcctacaaaaaggattttgtcctgcattactgtataagccattgaaatcaggaaattaacaatgatgtacttcagtctaaatggaccagtttaccaattgtcccatcattgttctttttttaggaaaaggatttttgttcacagtaacatattgcattgtta

SEQ ID NO: 714731 - DNA, 619 bp, Homo sapiens
gactcatgttgtaatttcctttccctagcctaggaatcagtcactcttctaaggagctttgttccttttagagggcaagggttctagaagccaagttctgctttaggtgcactcattattggaacattgctgctcccaggccctctcagtggacagagcttgcagaatgtatgtatctatgtatacacacatatttacatccatatttatttctgtatctatctctctatattgaaaccatgagtttacattggtacatctcattcctatctaccaccatagggttcattctaattttctccctttccatatttgtatttttcttctcagacagtgggaaacctggagctcccctattttttatttattgacttatcagtcaccctgtttgcagtcaatcccctatctctgtggctactccttccctgtatagatacccttctcaccccatgtgggatttgatataccatgttgggttgcccccatatgyaaatgtcctccttaccttgtttagcctctaataccctacaccaggctgttgcttcatgtgagtgttcttaccctgctggagttctaacacaccatgtcaggctgactctctgaatggacaccttcccca

SEQ ID NO: 714732 - DNA, 537 bp, Homo sapiens
ttataagtgggtagtatttcctgacgtgaggctattgtttttttttgtactttgtcgtaatcatgttgtcttacatactgtctatctgattactttctctgctacattaaggatatgcttcatgattctttccatcattgagaaatgcaatgagtttataacatttaaatcctattccatcatagtctaagaactgaccaaattttaaaaatatatcaatcattttatcaggtaasattgaaatttgtaaaatacaaaaaccctaaactttttacttttacttaaagtgtataattgtacattcattcctcaatgattagatgttgggctcagtgttggaatcctctgattgacattactcattgtttttcttgcattaaccctgcctgtgatacactgggtttatggtttcagccgttgtctttctatagagaagagtgagcttagacacttaacaaacaatatgagtgtggagtccttcaggctttacagcttcttggctgatcttttagttttttagccaaaactagattgaca

SEQ ID NO: 714733 - DNA, 537 bp, Homo sapiens
ttataagtgggtagtatttcctgacgtgaggctattgtttttttttgtactttgtcgtaatcatgttgtcttacatactgtctatctgattactttctctgctacattaaggatatgcttcatgattctttccatcattgagaaatgcaatgagtttataacatttaaatcctattccatcatagtctaagaactgaccaaattttaaaaatatatcaatcattttatcaggtaacattgaaatttgtaaaatacaaaaaccctaaactttttacttttacttaaagtgtataattgtacattcattcctcaatgattagatgttggrctcagtgttggaatcctctgattgacattactcattgtttttcttgcattaaccctgcctgtgatacactgggtttatggtttcagccgttgtctttctatagagaagagtgagcttagacacttaacaaacaatatgagtgtggagtccttcaggctttacagcttcttggctgatcttttagttttttagccaaaactagattgaca

SEQ ID NO: 714734 - DNA, 513 bp, Homo sapiens
tttttttttcagagacagggtctcactctcttgaccaggctggagtgcagtggtgcaatcacagctcattgcagtctggacctccctgacgggcgcaggctaccacacctggctartttttgtattttttgtaagagtcagggtttcccatgttgcccaggctggtctagaactccttggctcaagcgatccacgtgccttggcctctcaaagtgctgagattacaggtgtgaaccactatacctggccaaaatgaagcatttgcatcattggaataagagttctgcatattagtttaggaatgggttactccaacagagagagaaataagctttgtcttttcattagcaaagatttagcagtgccttttcagtactttaaatatttgtcattgaaatacaaggggtagtcatcagtattcctgggtgataatcagcattttccttagagattcttttaaaagaatgtattatggggctgtgggaaatgttgttggatttaatccattttgaa

SEQ ID NO: 714735 - DNA, 937 bp, Homo sapiens
atgcacacacactgtctactctagggctttgtgactgagcaacaggcttttttttccctatacattctttgttagtatgacactgtcagatcatctaagctaaagggaaaaatgtatttttttttcatgagttcctaacaccttttgctaattataagcaagcacgcaggcatttcccttatataatttctcattttatcttctaaaatttggtacatgtgagtagccaactatgtccaaatctttatatgattaggccaatatgaaaagaattaaaattttaatttaatatgctctcttttattttggaaaatatttacttgcatcatatttccagcttatattatatttttattggttgtttagcattctttaatactaaaacaataaaataggaaatcatgcttagaccacgtcttctaaatttcgaagacgtaatatgttgaaaagctttatttcatgtataatacattttcatttagtttatcaattttaaaagataatttcaactaaaaaaatccttcacagtttataagtgcactttattagtggagaaaatcaagggttttaaaacatcagagtaatcatgatggaaattattatacgttcatatttcagaaaataactactctttttttaaktttacaaaggtaaattgacaaatgcaactttcccataagctctgaacaaaaagaggggctgttaagataagtatgaacatgggggaatcaggggaactgggaggtgctaatgaagaaaaagctagaaaagaatcaaagaactacattatttaaaaacttcatctattaggaagtggctaagaagaaaaatatggagagagatggaatgttactgtcataaacctgggagaagatgatcttatgcaaaagttaatgtaagcggaaatggacacaagtatatggatttagaagatatt

SEQ ID NO: 714736 - DNA, 741 bp, Homo sapiens
tcagtgatttaaatatcttaagaaatccttcagtaacaaaattaatctgtttaacattttattgcttgccctctacttcctatcttcctataatgggtcagaatgtggacatgaatgtcagccaacctcaaatatgaggccgaggaaaatgccctaagagcgaacacaatagcaaaatgggtccctgtccacctcgcaaagcawagcctgcctttcaccctagacttttatggggagatcattgtttgtcctgttttagtgagggtttttaagtttcatttgttgtaatatctcagcttatacactcttatactcaacatacttaaactattttgaccacagaaattgtcttaacggttttattggaaaatctgctatcaataacatcttgaagactacatttctaaaaaagatattttaggcaacactgggcataccaaaggattctttaattctgatttcttgattaacaatccttgctctgtgcatggcttgttccatgattttcctattctctatttcctggttggcacttctttaattgctgacacaggacccatatttcacctatctgatggctcctgagaaccctccactgggtcctctggacctggccaggatacaggggataaaagagtatgtcgaagattacttgagaagtctggggcaccattatgcagcaggtgaacatcactcttgcttaatactgtattggttgtaagtcagtcatatggtcctatt

SEQ ID NO: 714737 - DNA, 565 bp, Homo sapiens
gttggtaactctgattattgaatcctttcaatacttaatttcctcttaacagattaagataaagaatctgaaataatagttacagtagaagatagcaccacccccagatcaatactatcctccttaatgctaaaagtagtcactttaggtaagtcattagtaaatgcatgaacctgaagataacagttttgaaacaatctcaaatttttttgtctctgttatagattagttaaagatgctaataaactctttgagtcatatctgattctctcagatatatcaagtgtttttgctactttaattatctctttaytattgccattacctttatctactcaatctagaccttttcatgtaaggactgtattttgatcatttcaccatattttccctcccttcacatcattctttttaattcgacatttggatgttagacttactgttctctagctattttggtttcagtaatgttactctcttgatacaaatttggcctttatttttcattaaggagagcacttattaccatttatgtatttatttattcattatgagaaacaacttt

SEQ ID NO: 714738 - DNA, 1365 bp, Homo sapiens
aaatttgtaaagtttgaaagtgcttttgtttttttaaagtcttatcacacttgggttttatcaagactttcacaggtgtaaatgacagaaatgttccttaggattttgagagaaaaaatacacagagcttcattggaaatagaatcattacatatgtttctgtgtgtgtacattgatgtgtataggtacaatattgtcctgtcctctttaraatatcaatcctcttttcatttgaggaaagaatattttccctatcctctcctcattgctttgtagggagagagactgaggtattgataatctttcacttgctacacgctggtcttggggaggcagtcagctggagaagttggtctgctatgtagagctaagttcctcttgtgtggactagactgattcaaagtctagactgatggagtagttagcagactaaaaccatttctttattataaactatgtcagtattagaggtgatggtttgttttccatatgccactcaatcctcagaactactactactacaaaaaaagtttctgactacccaagttcctacagtaaacagggcattcaaaatgtgagtctatgacttcagatacaaagtccagagctctttccaaaatattatgtaatctatatatagtatcctttttgttcataaatataccatttagcctggaaactttatttgttgggccactgttttactcggtttgtgatttatggggttctctaaaccccaatatcctcatttctaaagtagagatataataccttcatctctaggctgttgcaatgcctgtatgtgtgtatgtgtgcgtgtataacttataatatcaaatatatgacattattctgttcctgagatggagtagatacttcagaaatgtttctttcatttttatttgtaataattgtactgtaaaataatgcatttaaaccttaaaatcagctattaaaatatgtttgtagggttattgccactggaataatacaggttgccaatgtaaatctttgtaaaacaaaaagacttctcttctcatgattgattatacaagatcatgtaatttacttaatcacttatcttccaatacaaaagtactgtattctacacttaaattttcaatatattacattcaataaacattatgctatcacctttaaatgtatagggttaaactctcctctagtagttactatttaaacaacaaatgggaacttgaaaagaaaatattttaaaacttactttcataaaatgttttactaacagatgaaaatctttttgatgaatataggaggaggggttttagagaagttagcttaagagacagattgccaataagagacagaaaaagatactagaaatga

SEQ ID NO: 714739 - DNA, 1416 bp, Homo sapiens
tgtcttactctggtctatgatggctagtttattatagtttgtagccttgagcttttaaatttttttattagacacaggggcatatggttcctggcccctatttttgtctgtagtaccaattggggtcctgctggggaacagctgtagctcccttgggggtagttgacgtctgccaggtgtaagtcatccccacaggacagtgctgcctcatagatggtttgtcttttttctcatgagaggcttgtcctatgaagatacttatatcctttgaagatagtctaagtataagagtcaattwttggaagccctcgatgagtcttttcgggtcctccgagaactttttaagatgttttcacaaggttgtgaaggtttgtaaatagggaacctctgactatttacccttatagcagcagaaaaggtccagctggaggatggtattaaaattcatactttagttctttggccaggcctcctctggttttgtaaagtaaaatttgtttttttatttgtttgttgttgtttttagggtttgagggtcaaatttattccaatttttaaggatgcatcagaagggggaaatcctggggtatggagatctggattcccagtgattctgttctgttaaaaggcccagtagtcatgccctcgctagagtgtgcagagaagggacctcagtcgagtgtcctttggtcagtctacaagtcctggtattaggagttttgcttataatgtagatttgtccttgacatgacctgaaagacagtgaagaaatcagaaagatgccaggggacctggatcctgtaggatgccagtcctccagtcaagccagggatatcaaggcatacctgtcctcctaggctctacaacctgcacctaggcatccttgggtacccatctggactagtttcccctggatggagtgcccgtggtgcagctatattctcaatcaagtgcttattgccgaagcatctgcagcccttggggctttggaaaagataaggctttcacaatcatataggacaaataacaggcctgattttatggtgatgggaatgttggtctataattgaattgattctgtctttattttttgtggggaggtatgggtggccacgcccatttggcttcttaggtttcacaaagggagtattgccaaaagtatgttttatccagcaattaaagtcttttctgtgtaaagacaaaactccatctgccttggccggatgcaggggagtcttgacatacacagttgaaaggatctctaaattatcctggtaagtcagagatgaaagggaggaatgaacaagagtttctgaatacaaatggaccagaaaagtaagaatataattggcatgtccaaagatttctgaaggacaaaaggccctaaagggtaaaggggtctagaaagagaggtcc

SEQ ID NO: 714740 - DNA, 1416 bp, Homo sapiens
tgtcttactctggtctatgatggctagtttattatagtttgtagccttgagcttttaaatttttttattagacacaggggcatatggttcctggcccctatttttgtctgtagtaccaattggggtcctgctggggaacagctgtagctcccttgggggtagttgacgtctgccaggtgtaagtcatccccacaggacagtgctgcctcatagatggtttgtcttttttctcatgagaggcttgtcctatgaagatacttatatcctttgaagatagtctaagtataagagtcaatttttggaagccctcgatgagtcytttcgggtcctccgagaactttttaagatgttttcacaaggttgtgaaggtttgtaaatagggaacctctgactatttacccttatagcagcagaaaaggtccagctggaggatggtattaaaattcatactttagttctttggccaggcctcctctggttttgtaaagtaaaatttgtttttttatttgtttgttgttgtttttagggtttgagggtcaaatttattccaatttttaaggatgcatcagaagggggaaatcctggggtatggagatctggattcccagtgattctgttctgttaaaaggcccagtagtcatgccctcgctagagtgtgcagagaagggacctcagtcgagtgtcctttggtcagtctacaagtcctggtattaggagttttgcttataatgtagatttgtccttgacatgacctgaaagacagtgaagaaatcagaaagatgccaggggacctggatcctgtaggatgccagtcctccagtcaagccagggatatcaaggcatacctgtcctcctaggctctacaacctgcacctaggcatccttgggtacccatctggactagtttcccctggatggagtgcccgtggtgcagctatattctcaatcaagtgcttattgccgaagcatctgcagcccttggggctttggaaaagataaggctttcacaatcatataggacaaataacaggcctgattttatggtgatgggaatgttggtctataattgaattgattctgtctttattttttgtggggaggtatgggtggccacgcccatttggcttcttaggtttcacaaagggagtattgccaaaagtatgttttatccagcaattaaagtcttttctgtgtaaagacaaaactccatctgccttggccggatgcaggggagtcttgacatacacagttgaaaggatctctaaattatcctggtaagtcagagatgaaagggaggaatgaacaagagtttctgaatacaaatggaccagaaaagtaagaatataattggcatgtccaaagatttctgaaggacaaaaggccctaaagggtaaaggggtctagaaagagaggtcc

SEQ ID NO: 714741 - DNA, 2129 bp, Homo sapiens
ttatgtctgtctcccacataaagatgcacctccttaaagactgttatgtgttaacttttaaataaatgctcacatgtgcaaggccctgtggtaggcattggcatatcaaaaaataaattgttttcttggctgggcgcgctacgtcacgcctgtaatcccagcattttgggaggccaaggcaagtggaccacttgaggtcaggactttgaggccagtctggccaacatggtgaaaccccgtttctactaaaaataaaaaaattagttgggcgtggtggcacgtgcctgtagtcccagctattcgggaggctgaggcaggagaattgcttgaacctgggaggcagaggttgcagtgagctgagattgcaccacgacactccagtctggaagacagagtgagactctgtcttaaagtatatatatatatatatagttttctttgcctctgcccagcacctagcacatgcttattcgatgaatggctcaatcaatgagttattagcacagaggttcagactttggtgtgcatatgaatcacttcaagagcttgttaagatacggatgtcagggcctcaccctaaagccctggcatcagaacttgttaggtgaagtttggtcatgtatatgtctaacaagctccccaatgatctgatgcattccagtttgtgaacgttgagaaacccactatttcagaaaaggcatccctaagtcattctaggcagttaaaggcccactctgagtttaagtttcctcaaaggaaggaaagcacaatttttttttttttttttgagacagagtctcgctatatcaccaggctggtgtgtggtggcgcaatcttggctcactgcaacctccrcctcccaggttcaagcaattctcccgcctcagcctcctgagtagctgggattacaggcacatgccaccacacccagctaatttttgtatatttagtagagatggggtttcaccatgttggtcaggatggtctcgatctcctgacctcatgatccgcccgccctggcctcccaaagttcggggaatataggcatgagccaccacacccggccaggaaagcactatttactcaatacttattaagtgtcaggtgctgtatatttaggtgccttatatacttttctcatttaattcccacaaaaactctctgagggaactacttgtctcccgatttcaaagaaaattgaggctcagaaagattctgtcactcgctcaggagaaattgctgtggtaagagtctaaccagaagtggttggcctccagagctgtttccgtggccccaggctgcctcccatacctgtcacagccaatgcctctctgctatgtgccttgtgtttgctgtccccaaatacccaccaacaaactagtgctggttcctgatagtgctttcaccaggcctaagagaaatgggaaaaataaaagtaatgcaactctttttactaaatgattgacctcaattctgagattattttcttcatttttatggttaaaatgtcttttatttcataaagtgatgatgatggtagtggattgtttccttttttaatgtctgtacttggtaaaataaaaaaaagtagggaacactagtttggcatcaaagttttgttgttgttgttgtttgtttgtttgtttttttgaggcagagtccggctctgtcgcccaggctggagtgcagtggcgtgatcttagctcactgtaacctcctcctcccaggttcaagcaattcagctgtctcagcctcctgagttgctgagactacaggcgcacgccaccacgcctggctaattttttttttttgtatttgtatttgtattttttttttttttagtagagaaagggtttcaccatgttggtcaggctggtttcgaactcctgatctcaggtgatctgcctgcctcagcctcccaaagtgctgggattacagacatgagccaccacacctggctagcattaatttttttttttttttttgagatggagtctcgctctgttgcccaggttggagtgcagtggcgtgatctcggcttacagcaacctccacctcctgggttcaagcgattctcctgcctcagcatccagagtagctgggactacaggcgtgtgccaccacgcctg

SEQ ID NO: 714742 - DNA, 983 bp, Homo sapiens
taatttttggggagatgcatggacctcaggttaagaacccctgatctcgggggtgggcagtggatgtctgtgatggaaattggtgttagtttcaaagatggagaactgggctaggagcctgccactctggttttagtctctgctgatttgtgcctgagtccaacacacatttattaagcgccgattatacgtcaagcactgggaacacaaagattcaatgtcatgcaattcagaaaagtatttactgggggcctactttgtcaagcacgggctaggctctggggacacagcagtgaaggaaacagcctccacttgcacggaccactgtggtcctaggcccgtttgttcttttcggctctgtcctgctcctagaaatgacgtcagctcttatcctttccctgccctctcctttactcactatcttgttctgggaataataccacctcactgggctggctctctgcagttcccaaagtgcctctgcatacgcaattgcatttgcttcttttgacagccctatgaggtagacacgatcatcgtcagccctgttttgtcagtgagaggcggctgcttgtgtcaagggctggcttttcaatagttcacagcgaggtagctgctttgccatgcatgaaaccctgactcagaggcagcttgctgacaagtgatttaacattgggctcctcatggactcacctcttgcacaggatgatgggattttccaggcaagaaaaatcaaggcttagagaggttaagtgtcttggccaagtaagtgcagacctgagattcaaacccagggctttccagcatcaagtgatgtttccattttgccatgccgcttctcagtaaagggtcactgcagcaaggcagggaggtcctatgtctggggtcgggggagggtgggggscagaaccttgaaccttaatcagctgcatgggggccacggtgcagattttgtgcctggtcccagctgatgaagcctcaaa

SEQ ID NO: 714743 - DNA, 1095 bp, Homo sapiens
agaaacagggcctctacccccagagctgcagcctctgttggaaggggaagtaaaagggggccctgagccaacacctctggttcagacctttcttagacgccaacaaaggctccaggagattgaacgccggcgaaatactcctttccatgagcgattcttccgcttcttgttgcgaaagctctatgtctttcgccgcaggtaagttcacaacaatatttgtcattgccatcatatgttggcaagcttggtaactttcccctggggagagtaactctagagactgtcatacaggaaaggacagtttagctctaggtatcttttcctgccattcttcttgatttactggaagaataagtggcctatatctgatggcctgctttcttgttctgcctcagcttatctccagcctctctgtgggctgttcctaccctatcctggaatcctctaccagactgtataaagagtggtgtacccttccagctgggagatggagggtcacttggggggagattcccatatatgcctgtgtgggaggagtgaggaccaggtgccttctaagggctttagctgaaattcttctggtgaaacaggagtttgaacttggtyggctttttcctgtttttcagcttcctgatgacttgtatctcacttcgaaatctgatattaggccgtccttccctggagcagctggcccaggaggtgacttatgcaaacttgagaccctttgaggcagttggagaactgaatccctcaaacacggattcttcacattctaatcctcctgagtcaaatcctgatcctgtccactcagagttctgaagggggccagatgttgggtgcagatgtagaagcagccagtcacagacccattctatgcaatggacatttatttgaaaaaaattctcaaaagttttttttttttttttgggggggcggggttctaaagctgtttttaactccgagattacaacttagaggaaccaaggaaataaagcaaataagatttaacaacccaagattaagaggccaggaagaggttagacgcaatgtgaaactgtcctcctaggataaggtttaaagtggctttttgggggc

SEQ ID NO: 714744 - DNA, 1279 bp, Homo sapiens
agctccagaatttaatgttagaagagattaaaacagcctctacaccaagatacctggtctccagcaccaatgtcttcttcatttctgtcaagatgaacaccttgagcaatatctggtgactgttgctccaaggctaccagcacgttacaagtcttgtagtcaaaacctataagcaaaaaacacaacatcttgtttacgtcctagaaatacctgctgtttacagcaattatctggaattctaaacactgctgaagaaatcaaatatacctaaaccatcggaccttttagagaatgaacagaatagggcttagtgtatagtaagatacaactggagtttaggattagcaggaacattctaggagtttcttcaaacctcacagctgttacctagaaaaaaatgagcaaaatcattaaaacacacctttggaagaatcatcatatccaatgtgtttaacagcttcacgaaccactttctggtagtcaacagcagctctggatgtaatttccccagcaagaaggatcattccagttttagcaacagtttctaataaaaagagacattcaactcaaacatcacttctataaaaataatttttatgctatctttccaccagttgataagcacattctgaacctaccacaagctactttggcatcaggatcctgctgaaggtgggcatcaaggacagcatcactgatttggtcacaaatcttatctggaaaagagaaattcctggctcagtttctttaactttaaacaaagtatgtatgtatgtatgcaagctccctccctgttactatctgtaaaatctttggagattttaaaaaacatgcttaatacatcttaattcattgtgtttgcactttcctcctaaaattcaaagtttgcattataaatctaatcaccagaaaggtgaactgttagtcctatatcctttaaagaacagaatttkccctatatcatattcacttccacaactgtaccaaacccctctgcacctgggagtctggtagaactgaggccacaggtaggccagtttccctaatcttaaggaacaccaattataatgagcaacaagataattcgattaaacaattaaatgaaaagcattttctgactaaaatggcaattatctgattttgctgttaggagttgcgcaggaaacaaaagctcaacagtgtagaagatgctcaaacgtattccgaatccatgtctccctgctttgtcatctattgttaggagggagaacaaatatctccctaattcaagttcgttttt

SEQ ID NO: 714745 - DNA, 1279 bp, Homo sapiens
agctccagaatttaatgttagaagagattaaaacagcctctacaccaagatacctggtctccagcaccaatgtcttcttcatttctgtcaagatgaacaccttgagcaatatctggtgactgttgctccaaggctaccagcacgttacaagtcttgtagtcaaaacctataagcaaaaaacacaacatcttgtttacgtcctagaaatacctgctgtttacagcaattatctggaattctaaacactgctgaagaaatcaaatatacctaaaccatcggaccttttagagaatgaacagaatagggcttagtgtatagtaagatacaactggagtttaggattagcaggaacattctaggagtttcttcaaacctcacagctgttacctagaaaaaaatgagcaaaatcattaaaacacacctttggaagaatcatcatatccaatgtgtttaacagcttcacgaaccactttctggtagtcaacagcagctctggatgtaatttccccagcaagaaggatcattccagttttagcaacagtttctaataaaaagagacattcaactcaaacatcacttctataaaaataatttttatgctatctttccaccagttgataagcacattctgaacctaccacaagctactttggcatcaggatcctgctgaaggtgggcatcaaggacagcatcactgatttggtcacaaatcttatctggaaaagagaaattcctggctcagtttctttaactttaaacaaagtatgtatgtatgtatgcaagctccctccctgttactatctgtaaaatctttggagattttaaaaaacatgcttaatacatcttaattcattgtgtttgcactttcctcctaaaattcaaagtttgcattataaatctaatcaccagaaaggtgaactgttagtcctatatcctttaaagaacagaatttgccctatatcatattcacttccacaactgtaccaaacccctctgcacctgggagtctggtagaactgaggccacaggtaggccagtttccctaatcttaaggaacaccaattataatgagcaacaagataattcgattaaacaattaaatgaaaagcattttctgactaaaatggcaattatctgattttgctgttaggagttgcgcaggaaacaaaagctcaacagtgtagaaratgctcaaacgtattccgaatccatgtctccctgctttgtcatctattgttaggagggagaacaaatatctccctaattcaagttcgttttt

SEQ ID NO: 714746 - DNA, 650 bp, Homo sapiens
tcaggcaatagatgattggctatttctttacctcctgtttttgcctaattagcattttagtgagctgtctctactatctgattggtcgggtgtgagctgagttgcaagccccctgtttaaaggtggatgccctcaccttcccagctaggcttagggattcttagtcggcctgggaaatccagctactcctgtctctcgatgatgtaatacaccaacatagtctttttctataagttaaactaatttttattgatggcaattaccgttgtttttcatgttctgacattctaaactcctccaggacaaatatcctttcagtaatctttacacatatccgggattattttcttaggatagattcctgtgagtcagttgttggtctgcaaaaatgctgaggttttgtttgtttgttttttattaagcggtaaacatttttattatttttggtgagtatttcaaattatttttcaaagaatttgtattaatttacactaccagcaacaatgtgtgcctttwtattttacttttttattatttaaaatatcagacatacaaaattagaatagtgaacctctgcatacccatcacccagctttaataattatcagcatttttctgattttatttaatctgtgtcccttcatcctcca

SEQ ID NO: 714747 - DNA, 986 bp, Homo sapiens
ttaaaagaaaagagtgcataagaccaacaggtataggggcgggggtaggtacagagcagccaaaatgaaggtgaaaaggcactgggttgggagctgagagccctagattgccagtcccagctctgttacttcatttattaattcatttaacagctatttactgagcacgtgctgtgtgccaggtattattgttctacttrttgggcattaacacttgtgaacaaaagagtagatccccttaggagtggagaatgctaatgaacactgagaaggcaattaaaaaataaataagtaaaacaaaacagagactattacatggaccgatgatgatgatgtgccataaattgaggagagtaactcaaccctcttcacctggtgtttaaaaaaaaaaaaaaagagagaggaagaaaggaaaggtccctgatggatcttacattcttatgagacagacggacaacgggcaaatagctagcgacaagttctacgaaggaaaataaagctgccctttctcctacagggcaaatcataagttaaataattccggccaggcgcggtggctcacgcctgtaatcccaacactttggaaggcggaggcgagtggatcacgcggtcaggagttcaagaccagcctggccaagatgttgaaaccccgtctctactaaaaatacataaatttgccaggcttggtggcgggcgcctgtaatcccagctactcggaaggctgaggcatagaattgcttgaactcggggggcggaggttgcagtgagccgagattgcgccactgctctccagcctggacaacagagctagactccgtctcaaataataataatacttcatttgagctttacaaagccctatgaagtaggtccctttcaacctcacaacttttcaaatgattatcaggagtatgtcctgcccctttcgcaggtcaaagagagtagggaaaatctggacctcaagggaacattgaacgcacaggtca

SEQ ID NO: 714748 - DNA, 986 bp, Homo sapiens
ttaaaagaaaagagtgcataagaccaacaggtataggggcgggggtaggtacagagcagccaaaatgaaggtgaaaaggcactgggttgggagctgagagccctagattgccagtcccagctctgttacttcatttattaattcatttaacagctatttactgagcacgtgctgtgtgccaggtattattgttctacttattgggcattaacacttgtgaacaaaagagtagatccccttaggagtggagaatgctaatgaacactgagaaggcaattaaaaaataaataagtaaaacaaaacagagactattacatggaccgatgatgatgatgtgccataaattgaggagagtaactcaaccctcttcacctggtgtttwaaaaaaaaaaaaaagagagaggaagaaaggaaaggtccctgatggatcttacattcttatgagacagacggacaacgggcaaatagctagcgacaagttctacgaaggaaaataaagctgccctttctcctacagggcaaatcataagttaaataattccggccaggcgcggtggctcacgcctgtaatcccaacactttggaaggcggaggcgagtggatcacgcggtcaggagttcaagaccagcctggccaagatgttgaaaccccgtctctactaaaaatacataaatttgccaggcttggtggcgggcgcctgtaatcccagctactcggaaggctgaggcatagaattgcttgaactcggggggcggaggttgcagtgagccgagattgcgccactgctctccagcctggacaacagagctagactccgtctcaaataataataatacttcatttgagctttacaaagccctatgaagtaggtccctttcaacctcacaacttttcaaatgattatcaggagtatgtcctgcccctttcgcaggtcaaagagagtagggaaaatctggacctcaagggaacattgaacgcacaggtca

SEQ ID NO: 714749 - DNA, 986 bp, Homo sapiens
ttaaaagaaaagagtgcataagaccaacaggtataggggcgggggtaggtacagagcagccaaaatgaaggtgaaaaggcactgggttgggagctgagagccctagattgccagtcccagctctgttacttcatttattaattcatttaacagctatttactgagcacgtgctgtgtgccaggtattattgttctacttattgggcattaacacttgtgaacaaaagagtagatccccttaggagtggagaatgctaatgaacactgagaaggcaattaaaaaataaataagtaaaacaaaacagagactattacatggaccgatgatgatgatgtgccataaattgaggagagtaactcaaccctcttcacctggtgtttaaaaaaaaaaaaaaaragagaggaagaaaggaaaggtccctgatggatcttacattcttatgagacagacggacaacgggcaaatagctagcgacaagttctacgaaggaaaataaagctgccctttctcctacagggcaaatcataagttaaataattccggccaggcgcggtggctcacgcctgtaatcccaacactttggaaggcggaggcgagtggatcacgcggtcaggagttcaagaccagcctggccaagatgttgaaaccccgtctctactaaaaatacataaatttgccaggcttggtggcgggcgcctgtaatcccagctactcggaaggctgaggcatagaattgcttgaactcggggggcggaggttgcagtgagccgagattgcgccactgctctccagcctggacaacagagctagactccgtctcaaataataataatacttcatttgagctttacaaagccctatgaagtaggtccctttcaacctcacaacttttcaaatgattatcaggagtatgtcctgcccctttcgcaggtcaaagagagtagggaaaatctggacctcaagggaacattgaacgcacaggtca

SEQ ID NO: 714750 - DNA, 986 bp, Homo sapiens
ttaaaagaaaagagtgcataagaccaacaggtataggggcgggggtaggtacagagcagccaaaatgaaggtgaaaaggcactgggttgggagctgagagccctagattgccagtcccagctctgttacttcatttattaattcatttaacagctatttactgagcacgtgctgtgtgccaggtattattgttctacttattgggcattaacacttgtgaacaaaagagtagatccccttaggagtggagaatgctaatgaacactgagaaggcaattaaaaaataaataagtaaaacaaaacagagactattacatggaccgatgatgatgatgtgccataaattgaggagagtaactcaaccctcttcacctggtgtttaaaaaaaaaaaaaaagagagaggaagaaaggaaaggtccctgatggatcttacattcttatgagacagacgsacaacgggcaaatagctagcgacaagttctacgaaggaaaataaagctgccctttctcctacagggcaaatcataagttaaataattccggccaggcgcggtggctcacgcctgtaatcccaacactttggaaggcggaggcgagtggatcacgcggtcaggagttcaagaccagcctggccaagatgttgaaaccccgtctctactaaaaatacataaatttgccaggcttggtggcgggcgcctgtaatcccagctactcggaaggctgaggcatagaattgcttgaactcggggggcggaggttgcagtgagccgagattgcgccactgctctccagcctggacaacagagctagactccgtctcaaataataataatacttcatttgagctttacaaagccctatgaagtaggtccctttcaacctcacaacttttcaaatgattatcaggagtatgtcctgcccctttcgcaggtcaaagagagtagggaaaatctggacctcaagggaacattgaacgcacaggtca

SEQ ID NO: 714751 - DNA, 643 bp, Homo sapiens
cttagctgcaagataggttgggaaatacagtctctgctgggtggtcttgtgtgtagctaacacattggggtgggggagggcaggagaatgagctagtgggtttctgtattttactgaaatagagcagatagtgagagacaattcacaggtacggtcataaacacccactcagctgactacagctcagtgtggcttaatttatcagttgctttcctggaagcagcttttctgcaggaagagaaaagaacagaaaggaactatgcagtggtggggaggagcaggtggtgatgtgggtgcttcttgaggacagagaccatgtctcattcactcggtatccatgatatcttccactgtgactggcgcacagtagattgccccataaatgtccctttgcatcccacttcttccacaaactcacaggatttgacctgtgtagtaaaccatgcctgaattagattgaatgcaatagaatggcagactgacagaattcacgctcacttgaattgctcrtcctaaatcgacctcagctgggccctaattcaccaactaggtgatttcatcattctccagcttgctttcattctccagcattgatttctggcctttattggttttgagtctgtgagcgtgggagatttgttca

SEQ ID NO: 714752 - DNA, 1371 bp, Homo sapiens
agccctacataaatattacttttccccttcattttatacatgctagagaagttaagacaagacaaattaaatgactaaaccacaatattgtattaactagcacatatcatggttcaacaagtttgaagagaaaggtatttaccatatggtctttaataaaacatttgtgcaggttttctttaatctcaaattttaacttgcagaaagattaaaaacttgtttctcttttactctcattattccttctgtaactataatacttatcctttcctagtaaaacattccccaaaaacctaccactgaaacttgcattttgtaggcactgagatggtttattattatttcactattgctaagaatgtgcgtgcaagatycagaatgaaaatctgcctttgtatgtatttctgcacttagtaaagattcatgtgtgtatatatgttcatacacatactattttgatgtgtatgtctgcttgtacctgtttgttgaagaatatttttctcactcaaggaaaataggtttctataaaaactggaaagaatcagaataaatggagccaggggtgttcttgaaagaagagcatcatggaagtctttggtcctggatcctacaattatgtatagtctcaaaaaagaacatgattagatccagtattaacaggtaagagaataaagcaatttagaatgggtgctggttaacattaaataaacaacactttaatgagtgacaaaaaaggagagtggagatccctttgataattaatctctccatttgaggacaagattaatgctagtatgacctcaattttatcttgtcattagacagaatatagacactatcatcaaaccagcaaaacctatcatagtcaccaggtacaatgctgctgaaggatacgaagtacttgaatataatatctgagttgctaaaaaggaaaatgaacaggtaggtatctatgtcagagataggaaggatatacagagaaatattaaggttagcaatgagagatgaatattcaattcctgatgaaaaacattggaggagtgaatagtaaggaggttacctagaagaaaaaatttagaaagtatcatgggcaagaaaacaagaaatcatgtgggaacaaggtgtcaccaaaatgaccactgggtgtatacttgatgagcattgtggacagctggtaataaatctttgttgcagataatttaattttaaggtaaaacatacatttatgcttacaggatcaccactactcttaacgaagtttttaaaatatttttttaaatatttacaaacacaggcttaattacaacagcctaaattatccaaaataataccaagaaaaataatttgcaattaaacgagcatctatgttgg

SEQ ID NO: 714753 - DNA, 2221 bp, Homo sapiens
gtggagggaggcaggagaacagaacagatcagaaaaggcgggagcctggggctggatggcctgattcatgatgggctttaggcaactcgagagtttggataacaaactggagaatatgaatccagagaaaggagctgagcgcagatctaggatgaaagacccagagtgggaggatgagcagagtgtcagtggaccatgtgggagtctgtgcctagacagccagactagagggagaaaagttcacactgagcatgcagaaagagttggtcagggagtagcacctttcaggcagactctgtgtgcccacacacaaacacaattcaactattgatcctggagagggttgtctagcatctgcacctgccatcaaaccagatgtgtaaggacttaagaaacataccatgggccgggcacgatggctcacacctgtaatcccaacactttgggaggctgaggtgggcaaatcgtttgaggtcgggaattcaagaccagcctggccaatatggtgaaatttcatctctactgcaaatgcaaaagttagctgggcatggtggtgcacgcatgtaattccagctcctcgggaggctgaggcaggagaatcgcttgaacccgggaggcggaggttgcagtgagccaagattgcaccactgaactccaccctgggtgacagagcaagactccgtcttaaaaaaaaaaacaattcctttctgaaaaacaattactccaagaagtactctagctaatcaaaaaaaaaatcaaattaaagaaatcaaatacaaaaaaaaatggtatcaatgatggtcacaagtaaagaaaacaccagaatttagagccattgtctagttataattggcatatttataaagctacatgcaaatgtcaaacatcttgaggctaggggatgtgtttgtaagatcatcactggatccctagtgctttgcataatgcacatagtagatcctcaataaatatttgttgaatgaataatgtaagaaagaactcaataacgataatccagaactgaaaatccagatcattctgacaaaaccaggtttgtacagagaggtttgttgctaaacctctcatctcacacaaataaaatcattagatactcttttattcttaatgttcttaatgtagtgaaatatagacataaaagattttaacataaagctaaaattaaaagtaatatgtaaaatttacaaagcattggagaatgaaagaataaagaaaacaagagcaatattgcaaaagataaggaatttctttcagcgtagttcaatgtgggccagaagcttggctctgttctctctgagacctcaggcaaggcacttcttgggctccttgtctcctcctctgaaaagaggtaggaatggaaactctagagagctccatggctgctactaactctgggactgcagaatgggcagagagcttgacctctgggaatttctacaaggttcattggttgtcctctgctgatatgaaaatgagttaatttagtacacttgataggtcagttgtgtgcattttaacagggactctctgaggcaatgcctgagctgaaggatagatataatggtgagaattttaagcatggaatgacccatagaagggaggctgatatggggtatttgcctgcccttcaatcacatgccatcagcaatcatccattgcatttacatctagggtagtcttggatatgaggacataacatggagctttatcagaaattgcatgggctttgatataagaagatttcaattcaaatcccatgtttaccactttctacttgtatgactttgggcaaatcaagtcacttacctaaattgatgatctattaagtgtgtataagatttggtgtgcagaataaaatgataaaatatgtatgccctggccaggcacggtggctcatgcctgtcattctagcactttgggagactgaggccaaaggatcacttaagcacaggagcttgaggctaacctgggcaacacagtgagaccccatctctaccttaaaaaawtttttttgatggggttgtttgtttttttcttgtaaatttgtttgagttcattgtagattctggatattagccctttgtggcgattcctcagggatctataactggaaataccatttgacccagccatcccattactgggtatatacccaaaggactataaatcatgctgctataaagacacatggacacgtatgttt

SEQ ID NO: 714754 - DNA, 1507 bp, Homo sapiens
tgagtgagcagttcacctgctgtgtgcagccaccttggagaggcgtcctgcactcacccaagcaggggtggctgctcctgcgggcaccagaggaacacctgcttcttaagcacggaaaaccaatgacaargccattattctctttttgtatttattcccctgactgctgcagccaaaatatacctgtggtttacctttcacaaaagatgtcttttctgcctttagttgcaagaatatttccaaagcagatgccaaactgtacgctgatgccaaaagcaagtatttgcaaaactgtaaaggaaggagaagaaaacatcagcctcttgggaagctaccaaaggagagagaacctggactcagtttgttctgctctcttttagggaaggaggagtgagctcctagctagtgagaggcctctgtacgttgggactgtgcattcactaactccactgtccttacatttgccatttatttgaaaaagatgacctgtgtgtacgaggacctgggtttgaatcttgacttgttatatatgggttgtgagaccctggataaaccactgaactttttcgggcttcagattcctcatctgtgaaacagagaccataatgccaaccttattctaattttgtggaaaaagaaaagcataataacaaatgcaaaatcctagcagagttaataggacagaaaaggtactcaattggctattgtttttaattaatggaaaaatgatattaaacaatagctttctagaaaatgtatatgtttgtggtatattaacataaaaacatgttaaaaaacaagtaataaaactgtatatgcgttcttcaatatcttgaagaatggaccccaaaatattatttctgggtcataaaatgctaggcaatttttattattttctttatggttatctatattttctattttttaaaataatgaacatgtattgcttacataataaaaaagtaaggacaactgagactgtagaagactattaatggcccagaataaagttcaagatatattgttgtaaacaaaaactttgatacatataacaccagagcacatgtgaagaaaaaagtttctagtggtctctgtggaaaaatggtaggagtttttagtttccttttttttgaagccatattttctacatttttatattagttcattaagtcattaagtcccttaagagtccattaaggcaactctctactagtataccaccataaattttcatccaaactaggattctcatgcatgaaccaggatgtatgttaaccctagttgtgaatcatatgttggggtttatgctttgaatgcatggtcaacaatggatcaaggacaatttgttgttgcctgcctcaaaagatttagagccaatgagtgattccactctttatattaattctcaaagtcctgaaaagagaaaaagtactattgaattgtttaataaaaataaaatgtggctgggcacggtggctcatgcctgtaatcccagcactttggggga

SEQ ID NO: 714755 - DNA, 1507 bp, Homo sapiens
tgagtgagcagttcacctgctgtgtgcagccaccttggagaggcgtcctgcactcacccaagcaggggtggctgctcctgcgggcaccagaggaacacctgcttcttaagcacggaaaaccaatgacaaagccattattctctttttgtatttattcccctgactgctgcagccaaaatatacctgtggtttacctttcacaaaagatgtcttttctgcctttagttgcaagaatatttccaaagcagatgccaaactgtacgctgatgccaaaagcaagtatttgcaaaactgtaaaggaaggagaagaaaacatcagcctcttgggaagctaccaaaggagagagaacctggactcagtttgttctgctctcttttagggaaggaggagtgagctcctagctagtgagaggcctctgtacgttgggactgtgcattcactaactccactgtccttacatttgccatttatttgaaaaagatgacctgtgtgtaygaggacctgggtttgaatcttgacttgttatatatgggttgtgagaccctggataaaccactgaactttttcgggcttcagattcctcatctgtgaaacagagaccataatgccaaccttattctaattttgtggaaaaagaaaagcataataacaaatgcaaaatcctagcagagttaataggacagaaaaggtactcaattggctattgtttttaattaatggaaaaatgatattaaacaatagctttctagaaaatgtatatgtttgtggtatattaacataaaaacatgttaaaaaacaagtaataaaactgtatatgcgttcttcaatatcttgaagaatggaccccaaaatattatttctgggtcataaaatgctaggcaatttttattattttctttatggttatctatattttctattttttaaaataatgaacatgtattgcttacataataaaaaagtaaggacaactgagactgtagaagactattaatggcccagaataaagttcaagatatattgttgtaaacaaaaactttgatacatataacaccagagcacatgtgaagaaaaaagtttctagtggtctctgtggaaaaatggtaggagtttttagtttccttttttttgaagccatattttctacatttttatattagttcattaagtcattaagtcccttaagagtccattaaggcaactctctactagtataccaccataaattttcatccaaactaggattctcatgcatgaaccaggatgtatgttaaccctagttgtgaatcatatgttggggtttatgctttgaatgcatggtcaacaatggatcaaggacaatttgttgttgcctgcctcaaaagatttagagccaatgagtgattccactctttatattaattctcaaagtcctgaaaagagaaaaagtactattgaattgtttaataaaaataaaatgtggctgggcacggtggctcatgcctgtaatcccagcactttggggga

SEQ ID NO: 714756 - DNA, 1507 bp, Homo sapiens
tgagtgagcagttcacctgctgtgtgcagccaccttggagaggcgtcctgcactcacccaagcaggggtggctgctcctgcgggcaccagaggaacacctgcttcttaagcacggaaaaccaatgacaaagccattattctctttttgtatttattcccctgactgctgcagccaaaatatacctgtggtttacctttcacaaaagatgtcttttctgcctttagttgcaagaatatttccaaagcagatgccaaactgtacgctgatgccaaaagcaagtatttgcaaaactgtaaaggaaggagaagaaaacatcagcctcttgggaagctaccaaaggagagagaacctggactcagtttgttctgctctcttttagggaaggaggagtgagctcctagctagtgagaggcctctgtacgttgggactgtgcattcactaactccactgtccttacatttgccatttatttgaaaaagatgacctgtgtgtacgaggacctgggtttgaatcttgacttgttatatatgggttgtgagaccctggataaaccactgaactttttcgggcttcagattcctcatctgtgaaacagagaccataatgccaaccttattctaattttgtggaaaaagaaaagcataataacaaatgcaaaatcctagcagagttaataggacagaaaaggtactcaattggctattgtttttaattaatggaaaaatgatattaaacaatagctttctagaaaatgtatatgtttgtggtatattmacataaaaacatgttaaaaaacaagtaataaaactgtatatgcgttcttcaatatcttgaagaatggaccccaaaatattatttctgggtcataaaatgctaggcaatttttattattttctttatggttatctatattttctattttttaaaataatgaacatgtattgcttacataataaaaaagtaaggacaactgagactgtagaagactattaatggcccagaataaagttcaagatatattgttgtaaacaaaaactttgatacatataacaccagagcacatgtgaagaaaaaagtttctagtggtctctgtggaaaaatggtaggagtttttagtttccttttttttgaagccatattttctacatttttatattagttcattaagtcattaagtcccttaagagtccattaaggcaactctctactagtataccaccataaattttcatccaaactaggattctcatgcatgaaccaggatgtatgttaaccctagttgtgaatcatatgttggggtttatgctttgaatgcatggtcaacaatggatcaaggacaatttgttgttgcctgcctcaaaagatttagagccaatgagtgattccactctttatattaattctcaaagtcctgaaaagagaaaaagtactattgaattgtttaataaaaataaaatgtggctgggcacggtggctcatgcctgtaatcccagcactttggggga

SEQ ID NO: 714757 - DNA, 1507 bp, Homo sapiens
tgagtgagcagttcacctgctgtgtgcagccaccttggagaggcgtcctgcactcacccaagcaggggtggctgctcctgcgggcaccagaggaacacctgcttcttaagcacggaaaaccaatgacaaagccattattctctttttgtatttattcccctgactgctgcagccaaaatatacctgtggtttacctttcacaaaagatgtcttttctgcctttagttgcaagaatatttccaaagcagatgccaaactgtacgctgatgccaaaagcaagtatttgcaaaactgtaaaggaaggagaagaaaacatcagcctcttgggaagctaccaaaggagagagaacctggactcagtttgttctgctctcttttagggaaggaggagtgagctcctagctagtgagaggcctctgtacgttgggactgtgcattcactaactccactgtccttacatttgccatttatttgaaaaagatgacctgtgtgtacgaggacctgggtttgaatcttgacttgttatatatgggttgtgagaccctggataaaccactgaactttttcgggcttcagattcctcatctgtgaaacagagaccataatgccaaccttattctaattttgtggaaaaagaaaagcataataacaaatgcaaaatcctagcagagttaataggacagaaaaggtactcaattggctattgtttttaattaatggaaaaatgatattaaacaatagctttctagaaaatgtatatgtttgtggtatattaacataaaaacatgttaaaaaacaagtaataaaactgtatatgcrttcttcaatatcttgaagaatggaccccaaaatattatttctgggtcataaaatgctaggcaatttttattattttctttatggttatctatattttctattttttaaaataatgaacatgtattgcttacataataaaaaagtaaggacaactgagactgtagaagactattaatggcccagaataaagttcaagatatattgttgtaaacaaaaactttgatacatataacaccagagcacatgtgaagaaaaaagtttctagtggtctctgtggaaaaatggtaggagtttttagtttccttttttttgaagccatattttctacatttttatattagttcattaagtcattaagtcccttaagagtccattaaggcaactctctactagtataccaccataaattttcatccaaactaggattctcatgcatgaaccaggatgtatgttaaccctagttgtgaatcatatgttggggtttatgctttgaatgcatggtcaacaatggatcaaggacaatttgttgttgcctgcctcaaaagatttagagccaatgagtgattccactctttatattaattctcaaagtcctgaaaagagaaaaagtactattgaattgtttaataaaaataaaatgtggctgggcacggtggctcatgcctgtaatcccagcactttggggga

SEQ ID NO: 714758 - DNA, 597 bp, Homo sapiens
cagagactgtattaggattcagggggttacccaagcaggtttccctcagggaattcaggtttacagcaagcaggtgcaagttccatgagtcacgctgtgactgacagtaggttgctgcagcatgtctacacagtccatgcagggtgtagggtcagtggggcaggtcacgtaggttgcatccagctgtcccatagggaggtggtcactgggagacagttgtataaagcagatatctgcatcaaccacattgagacactgggaggaggcagagaactggaaactgtcaagggtgactaagtcttgcttctggtatgagaaagtccaacttatattcaaaatggaagccaaggcaacataaaattatagtatttcactacaagcccacactccatccctggtctgctgttttgttgcccagcatgaggtatctttaatggagaacaaactctttcttcctgtaatatggcatgattaacagtctctgttccttcctgtgtccctagtgtttcttgtaacattggattgatcattaagtgttccscctgggagttcagcagcaggattttctgcaaaaccggatgatgagaagagactaca

SEQ ID NO: 714759 - DNA, 770 bp, Homo sapiens
gttttatgggggatgctgtatactcagtagtccttcacttcagtaggcacataatgtgacccttaattaagttgccaaatcccagcacttggctccggtggtgacagccggatgctcctgttgccttgcgtcatcagcaggtaatctggggaggttcactggtaccttgtgaatattctgtttcctgtcagcctttcacctaatggtcttagcatccctaaatcattatttcatcagggatgtcaaagatgatttccatattctgtgattcttttcacatgtattagcgggcattctgtaaagaaacttcttatcatcaataagagaacatcatagattcttctaaaaaagcagggtcaatgtttcattctgtcctttatccatttgaaaggaagatagtcacctatagttgtggaaatcagtgttttcctttcactcctctgcttctttccctccatcyttcctttgtgaatcactgtgtgccaactgactattcattgtgttgtagtcacagtcatggggttttctgctgctcacttgatttcagatatggccagtggaaactcctgctggctggttcctgtgtccttttcatatgtgtgtattaatgtttaagagccaaaatccaggctgggtgcagtggctcacatctgtaatcccagcacttcgggaggctgaagtgggtgaatctcttgagcctaggagttcaagaccaatttggcaactgtggtgaaaccccatctctacaagaaataccaaaaaataaaaaa

SEQ ID NO: 714760 - DNA, 3387 bp, Homo sapiens
ttagagctgatagtacactggtaggattggtgtagtcatgccatttgttaagatattaaaatgcttctatactgattggtaaatagtttccaccataagacccttgagtggctactcactcattctattgctgccacctggctattgagattaggagaattttaatgcttctaaaaccttttaatcactgaagcatgcacatactgaaaattaattttggcatgctgtgactattcattctactacataggctattttaaaaagcatttatgagttctttttttatttaattcatctcctctacctttataacctttaaaaaataatcctcagattaaagcatctatttccccattaaaaattgaatcttgctcttacatagcatttcctctggtatgaagaggcatgtaaataaaaagtaatctaacattgtatcagaaaaggagatttatgtctagtggtggaaatagtccataaatcgtgtaaaagagaaggcaaggaaagaggggcattggggaggtgtgggttgtgggcactatagggattattgtaatctcagtgggttattttaatatagcaggtgtcaaaagaccaatgtagtggaagcaggaactcaaattctgttccagatttctaatgggaaagggtgattttctttgcttggctttaattaagttgtgccatatattttccttcaaaataacatttcctggaacatcttactaaatattcatagacacatttaatacttatttgcattatgtttatcaatattgcagtcttcttttgaatacatgtgtatttctacagtctaacattgtggcttccccaaatatgcagctttattttagacaatttttaaaacaatttgtatgtgaatatatgtttgtatatgtgtataataggcaaacagaagtgcaaataatactcattcagaattttactttttctatgacaataaacagcttttcaggttttatagaaggatttacatatataataattaaatatggtataaaattaaaatggaatctgataccaaaattttagaaataggctattcacttactattacttttgttgtaaatatgcaatacaatttaaaatgttaataaaactcacttattgtgataatttagatttttttgttagtgcatatatgagacaaccactcccatgatcattctgtgggttaaaaaccaagcatttaggatctggcagcatgtacttgattctgagctctaccttccaagttgcacaaggattttaacttttctgagcctcatttcttttatctgttgagttaggaaatataatatctaccttctggggttttcatgaggattgattgacatgatgcatgtaaagtgcttcaaatggcccctgcaacataaatgctagctattattttcctcactgtaataaatcaaaatatttttttcttgtaatgctaattactacaaagcattccaaagaatgtggtctggtttcatttagtccctagtaaaattacttacccaaggcaaagaaaataacattttgttttagtcaacgtttataatgcgtgactttattttagagctatgaattcattgttcccccattgcacatgctttattttgattcaagtaggaaacatgtgcaatcgtgtcccatgacttgtttatttagcaagataatttatcaatatttttgaggagcggtcattgacttcaatctctttgaaatactgactgaactaggatctcctgctgagtatatgtggaaataactgttgataaaatggcatttaaaatgaggaataaaaggataaaaaaattatacaacttgtgtagtcagtagggtggagtggatgtggctaaagattcataatagtgcttctctctaagccaacagtcttcttgaggctccagaaatattctacatttttgtttttgtcatcactgcttctaccagccttgtcctttttctttagtcacttactaagctattgtacaactgagagggaaaacagaatattgatcttatttatttggatgatgattattgaaagggaaggaacacagatcaagactattaataagagagagaagactgaagaggaataagaatctttgccatttctaagaaatgtgttgcaggaaaccagaagaggttaatgcccacccacccaccagggagcagggacaagaattctcttacatctcagcatacccaagacctcctccaagatttttcctgtgctcattaggaatagaaggacctagtactattcaagtaggaaagatcagatattgtgataaacagcaaaagagggtatctagattttgtagtcgtaaatcaacctttttcaaagagattatttgaaaggattatcaacagcctgtatttgaaagagctcaccatatttttccagctaaatatatgtgatctcttgacatgtcatggattttacctggaaactaaagtattacggatcctattatgttatgattcttaacttttagaatgagtgatataaattcccactaattatgaasgtactgatttttatcacaatttgaagtatgaaaatataaatgctttgacttgttgaaagttttaaaattacaaaaatatagatcaagattctttttcaccgtatttgaaacaaaaaactaataatttctcaaattgttgactattggaaatattttgaaaatattatccacattatcaattaagaagtgtcctacatttccaacaagatataatccttattggctttccagacatccttagagaaacagtgtactagattcagtgtttaaaatgtgtttccaataatagaattcctactatatacttttacaagcatattaaatttgaaagtgttttatattttcagagtggttcatacatgtaattttgttccattctgaaactggaaaagtgttaagtgagtaaaataagttttattatccctaaggaaaaaatactataaaaacaaaaagagaagagattataaggcttacttgtggttttccaattcattagtaacaaaaaaaaatgtgatttttcccttttcctctctgttgtttttttctttagaacttgaattttccttttttttttttttaattctagaccctttgcaaccaatgacatgcatgtgtgaggtaggatgctggaatattattcagccataatacagaatgaaattctgccaattgtgacaacattgatgaatttggaggatattatgctaaaggaaataagccagacacagaaggacaaatactgtataatctcacttacatgtggaatctaaaaagtcaaacttatagaaacaaagagtagaacagtggttaccatggtgatatggtttggctctgtgcccccacccaa

SEQ ID NO: 714761 - DNA, 632 bp, Homo sapiens
cgtaaattttatagcagtggatgtcagacttcaatgtgtacaaaaatttgctgggggttccttgtaaatgtgcagatccctgggtctcatcctgaagtttttgacttcatagttggttgttgacattattgtggttactgttgttctgtgtgtgttggggaggggtggtgtgtgtgcatcatggatctgtttgtttaagcagcactcaaattgattataatatagatagtagaagggccacacatcattattaaccccagctgtaggtgccctgggaagatactgcatggcagctgtgagtatgatccaaatccctcagctctctagttagactggtgatgtaaccctctaaacttatgtaggaaataggaaggattaaactgaataagctgaatgggatagcaggcagtgtattgtatataacagatactccatagatsagcagtccccaacccattctggcaccagggactggtttcatggatgacatttttcacagacatggggagcagggtgggatggtttaggatgatcgagcatatacatgtaatgtgcaattaattcctattattattatattgtaatatataatgaaataatatacaactcaccataatgtataatcagtggaa

SEQ ID NO: 714762 - DNA, 1174 bp, Homo sapiens
  misc_feature 3, 4, 5, 6, 7, 8, 9, 10, 11, 12, 13, 14, 15, 16, 17, 18,19, 20, 21, 22, 23, 24, 25, 26, 27, 28, 29, 30, 31, 32,33, 34, 35, 36, 37, 38, 39, 40, 41, 42, 43, 44, 45, 46,47, 48, 49, 50, 51, 52, 53, 54, 55, 56, 57, 58, 59, 60,61, 62: n = A,T,C or G
  misc_feature 63, 64, 65, 66, 67, 68, 69, 70, 71, 72, 73, 74, 75, 76, 77,78, 79, 80, 81, 82, 83, 84, 85, 86, 87, 88, 89, 90, 91,92, 93, 94, 95, 96, 97, 98, 99, 100, 101, 102: n = A,T,C or G
tannnnnnnnnnnnnnnnnnnnnnnnnnnnnnnnnnnnnnnnnnnnnnnnnnnnnnnnnnnnnnnnnnnnnnnnnnnnnnnnnnnnnnnnnnnnnnnnnnnntttctgtttgtcccctgatgcatctgagttttgttgttgttgttgtttttaagacagagtcttgctctgtctcccaggctggagtgcagtggcrccatctcagctccctgcaagctccgcctcctgggttcatgtcattctcctgcctcagcctcctgggtagctgggactacaggtgcccgccaccacgcctggctaatttttgtgtttttagtagagatgggggatgcatctgattttgagacccctgctactgagcatctgtatcagtgagggtttgatcagggaagtggaccctcttgacatgggataagggatttattctagggattaaactgtaagaactggtgaagaaaaaagcaatttatccaatgaagacaaattcctaggtggcaatatgtaggccattttatttttatgcatttttttcaatattacttattaagaaaaatatatatgacttactgaagctttttggttatttgaagaaatgaaggttcagttttcctgttaatttgttaacctttttttttgtttatttcctatttatttttacccatttgcaagaaatttgtaacattttgatatatatctgttacagattaaatacctgacagtaatctccacaatatatttattaattgccctttgcttatcatatggtttggctctgtgtccccacccaaatcttagcttatatctcccataattcccatgtgttgtgggagggacccagtgggagataactgaatcatgggggcaggtctttcctgtgctgttctcatgatagtaaataagtcttataagacctgatgggtttataagaaggagtttctccgcacaagctctctctttgactgctgccatccatgtaagacgtgatttgctcccccttgccttctgccatgtttgtgaggcctccctagccatgtggaactgttaagtccattaaacctctttttcttcccagtctggggtatgtctttgtcagcagcatgaaaatggactaatacagtttatatctctgttattaacgttaatgatttccttaattgggaatttatttcttaat

SEQ ID NO: 714763 - DNA, 1174 bp, Homo sapiens
  misc_feature 3, 4, 5, 6, 7, 8, 9, 10, 11, 12, 13, 14, 15, 16, 17, 18,19, 20, 21, 22, 23, 24, 25, 26, 27, 28, 29, 30, 31, 32,33, 34, 35, 36, 37, 38, 39, 40, 41, 42, 43, 44, 45, 46,47, 48, 49, 50, 51, 52, 53, 54, 55, 56, 57, 58, 59, 60,61, 62: n = A,T,C or G
  misc_feature 63, 64, 65, 66, 67, 68, 69, 70, 71, 72, 73, 74, 75, 76, 77,78, 79, 80, 81, 82, 83, 84, 85, 86, 87, 88, 89, 90, 91,92, 93, 94, 95, 96, 97, 98, 99, 100, 101, 102: n = A,T,C or G
tannnnnnnnnnnnnnnnnnnnnnnnnnnnnnnnnnnnnnnnnnnnnnnnnnnnnnnnnnnnnnnnnnnnnnnnnnnnnnnnnnnnnnnnnnnnnnnnnnnntttctgtttgtcccctgatgcatctgagttttgttgttgttgttgtttttaagacagagtcttgctctgtctcccaggctggagtgcagtggcacsatctcagctccctgcaagctccgcctcctgggttcatgtcattctcctgcctcagcctcctgggtagctgggactacaggtgcccgccaccacgcctggctaatttttgtgtttttagtagagatgggggatgcatctgattttgagacccctgctactgagcatctgtatcagtgagggtttgatcagggaagtggaccctcttgacatgggataagggatttattctagggattaaactgtaagaactggtgaagaaaaaagcaatttatccaatgaagacaaattcctaggtggcaatatgtaggccattttatttttatgcatttttttcaatattacttattaagaaaaatatatatgacttactgaagctttttggttatttgaagaaatgaaggttcagttttcctgttaatttgttaacctttttttttgtttatttcctatttatttttacccatttgcaagaaatttgtaacattttgatatatatctgttacagattaaatacctgacagtaatctccacaatatatttattaattgccctttgcttatcatatggtttggctctgtgtccccacccaaatcttagcttatatctcccataattcccatgtgttgtgggagggacccagtgggagataactgaatcatgggggcaggtctttcctgtgctgttctcatgatagtaaataagtcttataagacctgatgggtttataagaaggagtttctccgcacaagctctctctttgactgctgccatccatgtaagacgtgatttgctcccccttgccttctgccatgtttgtgaggcctccctagccatgtggaactgttaagtccattaaacctctttttcttcccagtctggggtatgtctttgtcagcagcatgaaaatggactaatacagtttatatctctgttattaacgttaatgatttccttaattgggaatttatttcttaat

SEQ ID NO: 714764 - DNA, 1174 bp, Homo sapiens
  misc_feature 3, 4, 5, 6, 7, 8, 9, 10, 11, 12, 13, 14, 15, 16, 17, 18,19, 20, 21, 22, 23, 24, 25, 26, 27, 28, 29, 30, 31, 32,33, 34, 35, 36, 37, 38, 39, 40, 41, 42, 43, 44, 45, 46,47, 48, 49, 50, 51, 52, 53, 54, 55, 56, 57, 58, 59, 60,61, 62: n = A,T,C or G
  misc_feature 63, 64, 65, 66, 67, 68, 69, 70, 71, 72, 73, 74, 75, 76, 77,78, 79, 80, 81, 82, 83, 84, 85, 86, 87, 88, 89, 90, 91,92, 93, 94, 95, 96, 97, 98, 99, 100, 101, 102: n = A,T,C or G
tannnnnnnnnnnnnnnnnnnnnnnnnnnnnnnnnnnnnnnnnnnnnnnnnnnnnnnnnnnnnnnnnnnnnnnnnnnnnnnnnnnnnnnnnnnnnnnnnnnntttctgtttgtcccctgatgcatctgagttttgttgttgttgttgtttttaagacagagtcttgctctgtctcccaggctggagtgcagtggcaccatctcagctccctgcaagctccgcctcctgggttcatgtcattctcctgcctcagcctcctgggtagctgggactacaggtgccygccaccacgcctggctaatttttgtgtttttagtagagatgggggatgcatctgattttgagacccctgctactgagcatctgtatcagtgagggtttgatcagggaagtggaccctcttgacatgggataagggatttattctagggattaaactgtaagaactggtgaagaaaaaagcaatttatccaatgaagacaaattcctaggtggcaatatgtaggccattttatttttatgcatttttttcaatattacttattaagaaaaatatatatgacttactgaagctttttggttatttgaagaaatgaaggttcagttttcctgttaatttgttaacctttttttttgtttatttcctatttatttttacccatttgcaagaaatttgtaacattttgatatatatctgttacagattaaatacctgacagtaatctccacaatatatttattaattgccctttgcttatcatatggtttggctctgtgtccccacccaaatcttagcttatatctcccataattcccatgtgttgtgggagggacccagtgggagataactgaatcatgggggcaggtctttcctgtgctgttctcatgatagtaaataagtcttataagacctgatgggtttataagaaggagtttctccgcacaagctctctctttgactgctgccatccatgtaagacgtgatttgctcccccttgccttctgccatgtttgtgaggcctccctagccatgtggaactgttaagtccattaaacctctttttcttcccagtctggggtatgtctttgtcagcagcatgaaaatggactaatacagtttatatctctgttattaacgttaatgatttccttaattgggaatttatttcttaat

SEQ ID NO: 714765 - DNA, 1174 bp, Homo sapiens
  misc_feature 3, 4, 5, 6, 7, 8, 9, 10, 11, 12, 13, 14, 15, 16, 17, 18,19, 20, 21, 22, 23, 24, 25, 26, 27, 28, 29, 30, 31, 32,33, 34, 35, 36, 37, 38, 39, 40, 41, 42, 43, 44, 45, 46,47, 48, 49, 50, 51, 52, 53, 54, 55, 56, 57, 58, 59, 60,61, 62: n = A,T,C or G
  misc_feature 63, 64, 65, 66, 67, 68, 69, 70, 71, 72, 73, 74, 75, 76, 77,78, 79, 80, 81, 82, 83, 84, 85, 86, 87, 88, 89, 90, 91,92, 93, 94, 95, 96, 97, 98, 99, 100, 101, 102: n = A,T,C or G
tannnnnnnnnnnnnnnnnnnnnnnnnnnnnnnnnnnnnnnnnnnnnnnnnnnnnnnnnnnnnnnnnnnnnnnnnnnnnnnnnnnnnnnnnnnnnnnnnnnntttctgtttgtcccctgatgcatctgagttttgttgttgttgttgtttttaagacagagtcttgctctgtctcccaggctggagtgcagtggcaccatctcagctccctgcaagctccgcctcctgggttcatgtcattctcctgcctcagcctcctgggtagctgggactacaggtgcccgccaccacgcctggctaatttttgtgtttttagtagagatgggggatgcatctgattttgagacccctgctactgagcatctgtatcagtgagggtttgatcagggaagtggaccctcttgacatgggataagggatttattctagggattaaactgtaagaactggtgaagaaaaaagcaatttatccaaygaagacaaattcctaggtggcaatatgtaggccattttatttttatgcatttttttcaatattacttattaagaaaaatatatatgacttactgaagctttttggttatttgaagaaatgaaggttcagttttcctgttaatttgttaacctttttttttgtttatttcctatttatttttacccatttgcaagaaatttgtaacattttgatatatatctgttacagattaaatacctgacagtaatctccacaatatatttattaattgccctttgcttatcatatggtttggctctgtgtccccacccaaatcttagcttatatctcccataattcccatgtgttgtgggagggacccagtgggagataactgaatcatgggggcaggtctttcctgtgctgttctcatgatagtaaataagtcttataagacctgatgggtttataagaaggagtttctccgcacaagctctctctttgactgctgccatccatgtaagacgtgatttgctcccccttgccttctgccatgtttgtgaggcctccctagccatgtggaactgttaagtccattaaacctctttttcttcccagtctggggtatgtctttgtcagcagcatgaaaatggactaatacagtttatatctctgttattaacgttaatgatttccttaattgggaatttatttcttaat

SEQ ID NO: 714766 - DNA, 1383 bp, Homo sapiens
ggaacgtataaatgtaaaataaggaattataattggaggcaaagcattttctgtggattctcctaacattgaaagcttgtccttgtcagctgttaatataacagctgtgaagcatgacagctgccaaggatagtatattttaggaaaaactctcttcctggttaataaccagaatttctataattcttgaggatgtgatttttttaaacattagaggatggatttcccaagtgtagatgacattccctaacccagacttgagtttttaatttggcattctggttcttagctaagggaatctacaatattttatgaagatttggcacttttctaagactgaaacaagataagttcataaatayattaagactttataaatgtggactattggacatgaggaaagagaggtttatctaaatcattaaaaaaaaaccctgaactatcaatcgctttttgaaagcagtatacaggcgtgagaagtagggaagggttcattttcaacccttaaatatgtcatatatatgttgcataacatttcggtcactgacgggctgcatatatgatggtgatcccctaaaattataatactgtacttttactgtaccttttctatgtttagatatgttagatacacaagtacttaccttatgttagagttgcctacagtattcagtacagtaacacactgtacaggtttgtagcctagcagcaataggctataccttctaggtttatgtaagtacactgtgacatttgtgcaacaaagaaattgcctaacaacacatttctcagatctttatttgttcgattatttctttaagagactggatcttactgtattgcccagactgttcttgaactcctgggctcaagctgtcctcccgccttggcctcccaaagtgctgggattacaggtgtgagccaccacatccaacctctcagatcttatctgtgtcattaagcaatgcatgactgtaattaatttcagatatattgcaaaacagaccattagcaatgccttttgaaggaaattattggacttcctttagtgaatgggtatggaatacttaagattagcagtatttattggcatattgacaatattttctgagtgttaaaatatgttttctgcttcttttgttctaaccattagagaattgctagtaactgattcttgtgtttaggcatttcttcattttgtgatcactaatacaggttttcctgacactctgattcctaccctttctcttgtttgttatttttccattttcctctgcaaagaggtacactttcttttctgatgctctttactttttattcctttctgttttcagttgtgggaccaaagacgattccctatcatgctcaccattgctagttaga

SEQ ID NO: 714767 - DNA, 621 bp, Homo sapiens
gtgagactctatttctacaaaacttttaaaaattagccaagcatggtgatgcaagcctgtggttccagctactggggaggctgaggtgagacaatcacctgagcccaggagtttgaggctgcagtgagccatgaacacaccactgcactccagcctgggcagcagagtgagacccagactcttaaaaaaaaagaaagaaatgyctatgcaaatttcttcttcttctaccacattttgggtgtgctgtgtatttgcacatacacctgcatttgtattgttggattcttccctttcatcagtcaatgaatgtgaagtgctgattgctgtggtttgaatgtccctttttccaacctctcctgagactgagcatcttgtcaagtgcttgcttccagctgtgattctgtgcccccatctctccccctttcccatgaggttattggtccttttcttactgttttgtatcattcttatgtcttctgatactaattactatgatttgaatgtttgtcccctccaaaactcatgctgaaacttaatccctagtgtaacagtattaagaggtaaggccttttagaggtgatcgagtcatgagagctctgccctcatgaatgggttaatgga

SEQ ID NO: 714768 - DNA, 1361 bp, Homo sapiens
tttagacggtgaattttaggttatgtatgttttaccccaatttttaaaaagctagtgaaaagctggtaaaaagaaagaaaagaggcttttttaaaaagttaaatatataaaaagagcatcatcagtccaaagtccagcagttgtccctcctggaatccgttggcttccctccggcatttttggctcttgccttttagggttgccagattaaaagacaggatgcccagctagtttgaattttagataaacaacgaataatttcgtagcataaatatttcccaagcttagtttgggacatacttatgctaaaaaacattattggttgtttatctgagattcaaaattaagcattttatattttatttgctgcctctggccaccctactctcttcctaacactctctccctctcccagttttgtccgccttccctgcctcctcttctgggggagttagattgagttgtaacaagaacatgccactgtctcactggctgcagcgtgtggtccccttaccagaggtaaggaagagatggatctccactcatgttgtagacagaatgtttatgtcctctccaaattcttatgttgaaaccctaacccctaatgtgatggtatgtggagatgggcctttggtaggtaattacggttagatgaggtcatggggtggggccctcattatagatctggtaagaaaagagagcattgtctctctgtctccctctctctctctctctctctctctctctctctatctctatctcatttctctctctctctctatctcatttctctctctctctttctctcctctgtcttttcccaccaagtgaggatgcraagagaaggtggctgtctgcaaaccaggaagagagccctcaccaggaacccgtccagctgccaccttgaacttggacttccaagcctccagaactgtgagggataaatgtatgattttaaagtcgcccagtgtgtggtattttgttttgactaatacaacctgaaaacattttcccctcactccacctgagcaatatctgagtggcttaaggtactcaggacacaacaaaggagaaatgtcccatgcacaaggtgcacccatgcctgggtaaagcagcctggcacagagggaagcacacaggctcagggctctgctattcattctttgtgtgaccctgggcaagccatgaatggagcttcagtcaccccatttgtaatgggatttaattgtgcttgccctgcctccttttgagggctgtagagaaaagatgtcaaagtattttgtaatctggctgggcgtggtggctcatgcctgtaatcccagcactttggtaggctgacgcgagaggactgcttgagccca

SEQ ID NO: 714769 - DNA, 1361 bp, Homo sapiens
tttagacggtgaattttaggttatgtatgttttaccccaatttttaaaaagctagtgaaaagctggtaaaaagaaagaaaagaggcttttttaaaaagttaaatatataaaaagagcatcatcagtccaaagtccagcagttgtccctcctggaatccgttggcttccctccggcatttttggctcttgccttttagggttgccagattaaaagacaggatgcccagctagtttgaattttagataaacaacgaataatttcgtagcataaatatttcccaagcttagtttgggacatacttatgctaaaaaacattattggttgtttatctgagattcaaaattaagcattttatattttatttgctgcctctggccaccctactctcttcctaacactctctccctctcccagttttgtccgccttccctgcctcctcttctgggggagttagattgagttgtaacaagaacatgccactgtctcactggctgcagcgtgtggtccccttaccagaggtaaggaagagatggatctccactcatgttgtagacagaatgtttatgtcctctccaaattcttatgttgaaaccctaacccctaatgtgatggtatgtggagatgggcctttggtaggtaattacggttagatgaggtcatggggtggggccctcattatagatctggtaagaaaagagagcattgtctctctgtctccctctctctctctctctctctctctctctctctatctctatctcatttctctctctctctctatctcatttctctctctctctttctctcctctgtcttttcccaccaagtgaggatgcgaagagaaggtggctgtctgcaaaccaggaagagagccctcaccaggaacccgtccagctgccaccttgaacttggacttccaagcctccagaactgtgagggataaatgtatgattttaaagtcgcccagtgtgtggtattttgttttgactaatacaacctgaaaacattttcccctcactccacctgagcaatatctgagtggcttaaggtactcaggacacaacaaaggagaaatgtcccatgcacaaggtgcacccatgcctgggtaaagcagcctggcacagagggaagcacacaggctcagggctctgctattcattctttgtgtgaccctgggcaagccatgaatggagcttcagtcaccccatttgtaatgggatttaattgtgcttgccctgcytccttttgagggctgtagagaaaagatgtcaaagtattttgtaatctggctgggcgtggtggctcatgcctgtaatcccagcactttggtaggctgacgcgagaggactgcttgagccca

SEQ ID NO: 714770 - DNA, 1361 bp, Homo sapiens
tttagacggtgaattttaggttatgtatgttttaccccaatttttaaaaagctagtgaaaagctggtaaaaagaaagaaaagaggcttttttaaaaagttaaatatataaaaagagcatcatcagtccaaagtccagcagttgtccctcctggaatccgttggcttccctccggcatttttggctcttgccttttagggttgccagattaaaagacaggatgcccagctagtttgaattttagataaacaacgaataatttcgtagcataaatatttcccaagcttagtttgggacatacttatgctaaaaaacattattggttgtttatctgagattcaaaattaagcattttatattttatttgctgcctctggccaccctactctcttcctaacactctctccctctcccagttttgtccgccttccctgcctcctcttctgggggagttagattgagttgtaacaagaacatgccactgtctcactggctgcagcgtgtggtccccttaccagaggtaaggaagagatggatctccactcatgttgtagacagaatgtttatgtcctctccaaattcttatgttgaaaccctaacccctaatgtgatggtatgtggagatgggcctttggtaggtaattacggttagatgaggtcatggggtggggccctcattatagatctggtaagaaaagagagcattgtctctctgtctccctctctctctctctctctctctctctctctctatctctatctcatttctctctctctctctatctcatttctctctctctctttctctcctctgtcttttcccaccaagtgaggatgcgaagagaaggtggctgtctgcaaaccaggaagagagccctcaccaggaacccgtccagctgccaccttgaacttggacttccaagcctccagaactgtgagggataaatgtatgattttaaagtcgcccagtgtgtggtattttgttttgactaatacaacctgaaaacattttcccctcactccacctgagcaatatctgagtggcttaaggtactcaggacacaacaaaggagaaatgtcccatgcacaaggtgcacccatgcctgggtaaagcagcctggcacagagggaagcacacaggctcagggctctgctattcattctttgtgtgaccctgggcaagccatgaatggagcttcagtcaccccatttgtaatgggatttaattgtgcttgccctgcctccttttgagggctgtagagaaaagatgtcaaagtattttgtaatctggctgggcgtggtggctcrtgcctgtaatcccagcactttggtaggctgacgcgagaggactgcttgagccca

SEQ ID NO: 714771 - DNA, 613 bp, Homo sapiens
aaaatgaggtgactcaggcaaaagtacctggccctgtgtagtgagtacattgtatgtgttacatatattcttattgctgagaatccacgaaagaatgaattaaataatgaggaccccttcatcagggtttttgagtgagttttttaaaataaagrtagtagtttgtgtaaatactaaatccattggtacctgtgcagaatgtaggaaatggagttgctaattccaaaaaaacagcacatatgctgaggaaagtataatacctaatatatatggtttaagcaatgtaaaattccatgaatatgttccttttcatcttaaaatttgtgatttaaaaaacattgatattactataaagaattattgttatttcccttgatttacagagtattgttacaatcacatttgaagtaccaggaaatgcaaaggaagaacatcttaatatgtttattcaggtgaatgcaatttttaactgattaatgatttatcaatggttttgttacatagttgttgctattagcgatggttggtcttattaaaatatgtcacttgatacagaatctcctgtgggaaaagaatgtgagaaacaaggacaatcactgcatggaggtcataa

SEQ ID NO: 714772 - DNA, 613 bp, Homo sapiens
aaaatgaggtgactcaggcaaaagtacctggccctgtgtagtgagtacattgtatgtgttacatatattcttattgctgagaatccacgaaagaatgaattaaataatgaggaccccttcatcagggtttttgagtgagttttttaaaataaaggtagtagtttgtgtaaatactaaatccattggtacctgtgcagaatgtaggaaatggagttgctaattccaaaaaaacagcacatatgctgaggaaagtataatacctaatatatatggtttaagcaatgtaaaattccatgaatatgttccttttcatcttaaaatttgtgatttaaaaaacattgataktactataaagaattattgttatttcccttgatttacagagtattgttacaatcacatttgaagtaccaggaaatgcaaaggaagaacatcttaatatgtttattcaggtgaatgcaatttttaactgattaatgatttatcaatggttttgttacatagttgttgctattagcgatggttggtcttattaaaatatgtcacttgatacagaatctcctgtgggaaaagaatgtgagaaacaaggacaatcactgcatggaggtcataa

SEQ ID NO: 714773 - DNA, 613 bp, Homo sapiens
aaaatgaggtgactcaggcaaaagtacctggccctgtgtagtgagtacattgtatgtgttacatatattcttattgctgagaatccacgaaagaatgaattaaataatgaggaccccttcatcagggtttttgagtgagttttttaaaataaaggtagtagtttgtgtaaatactaaatccattggtacctgtgcagaatgtaggaaatggagttgctaattccaaaaaaacagcacatatgctgaggaaagtataatacctaatatatatggtttaagcaatgtaaaattccatgaatatgttccttttcatcttaaaatttgtgatttaaaaaacattgatattactataaagaattattrttatttcccttgatttacagagtattgttacaatcacatttgaagtaccaggaaatgcaaaggaagaacatcttaatatgtttattcaggtgaatgcaatttttaactgattaatgatttatcaatggttttgttacatagttgttgctattagcgatggttggtcttattaaaatatgtcacttgatacagaatctcctgtgggaaaagaatgtgagaaacaaggacaatcactgcatggaggtcataa

SEQ ID NO: 714774 - DNA, 608 bp, Homo sapiens
tccccctatctcaaggaatcacaaaaatggcaattttttaaagttacattcctaagacactgactaactctacccaacaagattatatctttaggttgcagaaacatccacgacattgtatacaaagaagggataggaggcataatagccaccatagaaaaggaaaatgcaatagtggggactagagttagtccaaaggcctttagataacactgaggtatagcccaagccagaaaattttagttgccctaggacccccttttaattccatgtgatggcttaggtcccctgtgaaaagtagctagattggaatagacaagaagtcctaaaaatgaaagtaaagggttaaagttaaaccacgttgtaagtgactgattagtaattcccgtctgtttcatttttagtcacgtagcgagtgtacaggaaatttattagctctcattttttattctgttagatcatgattagtgttaagcctgaaaacaagctggccacatcagtagttcgtaacccatgttaattytaatcagtcaatctggggctataatagtagttaaatgtttttaatactatccttggcagattcacatacagcataaatataaata

SEQ ID NO: 714775 - DNA, 902 bp, Homo sapiens
tcagctgatttatagggatttaataataaaaggaaatattgaaactaaatgttgaacaaaacaaaataaaaagaaaatgaaaaaattacataaagaaacattcaaaataaagacctaccagtttttactataacactggtaactatataattcatcagaatataagcagtaggcacatctaaattgggtagggctgattcataattacaaggtcattttcccttatttcataaagtaaacctcatttcttcttttggggcatagcttctttaccaagatacttttcttaatgaaatctactaattctaaaattcaacagcacaacacctatgttgttttccttctggaaccatcacacctttatatttatgggttcaaacttattgactattctgttcatctgcttcgcacccatgagagcaaagattaaatctctatatttaagttccttgatagcactgtatactctgtaagcacacaacaaacttttaagtgaatctaaaaactgatagtaagatggtcaatatcctataccatggtccaagaataactttactttaaaaaaaaaaaaaagtttaagaagaggtaatgagcattgcaaattactgaaaaaaaatatggagagatgtgcagcatgcagtttaaaaacaataggattaaatagcatataaaaattgtatgagtgcaaatggacamtcattttcatcttaataacacaaagagtccacaggtgatcattttaggcacccttatttgaaatgatcacaacactaaaacatctttacagtctcctctttcggactgcaaagtagagacccaaaggaaatttattttatcttgacagaaaaccagagtctattttatcttgccaaaatatgaggaaaatttcttttatcttgcca

SEQ ID NO: 714776 - DNA, 851 bp, Homo sapiens
ttgggaaggctcgtgtcatgtttaagtataacaagattaacaatgtactacctaataatttactttagaatcaaactttgctatctgactaaaagaaaactcaaacctttattatattgttgacagaagcggtcatgaaaccatggaatctgaaactcagggcattccaagcagactgatctatttaactccataagatgaaactggactcttgcacttcgagatggagataaaactgaaattaataaaatactaatgaattttgatagctgagacctaggaaagacaacccatttttttcacattcatttatccccactattagtagatgcttttattctaacagtatttagaactgtttacatttctaatttacaaatgtatgctttatatttttaaattattacattcagtgacatgattaggaccaactcctgcactgttctcattaatcatgaaygttaaaagtacatttaaaaaatactcccagcagggcacggtggctcatgcctgtaatcccaacactttgggaggctgaggtgggcggatcacctgaggtcgggagttcaagaccagcctgaccaacatggagaaaccccgtctatactaaaggtacaaaattagccaggcatggtggtgcatgcctgtaatcccagctactcaggaggccaaggcaggagaatcgcttgaatccagaaggtggggttttgggtaaccaagatcatgccattgcactccagcctgggcaacaagagcaaaactccgtctcaaaaaaaaaaaaaaaaaaaatactcccaagatttttcattcacctaatattccacacttaggattttatcctaagtaaacaa

SEQ ID NO: 714777 - DNA, 851 bp, Homo sapiens
ttgggaaggctcgtgtcatgtttaagtataacaagattaacaatgtactacctaataatttactttagaatcaaactttgctatctgactaaaagaaaactcaaacctttattatattgttgacagaagcggtcatgaaaccatggaatctgaaactcagggcattccaagcagactgatctatttaactccataagatgaaactggactcttgcacttcgagatggagataaaactgaaattaataaaatactaatgaattttgatagctgagacctaggaaagacaacccatttttttcacattcatttatccccactattagtagatgcttttattctaacagtatttagaactgtttacatttctaatttacaaatgtatgctttatatttttaaattattacattcagtgacatgattaggaccaactcctgcactgttctcattaatcatgaatgttaaaagtacatttaaaaaatactcccagcagggcacggtggctcatgcctgtaatcccaacactttgggaggctgaggtgggcggatcacctgaggtcgggagttcaagaccagcctgaccaacatggagaaaccccgtctatactaaaggtacaaaattagccaggcatggtggtgcatgcctgtaatcccagctactcaggaggccaaggcaggagaatcgcttgaatccagaaggtggggttttgggtaaccaagatcatgccattgcactccagcctgggcaacaagagcaaaactccgtctcaaaaaaaaaaaaaaaaaaaatactcccaagatttttcattcacctaatattccacacttaggattttatcctaagkaaacaa

SEQ ID NO: 714778 - DNA, 956 bp, Homo sapiens
ggcaacgcggtttcaccatgttggccaggctggtctcaaactctgacctcaagtgatccacctgcctcggcctcccaaagtgctgggattgcacgcgtgagcccccgcgcccggcccagaaccccttgataatgaaatgtgaagcctgaaccttagacaccagactgcagttaaatacggtttgtccgtaagactggaggctgcagttgaatacggtttgtccataagattggaggctgcacttgaatacggtttgtctgtaagattggaggctgcagttaaacatggtttgtccataagattggaggctgcacttgaatacggtttgtctgtaagattggaggctgcagttaaataaatacggcttgtcgtaagattggaggctgcagttaaataaatacggtttgtccrtaagattggaggctgcagttaaataaatacggtttgtccgtaagattggaggctgcagttaaataaatacggtttgtccgtaagattggaggctgcagttgaatacggtttgtccgtaagattggaggctgcagttgaatacggtttgtccgtaagattggaggctgcagttaaataaatacagtttgtccgtaagattggaggctgcagttaaataaatacggtttgtccgtaagattggaaggtggaacggtccttaaattaaagtgcatttggtaggaattgatggctgagttgttttaaaggacacacagccaggtgggtataagatctcaatttagagaactgaaaacccaggcacacagcagacacgaatggcatgtagggtttgtcgctgacaggatagttgtgggccgccaccatgtggggatatcagctcagctgggatgggcctgtcaccctcacgcaggatccctggaatcacacagcacggccttctgtgtccggcgtctccctcggggaggtgtgtttccgagtcctggcca

SEQ ID NO: 714779 - DNA, 925 bp, Homo sapiens
tcccgagatggagtctcgctctgtcrcccgggctggagtgcaatggtgccatctcggctaactgcaacctctgcctcccaggttcaagcgattctctgcctcagcctcctgagtagctgggattacaggtgcctgccaccatgcctggctaattttttgtatttttagtagaggggggtttcactatgttggccatgctggtctcgaactctagacctcaggaaatccacccacctcagcctcccaaagtgccgggattacaggcataagccaccatgcccggcttttactggcgaagctactttttctgtttttattggcaaagctatgtttcaaagttgaaattaaaatatgaccattgaaaatatgcacatcagttatggttccagcagagtgtggaagcagctgctggtttctataaaagcgtgtgcttttaggactttgaaaagcttttgccacgtagagaaggcgctcagctgcctctggagagaccgaggctgctgcagagaaagaaacagcttcctatgtggccctgcagctgggtcacccagagcctgaggagttcttcagacaggcaggcagctttggggccagcagttacatcatgggctagaacctaaggacaagctagaggtgcatgtggccgtgttcacaccttcaggcccgctgcgtttttggaggtcttgggtttagtgagcagatggtgccttccgcggcctcagtcacgagagcgcaaggcttgtcctccatgggggggcctctgctgcacctgctgagctgttttctctgtgcctcctgggtgaaaattgaaaaaccaaaagctttgagcagctcctggtaccaagaaaaggactgacttagtttgtttttgctgctgtaacaaaatacccccgacgacgtcacttataaataagagaaatgtatt

SEQ ID NO: 714780 - DNA, 619 bp, Homo sapiens
tttctatatttcactggaattaatttagtataaatctgaagctaattccgataaattaagatatgtatggtaagccctagagcaagcactaaagaaataacgcaaaaaatagtgaaaaaaaattaaagcaataaaaacgctttttagaaaatattcacttaatgcaaaagaaagcagtaaagaaggatcagaggaacaaaaaatgagatagcaatacctctttggtctgcagatattgcatatggacataaaacataggctgaatatcccttatccaaaatgcttgggaccagaagagttttaggtttcagattttttttttaaattttggatatttgcattatacttaccagttgagcatccctaatccagaaatctgaaacacaaattgttccaatgagcatttcccttaaacatcatgttggtactcaaaaagtttcagattttaaagcatttcagatttcagattttcagatctgagatgctcatcctgwactagcaaactgagtcctgcaaaatataaaaattatacaccatgaccaagtaggatttatcccaggaatgcaaggtttaacatctgaaaatcaattaatgtagtacgttttatcaatagaataag

SEQ ID NO: 714781 - DNA, 619 bp, Homo sapiens
tttctatatttcactggaattaatttagtataaatctgaagctaattccgataaattaagatatgtatggtaagccctagagcaagcactaaagaaataacgcaaaaaatagtgaaaaaaaattaaagcaataaaaacgctttttagaaaatattcacttaatgcaaaagaaagcagtaaagaaggatcagaggaacaaaaaatgagatagcaatacctctttggtctgcagatattgcatatggacataaaacataggctgaatatcccttatccaaaatgcttgggaccagaagagttttaggtttcagattttttttttaaattttggatatttgcattatacttaccagttgagcatccctaatccagaaatctgaaacacaaattgttccaatgagcatttcccttaaacatcatgttggtactcaaaaagtttcagattttaaagcatttcagatttcagattttcagatctgagatgctcatcctgtamtagcaaactgagtcctgcaaaatataaaaattatacaccatgaccaagtaggatttatcccaggaatgcaaggtttaacatctgaaaatcaattaatgtagtacgttttatcaatagaataag

SEQ ID NO: 714782 - DNA, 619 bp, Homo sapiens
tttctatatttcactggaattaatttagtataaatctgaagctaattccgataaattaagatatgtatggtaagccctagagcaagcactaaagaaataacgcaaaaaatagtgaaaaaaaattaaagcaataaaaacgctttttagaaaatattcacttaatgcaaaagaaagcagtaaagaaggatcagaggaacaaaaaatgagatagcaatacctctttggtctgcagatattgcatatggacataaaacataggctgaatatcccttatccaaaatgcttgggaccagaagagttttaggtttcagattttttttttaaattttggatatttgcattatacttaccagttgagcatccctaatccagaaatctgaaacacaaattgttccaatgagcatttcccttaaacatcatgttggtactcaaaaagtttcagattttaaagcatttcagatttcagattttcagatctgagatgctcatcctgtacwagcaaactgagtcctgcaaaatataaaaattatacaccatgaccaagtaggatttatcccaggaatgcaaggtttaacatctgaaaatcaattaatgtagtacgttttatcaatagaataag

SEQ ID NO: 714783 - DNA, 616 bp, Homo sapiens
ctggacaaagtgccagtgcaggcaggggacacagatttcaagccaagcacagccccaggcccaaaggaagcaggatgtagctccagctatatctgagagttgatctgttttcagaagccgagcagagccactgactttcagggtgctggcattaccctgaggcttgcctcaccagctcccgaaaattagtcagtagctacagcttgtaacctcaagattggaaatgtgaggggctgtttagggagcccactctggaagtccccacattcctggaggcctctccccactgtgcccacccattcctccccaaataagattatmcctggcttgaccctcctgcccctgctgcccaagctccattgaagtgcggtcttcaccaagagaacttggtatctgtgtttctctccaacctcgggggcagccccctctcccctcgctccccctccagcccatgatcctcatgggtaagggcagtcagaggctgctcaggtaggcgtggcctcaggagatagtggagaactccttgagcaggacttcttggctgagtgtgtggaaggccaggtttctccggacgttggtgctaatggatcgaacctgggaaagggtagttggggaa

SEQ ID NO: 714784 - DNA, 2531 bp, Homo sapiens
aaaaggaaattggctgacgtgattttggagattgacaagttccaagatctgcagtaagcaagctggagactcagaaaagccactgatagttttagtccaagtctgaaggttcaagatccaggagagccagtggtgtagttccagccaaaaggtcagcaggcttgagacccagaaacagccaatacttcatttggagtctgaaggcaagaaaaaaacaatgtaccagctcaaaagcagtccaacaagagaaatcccctcttgttcgtggagggtcagcctttttgttttattaaggcttcaatggattgcgtggagtccacccacaatagggaggccaatctgctttattcagtcaaatgctattctcattcgaaaacatcctcccagacacacacaaaataatgtttaaccaaatatctgagcaccctatggcccagtcaggttgacgcataaaattaaccatcacaccatcctcaaacagaattagtcattccatgtgggctcacgtaaaagggcttatatttaaggatagatatgaggcactggtctaagcactttaaagttattagcagcaatttcagtttggctatcattattcttctactttaaggctcttccagtctttttgacccttctgcatgctcctatgatggctacaagtctatgccacaccttactgtaagcacctccaacacagaaatgtagtgcctggcatgaaataaagcctcaactaagaattattttagggaatttttttgtttatcctcttttctgagcattgcttttgtagataggatgcatttggttcagctatcctgttagaatttacaaatgtgttctcctgaacataaagaacagacagaatgccccgaagacatgccagttctctgagtggcagaggagaatcatggtctggaaacctcagtctgtgcaagtggctgccagatcctgccactggaatggaaaatcattgtccttatttcatagatgtgacttctaaaatgatacaccccaaccttcttggtacctgcaaagatgtcttcattcatgggagactgtatatggtaatttggacctttgctttcctctctctaaaaccctcctccatgacccacaatagggcttgaattctaatcaacaatcacacattaatgactggaggtgtaatccatgaaccacckaagtctgaaaatctgagggattattaaaaatacggatacataggctcaaacccaaaaatgtcatatcaaaatgtctgaggaaggaaatcttcattttacaagctcccaagtgattcttacgtcctctaaggtctgagattcagagctttagaatttttaaaatgccttcatattattatatatattatcccttttaatcctcacgtcaatgcttatattagccttgctattattagcttcattttacagattaagaagatagagacattgtattaatttcctaattataacacacgtagtggcgttaaaacaataatcatattctcttacaagtctggaggccagacatctaagatcagtcattcagggctagaatgcaggtattagtaggactggttcctctggagactcagacgagaactactctttgcttctttcaactctagagactgacctggcttgtggctacatcactccaatctgcttccttcttcacatggcctccctcttataagcattcctgtgattacattgggcacacatacataatccatgatgattcccccatctcaagatcctgctgttatcacatcggcaaagtcccttttgccatataagataatatttacaggttctgggaataagaatgtgagtatctttggaaatcatctattcagcctaccataggcactaagtgacttgatgagatccatagttggtgaatggcagagcaagaatatgaactaagaacttttgttttcaaattgaaattaacatgttaaatcctattgttcattgacattattgagcagtgactggtttctcaaattgccttctgtcaactaattcaatcaggaacttgaattgattggatgcacgacaggataattcagagcataaagaaaggctatacctaggtggaatactacagtgagaacccttggctttcacagggcaccttgcagagcacatctggaaggatgaagagaacggagaactactgaaacctttggctaatctgaggcaggactcaaatgcaatgctgccagcctgtagaacttttgcaattactggagataagccctattcaaactcccagttggagcatttatggatacccagggctacacaagagggcttatattcttgctactcaaactgtgggcccagaacagtagcaccagcagcaccttgttagaatgcaggacctcaggccctgccccagaccagctgaatcagaatccccattttaacaagatccccaggtgatttgcatacacattaaatcttgcaacatctcggccttatcacagcctactgcctccatgtacatgggacagtggagctgct

SEQ ID NO: 714785 - DNA, 1112 bp, Homo sapiens
tgcagggctccaaggaagacacagagggcacctgcactgccccaccccacccccaggctttgaggcctatcagaagttggtgtcttagcttaggaaaacttgagagttagccgggcaaaaaagggagagacatggtcccaaacacaagaaataacacaagttgtgttctttcttttttcttttttttctggaaacagtcttgctgtgtcacccagactggagtgcagtgtcagctcactgcaacctccgcctcctgggttcaagcaattctcctgcctcagcgttccaaatagctgggattacaagggcgcaccaccacrcccggcttttttgtatttttagtagagatggggttttgccatgttggccaggctggtcttgaactcctgacctcaggtgatctgtctgcctcggcctcccaaagtgctgggattacaggcctgagccactgcgcccggctgagttgtgttcttgaccagttttcctgactccattcccaccgactcacttagagccaaagcctttattattattatggggacagggtctgccctgtcacccaagctggagtgcagtggtgcgatcacggctcactgcagcctcaacctcctgggctcaggtgatcctcccatcccagcctcctgagtagctgggactacaggcgcgcgccaccacgcggctaattttttttttctttttttgtagcgatggggtcttgccaccatcaggaggctggtcttaaactcttgggctcatgggatcctcccactttggcctcccaaagtgctaggattacaggcgtgagccaccgggcccgccagcctcctttaggaagaaaacctgatagtcactccactgttagaaacctctcagtggggtttttcgaaatgaaagtctaactccttgtctctttctgaccgtttccatgctgaacctcatctttctaatggcccactcctccaggggcctgcctgacgcccaggacggcccctcgtcaatcacacaggacgctaatgggcgcgggatgaatctgggcgcccaaaagaggacaagttgaaatggatttttaaggtactttaaacacatttaagagagaaaagaaggaattaaag

SEQ ID NO: 714786 - DNA, 583 bp, Homo sapiens
tgtcctggttcacgctggagtgtcttgggttcagacactgtggagtctgatggcagggatgatgaaaacttcatttagtaacttcaaaccctagaccactgtaaaagcaggcattacccctttgagagccaacaaaagaggatgccaagaaacaacagccatggtgccttcctccacctagggcaccrgttccacgtctcacctatctaactaggaacctccaggagctcagagtgagatggctgtcagaggcatattgttagaatgaaaatgaagtaagacttttgcctgagggaaagagtgatttcgcagactagtttgacaattaatgtatatggcagatagttttgataaactgaatgggctgaatctggagctccaagctttgggtgaaaataggaagaatgtaataagatttttaaaaatactacattggtatacatattagcatgtggaaattaataatactgctgtttctctcaactcttcctcagcatttccagcaaaagcctgcaaagctgctctgaagtgaggagtgacagatgtaactattcagggtagaaaagcatttgatgtccctgca

SEQ ID NO: 714787 - DNA, 2735 bp, Homo sapiens
aggaacaaaccttggatacacacagcaacttggatggatcccaatggcatgctgagtagaaataagccagcctcaaaaggtcctatgaactcatgaatatagcattctcgaaatgacaaaatcatagatgggaaacagattagtgtggttgccaagagtgaggaacggtggtggggccaggttgtgtgaccgtaaaaggtagcccaacggaccggctccatgtctccatgtcagtggtggtttcacaaatctgcgtggtaatcacacgccacaaagctcaatacatcttgctccaatgtcgaatccctggtcttgacagagaaatgtgtatctttattttgctgtaggtataattgtgtagaatgcagccacagcagggaactgggtgaacggtacatgggacctctctggactatatttgccacttcctgcgaatctgtaatgacttcagaataaaatgtttttaaaaagttaggctgggtgcggtggctcaccacacctgtaatctcagcactttgggaggccaaggcgggcagatcgcctgaggtcaggagttggagaccagcctggccaacatggcgaaaccctgtctctaccaaaaatgcaaaaaattagctgggcatgatggcgggagcctgtaatcgcagctacttgtgaggctgaggcaagagacttgcttgaacccgggaggcggaggttgccatgagctgagatagcgccactacactcctatactccagcctgggtgacagagtgggactccgtctcaaaaaaaaaaaaaaaaaaagttaattctagaacaaattaaaagacaccgtacaaacaacttatatccagcccaatggtgtgactgtcctctttctcctccaccccaacaaagaaggctctggagcctatatttttgagccctgtggggtcttcattactgcagcctgcccagaggtggggaaagaaccctgtgcctgaccctgaaactcaggcttctcttgcttcttggtactgcccagatctggctgccagttcctgtctgtggagggaggatgaagataatggggatcaaatgggttaatgggtgtcagttcattactttgcaaacagagaaaccccgatacatggcaggtgggatattctgaatgtctatgcctttccccattgaactatgagctcccagaaggcagggtccatgtcatgccgtactggaatctcacgggcaagcctaggcctctgcaggaaattcaaggacgggtgcctggtagttaagacaagagtagggaagtgggcaatgccactcttttctcagggcctgcagaggcccccacagcacagaggcgaggccccccaactctgcacccagggcccctgagaatggcagagtcatgggtgggaagctggtgacagccacagcctttctgagagctgggaaggrccagcaggacagctggagccttgccgctgagagcttccataattagaagcaaaatcaaagaaaagcccagtccagtgatggcttcaaacaggattatttttaagtcatctaatgccagggcttgtcagatggggaccatgattagatgggtgtgtgtgtgtgtgtgtgcgtgggtgcgtgcgtgtgtgtataagtgtgtgtgtgcatgtgtgtacacatgtgtgtgtgtgcttttaattttcctacaaagatcacttgcgttttcccagagcccaagcatctcacaagactccaatgacgcttcccgtgagtgccactgacgtgcagtttgagctccactggggcttttccctggagtcagggtggcccatgggactccttcagtcacaggcttactgagtgggttggggccaggaccatcctcccaaagattgtggtccaggaaagcccaagttccagggttgctcagaagagcaaggagcaaggacatccttctagagccttcctgataaggaaggctcacccccaggacacaggatttgagctgtgctgcctgggaatggggactctccagggatcaagcttgggggcaaggtccaatgcacctagtgtgtagcagagagagcctctcgttcctcctctttgatgtgggcaaacccgagtgaactctgccgggtcatacttcattaaatgtcttcagtctatgacctctatctctctaccctcccgggccgggaccccctgcggccaccttcccctgccctgggtggctcagggtgcagcccagcctcacctgctggcatcctgggcaggtctggacagccaccctccacagcactgtgctctttctctgactccttcttagtgtctccaccctgagcctccatcccattgcctgagcctcctgcacacaacccttgtgaattgaacttggttccctgccagcccctccaaccacctggccttgtctcccagacagcagcagctagtgatcgggccagctgctgtccatcaaggaagccaggcccaaagaaagagctaaagcacatcgccagggccccgtcccagctctggaacttgctggaaatgagagaagccaaggtgatattgtccagcgaaggcaccatggatcctccaggagcggggggcccatgcgtttccacaggcgttgggggatgaacccggtgcatactgaagctcgcactgcatccctgcagcagaggctgtgccgccctgcggctgggtcctgagccttcctggggggatgtcagtgccatcctcttgaagggaaactgtgagcaggatgaga

SEQ ID NO: 714788 - DNA, 662 bp, Homo sapiens
tatttgactctctgctgctcccaggagggtcattctgtgccttaacaatcttccctgattagcttatgctttacatgggactccaccattctccaagccacatctaaaaatagccctatacataataagcttattgatggaggtaagactctcacagagccataggacacttgctgcagatggtaaattaaggctggatatgttttgcattctactttttgtgtcttgtaatattatctgtaatgtgatcatatctggatatcactacttgttctcagaattattgtttcttttttctcatagtcttgatattttacatttcaaaattactatatagctaattgtaaatatgtcttctttatatttatttatttattttactttaagttccagaatatatgtgcagaacatgcaggtttgctacataggtatatgtgtgctatggtggtttgtggcacctatcaacctgtcatctaggttttaagccccacatgcattagtgatttgtcctaatgctctccctcccctcactgcccatcccctgacagtccccagtgtatgttgtttcccaccctttgtccatgtgttctcattkttcaactcccactatgagtgagaacatgcagtgtttggtttcctgttactgtattagtttgtgagga

SEQ ID NO: 714789 - DNA, 2462 bp, Homo sapiens
tgaagctttatgattgcccaaaacatgggaaataaaaggttttttcttttaaaaatatcactgagattttagccagcacatccaatagagtgtgagagaaaaaaaagagagaatttactgaagaaaaaaaagaaaccagcaaaaaaaaatacggttttaattccagtaattcctggaaagcaactccacagaaacttggccaggagttgggaaaagatcatataaatgctttagggcagctgtgccaggaaaaagttataaatgactgaaggattatggcatttgtgatgagaaaggaaattaatctaacttgtagcttatgcttttaaggtttttcaattagaaatgtctactttaaaagtccaaagaaatgattaagaagtgaaattgtgtctttaattgttttctaagagtaacattgtctgaatatttgttaaaatagttgaattttggaaatgaccatttcaaaaacaaaaccagcatttggtcaaacttgaaatacactcaaacaatgttcccttgaaatttactttgagaaaattgagttgccaattataatcatttataaactgaggggtgataaaaccatttttttcatattataaactgcctaaaatgttggaaaaagtactatataaggggaaggataacttattcttctgttatatgggaaaaaaaattacaccatctctgggccagaagccaagtcatgtaacttctatgggtccaaaattcatcctctatatatcaagtagtttaattcaactctcttaacttcattccagctctgtaatttatgattctatatactcagattaaggtatataagcatattcagaccatatcttaattttctaaagagagaacagaagaggaatactgcataagtgattaaagcaaagaaaaggaaaatgatgctggattggcatgaaattaacttataagcaatataactataataataattgttagtattttcttgatcagttatgtcctaaaatttatctttattttttagtgaaggctgcctgcaaattaaggcgagtacccttccaaggtcaaatgtgtctcatgatgtgcaaataggtcacttctcttaatcatagacctctatagcattgaaatgttggtttattttgaatttgtagttgtaagtactttttcctaacaagttcactctacaaaagagagatggatggatggatggatggatggatggatggatggatggatggatggagggaggaacagatagatatcatgtgggattgcttgggttagtagagctcaaatactatagaatgctagaggtaaagtaattaaaaatgtggaaacatagactatgggaagtttatggggaaaatatttggaaagtcatacagatctatcttgcataattccaatgatagatatatgatttttttgtactgtggctgtttttctgataacatggcaaatcacatgattaccattaaacagaaagaaacaactgacaaaactatcaggaaattaatttgatattatatatcaagagcattaaaaaatatttcccttgaacagaataaacttattcctgggacktttttctccaaaaatagatgtgaagagtaagatatgctttcattgctaggcaaaacttttgaatctcaaaccatgtgactgtaccaccctgttccttcccaattttgtcatgaattgaccttttcttttattgcagagttgatctcctgacttccagtcttcctctccacccctcctgccttcatttttggacatttcattgtccacgtaatttatacatttaatgtttcatattcatagatccttgatgtccttctcatgaatgagcttaacaccaagcatttaaagcaactgacttaactgggtaaatggtaccagtgcaaactgagatttcaacttaaatcaacctgcataatccagaaatctttctcctccatttctgttttcaattcttcttcccattctccatactaccaattccaaactgacatcactcttctgaaatccttcatttcatctgcattccacttactctcatcaattcatttcattttaaatttaaaaagccatcaactttcagctttaccttgctctttacttttgtatacgtaggaagaggtgtcacgtttctgtccatgtgcttccttaattctctgctatttccattattacatattgtcatgtaacaagtcaccttgaaaataaatgacttcaaaaaaaagattattaattcataaggttttgaaataatatctcatgtagttatagttggatagtggtcaatgcggaagtcatttgaaggtttgactgggctggttgtcaaagatggcttcttcctcatacatgtgtctgatgcctcacctgagatggctcatttgggaacttttctttctccatgcctccctccattcctcttctctggccagcttcctcacagccta

SEQ ID NO: 714790 - DNA, 621 bp, Homo sapiens
  misc_feature 10, 11, 12, 13, 14, 15, 16, 17, 18, 19, 20, 21, 22, 23, 24,25, 26, 27, 28, 29, 30, 31, 32, 33, 34, 35, 36, 37, 38,39, 40, 41, 42, 43, 44, 45, 46, 47, 48, 49, 50, 51, 52,53, 54, 55, 56, 57, 58, 59, 60, 61, 62, 63, 64, 65, 66,67: n = A,T,C or G
  misc_feature 68, 69, 70, 71, 72, 73, 74, 75, 76, 77, 78, 79, 80, 81, 82,83, 84, 85, 86, 87, 88, 89, 90, 91, 92, 93, 94, 95, 96,97, 98, 99, 100, 101, 102, 103, 104, 105, 106, 107, 108,109: n = A,T,C or G
tatttacttnnnnnnnnnnnnnnnnnnnnnnnnnnnnnnnnnnnnnnnnnnnnnnnnnnnnnnnnnnnnnnnnnnnnnnnnnnnnnnnnnnnnnnnnnnnnnnnnnnnnttctctgataagaattaatacagtgtgtgtgtgcgcgtgcgtgcatgcacacgcaggcacatgcacacgtgtgtttgaatgaatggatgaggtaataaaaatggacaaagaataaaaagcatggaattcasaattactagatttgtagttaaggctcacttctattttagtcctactgctagttctaacaatgaatatgaccttggaaaagtaatttaaactaccatttgcaatggatatatccgaaaactgtgggactagtaccttacaggagtgttataagaatcaaacgggatgatgaacacaaaagacctttgtaaactctaaagagctatataaacattaaagatcgttattaaatgaaataatgcaaataaagcattttatcgcaatgcccattatacctaaagcttttaaatgttagcaccctcccacaaaaatatacatgtgcatgcatgtatacatatacacacacaccacacacactcacacttgtgttcacaccttagcgg

SEQ ID NO: 714791 - DNA, 621 bp, Homo sapiens
  misc_feature 10, 11, 12, 13, 14, 15, 16, 17, 18, 19, 20, 21, 22, 23, 24,25, 26, 27, 28, 29, 30, 31, 32, 33, 34, 35, 36, 37, 38,39, 40, 41, 42, 43, 44, 45, 46, 47, 48, 49, 50, 51, 52,53, 54, 55, 56, 57, 58, 59, 60, 61, 62, 63, 64, 65, 66,67: n = A,T,C or G
  misc_feature 68, 69, 70, 71, 72, 73, 74, 75, 76, 77, 78, 79, 80, 81, 82,83, 84, 85, 86, 87, 88, 89, 90, 91, 92, 93, 94, 95, 96,97, 98, 99, 100, 101, 102, 103, 104, 105, 106, 107, 108,109: n = A,T,C or G
tatttacttnnnnnnnnnnnnnnnnnnnnnnnnnnnnnnnnnnnnnnnnnnnnnnnnnnnnnnnnnnnnnnnnnnnnnnnnnnnnnnnnnnnnnnnnnnnnnnnnnnnnttctctgataagaattaatacagtgtgtgtgtgcgcgtgcgtgcatgcacacgcaggcacatgcacacgtgtgtttgaatgaatggatgaggtaataaaaatggacaaagaataaaaagcatggaattcacaattactagatttgtagttaaggctcacttctattttagtcctactgctagttctaacaatgaatatgaccttggaaaagtaatttaaactaccatttgcaatggatatatccgaaaactgtgggactagtaccttacaggagtgttataagaatcaaacgggatgatgaacacaaaagacctttgtaaactctaaagagctatataaacattaaagatcgttattaaatgaaataatgcaaataaagcattttatcgcaatgcccattatacctaaagcttttaaatrttagcaccctcccacaaaaatatacatgtgcatgcatgtatacatatacacacacaccacacacactcacacttgtgttcacaccttagcgg

SEQ ID NO: 714792 - DNA, 587 bp, Homo sapiens
tcaggactattttttttcctggagagctgattgttaaacatctaccaacacaccactgccttcatccttgtaccatatgctgtggcccagtccatgttatcttgcattgttgtctgttttctcccatgtgtcagtcttatttcccaaattagattgtaaacagtttgaaagaatgtgccagggctgttaaatcttctcagtccttcacacaattcactcagagaatccttcaatatgtactaggtgactgaagagtatgaagaatctagaattattattgcattataattggagctyaatttgccaaggagacagcattagctacccatgaaaatagtgggactcaaacaataagggatgcttttgtgtagcatcctggcgtaaatctcagtgtttttctcctaatccttcttcacattttcccacatggaatcagatgataatgacaaactagagcaatcatgggaaaagacaaaaaatgttgcatgggaaagagaagggtcagctttgacttagtggccagtgatgttagagcttaggagggatgagtttctgagttgtcaataggtgtcaggtctttattagtt

SEQ ID NO: 714793 - DNA, 659 bp, Homo sapiens
cagattttaaaatctttggtggctaaggtacccagtgccgtttgtacaaggctgtctctctttaaaatattatactttttgtccattgtcataagaaactgattttcatctcaatctctgtcaacaccattatttatatgaagtgcttccatgtaaagtaaactcatgccccaaaccaatgtgttagaaccaatgactaagaacaagtgaatggatactcttgctttcctaaagatttccacaagaacctaatttccttttctgtttttttccccttccagattctgttttaaatgactttattatgatgcactgtgtttttatgccaaatacccagctttgcccggcactggtggcccaatatccttttattgtgattgtaagtccctattccctcgaagacaaccccccctatcgagggccattcttatctcatcttctgcaggtaagtcatggcccaggcagagttgtgcattccaccctcatcacaytgaaatgtgttttcccacatttcccacagttttcccctgtacagactctagctctgcctggcagaggtctgctgtgccatgtttaaggatttcctccttgttacctgtattgggccattctttcattgctataaagaaatacccgaggctgggtaatttataagaaaa

SEQ ID NO: 714794 - DNA, 483 bp, Homo sapiens
tttcactctaccttaaattataatttcattgcttgaaaatagaatgactttaaaactgtttaatgtcattaaccctttgttgttgttttttctatttttgtcatcttatatattcagtcctatatgaaattgtcattgttgctgtkgtgttaaatagcaaatcattattttttaagacagtaataatttacccttcctggtactatttatttctccttgaatttctgtgtttccttctagaattattgttttctaaagggaattgtaaatttcttaaaatattattttcccatttttagtgacagaaaactgccaatgaattttctcagcttttctatataaatttacaattttgcctttatttgcagaaggtatttccaatcagaatagaattttagtttgaaggattttctccatttcaataattattaatataatttgctgtttaccattttgttcattgaaaaatcaactgtagaattc

SEQ ID NO: 714795 - DNA, 1157 bp, Homo sapiens
aggtccaagatcaaggtggcagcaggtgaagtatatggtgagtgctcaagtactctgcttccaagatggggccttgttactgcatcctcacatggcagaaggcagaagggccaatgaggtaaaagctatgtgaagacacttttatgagggcactaatcccgctcataagggtgcagcactcatcatctaatcatctcctaatggccccgcctcttaatactattgtattagagattaaatttcaatgtaaatcttggagggacacaaactttcaaaccataataatttggcactctcatatttaatactttcaacagtgtttaaaaatttagaattggtactgcagatacagacacatctcatactgatcaaactcccaagtgttttagattttcttacttactatttgtttaatatgagatccacatatagtaatttaactattttgatagtcatttgctttgataatcatttgacattaatccaaagccatgccataaatgttcagaatcattttaattgaacgtaatttaacaaagcattgagaaaggcacttgtgttttcattttttccacaattacttctcttgatggtggtggcagttattatttaattatagaatgtagaaggacaattgatttgacttataaatataaacgactttctaaaatacagaggttaatatattttataaatattttagaagtttaaaagtatcattgttcaattcccacctatgagtgagaacattcagtgtttgggtttttgtccttgtgatagtttkctgagaatgatggtttccagcttcatccatgtccctacaaaggacatgaactcatcattttttatggctgcatagtattccatggtgtatatgtgccacattttcttaatccagtctatcattgttggacatttgggttggttccaagtctttgctcttgtgaataaatgagaacacatggacacaggaaggagaacatcacacaccagggcctgttgtggggtgggtgaagtggggagggatagcattaggagatatacctaatgttaaatgacgagttaatgggtgcagcacaccaacatggcgcatgtatatatatgtaacaaacctgcaagttgtgcacatgtaccctaaaatttataatttaaaaaaa

SEQ ID NO: 714796 - DNA, 1157 bp, Homo sapiens
aggtccaagatcaaggtggcagcaggtgaagtatatggtgagtgctcaagtactctgcttccaagatggggccttgttactgcatcctcacatggcagaaggcagaagggccaatgaggtaaaagctatgtgaagacacttttatgagggcactaatcccgctcataagggtgcagcactcatcatctaatcatctcctaatggccccgcctcttaatactattgtattagagattaaatttcaatgtaaatcttggagggacacaaactttcaaaccataataatttggcactctcatatttaatactttcaacagtgtttaaaaatttagaattggtactgcagatacagacacatctcatactgatcaaactcccaagtgttttagattttcttacttactatttgtttaatatgagatccacatatagtaatttaactattttgatagtcatttgctttgataatcatttgacattaatccaaagccatgccataaatgttcagaatcattttaattgaacgtaatttaacaaagcattgagaaaggcacttgtgttttcattttttccacaattacttctcttgatggtggtggcagttattatttaattatagaatgtagaaggacaattgatttgacttataaatataaacgactttctaaaatacagaggttaatatattttataaatattttagaagtttaaaagtatcattgttcaattcccacctatgagtgagaacattcagtgtttgggtttttgtccttgtgatagttttctgagaatgatggtttccagcttcatccatgtccctacaaaggacatgaactcatcattttttatggctgcatagtattccatggtgtatatgtgccacattttcttaatccagtctatcattgttggacatttgggttggttccaagtctttgctcttgtgaataaatgagaacacatggacacaggaaggagaacatcacacaccagggcctgttgtggggtgggygaagtggggagggatagcattaggagatatacctaatgttaaatgacgagttaatgggtgcagcacaccaacatggcgcatgtatatatatgtaacaaacctgcaagttgtgcacatgtaccctaaaatttataatttaaaaaaa

SEQ ID NO: 714797 - DNA, 629 bp, Homo sapiens
tgggcctccacccactctcaggggcggaggcattgaaaacagctgaaaacagtggaaaagtgcagaatacatctttgcactgttctcttttccctcattatttcaggttttattaaccacacctgtggtgtgacgctgctgggaggcactgggtggctctggtgtaccttgagaaatttccatctccaaagacttccttacctcattacttttaaaatgaagggaagacagcatgttggtaacctggccctgggcctgttgggaatacctgtgggaatctaatgggacggcctgtcatgggacatgaagattttcctaagagctggggctggagctaagcccacacatactttgcttggttctgtgtgtggccaggaactccacttacatgagatgctcttgggggtgggaatacagcctctaatgatggaagattctctytctctcaatctctctctccatgtaacaaaaatgcaggtgcagtcactcactgcttgcagactccagtgaacaaaagggaggcctggtataaagaaactgactttttattccaaagctagtttaggggaagaagctgccttgaagggtactgtgtcgtttttggagcagaaagtgggcacttttaaagg

SEQ ID NO: 714798 - DNA, 629 bp, Homo sapiens
tgggcctccacccactctcaggggcggaggcattgaaaacagctgaaaacagtggaaaagtgcagaatacatctttgcactgttctcttttccctcattatttcaggttttattaaccacacctgtggtgtgacgctgctgggaggcactgggtggctctggtgtaccttgagaaatttccatctccaaagacttccttacctcattacttttaaaatgaagggaagacagcatgttggtaacctggccctgggcctgttgggaatacctgtgggaatctaatgggacggcctgtcatgggacatgaagattttcctaagagctggggctggagctaagcccacacatactttgcttggttctgtgtgtggccaggaactccacttacatgagatgctcttgggggtgggaatacagcctctaatgatggaagattctctttctctcaatctctctctccatgtaacaaaaatgcaggtgcagtcactcactgcttgcagactccagtgaacaaaagggaggcctggtataaagaaactgactttttattccaaagctagtttaggggaagaagctgccttgaagggtactgtgtsgtttttggagcagaaagtgggcacttttaaagg

SEQ ID NO: 714799 - DNA, 1523 bp, Homo sapiens
ttattgattacctgccttatgtaatggcattgtgtgagaccctggagaaaacaaagatgtgtgaggcagtgtcccagatttccaaggaktctcccagcctaatgggaaacagatgagccaatgtgactgcaagtgccaagttagaggaatctttggggaaagatgcaactttgggaaagcgatgacttgacatcgtcttaaagttcaggctattttttgatgtggtctccaaggcaagattcatacacatttaccttcaaattttaactaattgagaaatagacatggatattacaaagaatagaagcaaaagaagtggttgcttgttttggtaaaactacattgtgtaactcagcttgaatctatagtcaaaatcactctgaaccttggaatgaacagaaggagagaatcagatctcaagagaagaccacacacctggagaagctccaacttcttcacacctgacaagaattaagacctctaagaagagaatgatctacagtaaccatgaagctgatatgttactccctctctgaattctgggtttcctttttttttttttaaatgattagggaaaaatatgtgattggcacttctgagggccctaaagacacttaagctgtgttaaaagattagtacaagtgagccacacatcctcctcagggaaaatcacatggcactataatacatcacagcttgcacagggaacttcatgctgtttgaaattactgaggtcttatacataaatctggaaattcagtctgcaataagggtttaaagctaagtgtaccaggagggtggatactggtgagatgggaagaccgtggggatggatgattcagtgctagctgttagctttcccagtcaggaaacatagcatgttggagctagtggagtcaagtggctcctgaggagggcttaacaactgggagaaaatatgataccatgggtatctgagatgataccatggaagggaaatcccatctgcttaagggctatgtttgctagtcacactctcaccttgtacttcctagtcacagaacaaaaactagacatgggtctaataaattttgaattaaagagattttttcctcagaggcaatcactgctaaaattctctatgaaaaccattttccactttctttcttccctgcttgtccaaaagcaaatcttacaaaagaacctcttaagagtggcatctgtggtgcaatctgccacttaatccctttcagaatcatcagcacacttgaaattcatctgctcctctccaaatccctggggggcatccacaatagctggcatcatcaagcacttttcttttccaactcaactgtaaacttacagttttcaaggcagtgacttgactttgccatgccttttcatttcttttggcagaatgtgagtgtgagtcccagcgcagatgatcagtgtgatcttggacaagtctccaaaattcaatgatcatttgtttctttatgtataagttggatataagaatgtctagaattatgtggaagattaga

SEQ ID NO: 714800 - DNA, 1523 bp, Homo sapiens
ttattgattacctgccttatgtaatggcattgtgtgagaccctggagaaaacaaagatgtgtgaggcagtgtcccagatttccaaggagtctcccagcctaatgggaaacagatgagccaatgtgactgcaagtgccaagttagaggaatctttggggaaagatgcaactttgggaaagcgatgacttgacatcgtsttaaagttcaggctattttttgatgtggtctccaaggcaagattcatacacatttaccttcaaattttaactaattgagaaatagacatggatattacaaagaatagaagcaaaagaagtggttgcttgttttggtaaaactacattgtgtaactcagcttgaatctatagtcaaaatcactctgaaccttggaatgaacagaaggagagaatcagatctcaagagaagaccacacacctggagaagctccaacttcttcacacctgacaagaattaagacctctaagaagagaatgatctacagtaaccatgaagctgatatgttactccctctctgaattctgggtttcctttttttttttttaaatgattagggaaaaatatgtgattggcacttctgagggccctaaagacacttaagctgtgttaaaagattagtacaagtgagccacacatcctcctcagggaaaatcacatggcactataatacatcacagcttgcacagggaacttcatgctgtttgaaattactgaggtcttatacataaatctggaaattcagtctgcaataagggtttaaagctaagtgtaccaggagggtggatactggtgagatgggaagaccgtggggatggatgattcagtgctagctgttagctttcccagtcaggaaacatagcatgttggagctagtggagtcaagtggctcctgaggagggcttaacaactgggagaaaatatgataccatgggtatctgagatgataccatggaagggaaatcccatctgcttaagggctatgtttgctagtcacactctcaccttgtacttcctagtcacagaacaaaaactagacatgggtctaataaattttgaattaaagagattttttcctcagaggcaatcactgctaaaattctctatgaaaaccattttccactttctttcttccctgcttgtccaaaagcaaatcttacaaaagaacctcttaagagtggcatctgtggtgcaatctgccacttaatccctttcagaatcatcagcacacttgaaattcatctgctcctctccaaatccctggggggcatccacaatagctggcatcatcaagcacttttcttttccaactcaactgtaaacttacagttttcaaggcagtgacttgactttgccatgccttttcatttcttttggcagaatgtgagtgtgagtcccagcgcagatgatcagtgtgatcttggacaagtctccaaaattcaatgatcatttgtttctttatgtataagttggatataagaatgtctagaattatgtggaagattaga

SEQ ID NO: 714801 - DNA, 1523 bp, Homo sapiens
ttattgattacctgccttatgtaatggcattgtgtgagaccctggagaaaacaaagatgtgtgaggcagtgtcccagatttccaaggagtctcccagcctaatgggaaacagatgagccaatgtgactgcaagtgccaagttagaggaatctttggggaaagatgcaactttgggaaagcgatgacttgacatcgtcttaaagttcaggctattttttgatgtggtctccaaggcaagattcatacacatttaccttcaaattttaactaattgagaaatagacatggatattacaaagaatagaagcaaaagaagtggttgcttgttttggtaaaactacattgtgtaactcagcttgaatctatagtcaaaatcactctgaaccttggaatgaacagaaggagagaatcagatctcaagagaagaccacacacctggagaagctccaactkcttcacacctgacaagaattaagacctctaagaagagaatgatctacagtaaccatgaagctgatatgttactccctctctgaattctgggtttcctttttttttttttaaatgattagggaaaaatatgtgattggcacttctgagggccctaaagacacttaagctgtgttaaaagattagtacaagtgagccacacatcctcctcagggaaaatcacatggcactataatacatcacagcttgcacagggaacttcatgctgtttgaaattactgaggtcttatacataaatctggaaattcagtctgcaataagggtttaaagctaagtgtaccaggagggtggatactggtgagatgggaagaccgtggggatggatgattcagtgctagctgttagctttcccagtcaggaaacatagcatgttggagctagtggagtcaagtggctcctgaggagggcttaacaactgggagaaaatatgataccatgggtatctgagatgataccatggaagggaaatcccatctgcttaagggctatgtttgctagtcacactctcaccttgtacttcctagtcacagaacaaaaactagacatgggtctaataaattttgaattaaagagattttttcctcagaggcaatcactgctaaaattctctatgaaaaccattttccactttctttcttccctgcttgtccaaaagcaaatcttacaaaagaacctcttaagagtggcatctgtggtgcaatctgccacttaatccctttcagaatcatcagcacacttgaaattcatctgctcctctccaaatccctggggggcatccacaatagctggcatcatcaagcacttttcttttccaactcaactgtaaacttacagttttcaaggcagtgacttgactttgccatgccttttcatttcttttggcagaatgtgagtgtgagtcccagcgcagatgatcagtgtgatcttggacaagtctccaaaattcaatgatcatttgtttctttatgtataagttggatataagaatgtctagaattatgtggaagattaga

SEQ ID NO: 714802 - DNA, 1523 bp, Homo sapiens
ttattgattacctgccttatgtaatggcattgtgtgagaccctggagaaaacaaagatgtgtgaggcagtgtcccagatttccaaggagtctcccagcctaatgggaaacagatgagccaatgtgactgcaagtgccaagttagaggaatctttggggaaagatgcaactttgggaaagcgatgacttgacatcgtcttaaagttcaggctattttttgatgtggtctccaaggcaagattcatacacatttaccttcaaattttaactaattgagaaatagacatggatattacaaagaatagaagcaaaagaagtggttgcttgttttggtaaaactacattgtgtaactcagcttgaatctatagtcaaaatcactctgaaccttggaatgaacagaaggagagaatcagatctcaagagaagaccacacacctggagaagctccaacttcttcacacctgacaagaattaagacctctaagaagagaatgatctacagtaaccatgaagctgatrtgttactccctctctgaattctgggtttcctttttttttttttaaatgattagggaaaaatatgtgattggcacttctgagggccctaaagacacttaagctgtgttaaaagattagtacaagtgagccacacatcctcctcagggaaaatcacatggcactataatacatcacagcttgcacagggaacttcatgctgtttgaaattactgaggtcttatacataaatctggaaattcagtctgcaataagggtttaaagctaagtgtaccaggagggtggatactggtgagatgggaagaccgtggggatggatgattcagtgctagctgttagctttcccagtcaggaaacatagcatgttggagctagtggagtcaagtggctcctgaggagggcttaacaactgggagaaaatatgataccatgggtatctgagatgataccatggaagggaaatcccatctgcttaagggctatgtttgctagtcacactctcaccttgtacttcctagtcacagaacaaaaactagacatgggtctaataaattttgaattaaagagattttttcctcagaggcaatcactgctaaaattctctatgaaaaccattttccactttctttcttccctgcttgtccaaaagcaaatcttacaaaagaacctcttaagagtggcatctgtggtgcaatctgccacttaatccctttcagaatcatcagcacacttgaaattcatctgctcctctccaaatccctggggggcatccacaatagctggcatcatcaagcacttttcttttccaactcaactgtaaacttacagttttcaaggcagtgacttgactttgccatgccttttcatttcttttggcagaatgtgagtgtgagtcccagcgcagatgatcagtgtgatcttggacaagtctccaaaattcaatgatcatttgtttctttatgtataagttggatataagaatgtctagaattatgtggaagattaga

SEQ ID NO: 714803 - DNA, 1523 bp, Homo sapiens
ttattgattacctgccttatgtaatggcattgtgtgagaccctggagaaaacaaagatgtgtgaggcagtgtcccagatttccaaggagtctcccagcctaatgggaaacagatgagccaatgtgactgcaagtgccaagttagaggaatctttggggaaagatgcaactttgggaaagcgatgacttgacatcgtcttaaagttcaggctattttttgatgtggtctccaaggcaagattcatacacatttaccttcaaattttaactaattgagaaatagacatggatattacaaagaatagaagcaaaagaagtggttgcttgttttggtaaaactacattgtgtaactcagcttgaatctatagtcaaaatcactctgaaccttggaatgaacagaaggagagaatcagatctcaagagaagaccacacacctggagaagctccaacttcttcacacctgacaagaattaagacctctaagaagagaatgatctacagtaaccatgaagctgatatgttactccctctctgaattctgggtttcctttttttttttttaaatgattagggaaaaatatgtgattggcacttctgagggccctaaagacacttaagctgtgttaaaagattagtacaagtgagccacacatcctcctcagggaaaatcacatggcactataatacatcacagcttgcacagggaacttcatgctgtttgaaattactgaggtcttatacataaatctggaaattcagtctgcaataagggtttaaagctaagtgtaccaggagggtggatactggtgagatgggaagaccgtggggatggatgattcagtgctagctgttagctttcccagtcaggaaacatagcatgttggagctagtggagtcaagtggctcctgaggagggcttaacaactgggagaaaatatgataccatgggtatctgagatgataccatggaagggaaatcccatctgcttaagggctatgtttgctagtcacactctcaccttgtacttcctagtcacagaacaaaaactagacatgggtctaataaattttgaattaaagagattttttcctcagaggcaatcactgctaaaattctctatgaaaaccattttccactttctttcttccctgcttgtccaaaagcaaatcttacaaaagaacctcttaagagtggcatctgtggtgcaatctgccacttaatccctttcagaatcatcagcacacttgaaattcatctgctcctctcmaaatccctggggggcatccacaatagctggcatcatcaagcacttttcttttccaactcaactgtaaacttacagttttcaaggcagtgacttgactttgccatgccttttcatttcttttggcagaatgtgagtgtgagtcccagcgcagatgatcagtgtgatcttggacaagtctccaaaattcaatgatcatttgtttctttatgtataagttggatataagaatgtctagaattatgtggaagattaga

SEQ ID NO: 714804 - DNA, 1523 bp, Homo sapiens
ttattgattacctgccttatgtaatggcattgtgtgagaccctggagaaaacaaagatgtgtgaggcagtgtcccagatttccaaggagtctcccagcctaatgggaaacagatgagccaatgtgactgcaagtgccaagttagaggaatctttggggaaagatgcaactttgggaaagcgatgacttgacatcgtcttaaagttcaggctattttttgatgtggtctccaaggcaagattcatacacatttaccttcaaattttaactaattgagaaatagacatggatattacaaagaatagaagcaaaagaagtggttgcttgttttggtaaaactacattgtgtaactcagcttgaatctatagtcaaaatcactctgaaccttggaatgaacagaaggagagaatcagatctcaagagaagaccacacacctggagaagctccaacttcttcacacctgacaagaattaagacctctaagaagagaatgatctacagtaaccatgaagctgatatgttactccctctctgaattctgggtttcctttttttttttttaaatgattagggaaaaatatgtgattggcacttctgagggccctaaagacacttaagctgtgttaaaagattagtacaagtgagccacacatcctcctcagggaaaatcacatggcactataatacatcacagcttgcacagggaacttcatgctgtttgaaattactgaggtcttatacataaatctggaaattcagtctgcaataagggtttaaagctaagtgtaccaggagggtggatactggtgagatgggaagaccgtggggatggatgattcagtgctagctgttagctttcccagtcaggaaacatagcatgttggagctagtggagtcaagtggctcctgaggagggcttaacaactgggagaaaatatgataccatgggtatctgagatgataccatggaagggaaatcccatctgcttaagggctatgtttgctagtcacactctcaccttgtacttcctagtcacagaacaaaaactagacatgggtctaataaattttgaattaaagagattttttcctcagaggcaatcactgctaaaattctctatgaaaaccattttccactttctttcttccctgcttgtccaaaagcaaatcttacaaaagaacctcttaagagtggcatctgtggtgcaatctgccacttaatccctttcagaatcatcagcacacttgaaattcatctgctcctctccaaatccctggggggcatccacaatagctggcatcatcaagcacttttcttttccaactcaactgtaaacttacagttttcaaggcagtgacttgactttgccatgccttttcatttcttttggcagaaygtgagtgtgagtcccagcgcagatgatcagtgtgatcttggacaagtctccaaaattcaatgatcatttgtttctttatgtataagttggatataagaatgtctagaattatgtggaagattaga

SEQ ID NO: 714805 - DNA, 410 bp, Homo sapiens
tttcccaagtcttaaatggaatcataatccatttatactaaggcaaatttatgtctttatatgctatattgctgtctagctcactgcctaggtaktaacttttatacttatacatatatgtgtgtgtacgtttctggatgtgcacacaatttttttttgtatgtgcacaaaagaatatcttaaatacaccccatgtatattgaagtgatactatttttacagctgatgctggttaaattttcttttccattattgtcacttgagatcagcaatatgttttcattttcacaaaaacatatttagttcctgaatatatgaacccatttcaacattcataattcattggtccacataattgtgtaaatgtcataacaatgaaattggactgagattgctgcacaaaatcttga

SEQ ID NO: 714806 - DNA, 1182 bp, Homo sapiens
aagtcggacgggaataaaacgaaagggaaaagacaaggactcaaagagctggagaaagcttatctatctataaaagaaggatgaatagtcagttctagctaattaatgccagactgaatgtcagcccaaggttggaaaatttactcttttttttcttttcctgaaggaaagctataaatctggttgtttacttaaaacttttatattttaaaatgttggcacatgaataaaaactttcaaacattatttgggccaaacaaaacacacttattgaccaaatgtggcctgacattaaagaccaatattttgcaacttctgccaaggaaatgcttcattcccaacttttctcagttctcgtttttctttcccattctcgttgtcaccttggtagtttgggacacgtgagctcacctttgaagtgatctgataaccccccaacctgctctctctctctcccttctggaccaatccaacatcactgctcctgtatcagttctcttaaaccccatcttcatcttaacactacccttccttcaaaaacttcagtagatttacatctcctactaagtaaagcctttagcctgacattcaagttctttaacaatatgaggtgttttttttttttatggtttagcatccccacctcccaaggctagtaattctatgaaactaagtcttcttgctctttgtctccaaagttttgttcatgcctttctttctattcttcctttaccactgtatatatatcctgtctaattgtccttcaaagctgggctcatattccwtctactgtatgaagtattcagaagctataggagcttctgtagacagaggaaaaactgtgtggctgaattggaaatactggctccacctcttcctagttgtatggactgtgaagacaatttctttcagctttagtttcctcatttgtatgtaaagtgtacataacaatacctatcttgatgaatatcgtgaactagtattatgcttactattcccttatactcccatttcaaaatatttttgcctttttctgaacctctaaatatgtgctatctactacatgaggtattagccacatgtgactgtttaaatttaaataaatttttaaaaatttaaaattttattcttcagtcccactagccacctttcaggtgttcagtagctacgtatgactagtga

SEQ ID NO: 714807 - DNA, 2021 bp, Homo sapiens
ggtgacatttaccagtttagtaatctttggctgaaagagctagcaatcatgccactggcctagctgcattctgtcaaaatcattagataaacagtggataactgtgtctttcagggagttttaggggatgctgacataacctctgagtttattatcatttttttcatcaactggttatataggtttacacactgcattaaataaagggaaatgctcccagtcctgagagatgtcctgctcagtctttaatttatcaatacttaaatctatttaacatgcttgaagctatattgtttcattcactcatccccacaaatagtgattatcactcaaaagtacttactggtggtggtgtgggtataacagtagtggaatttcatgtgatattgatcaaattagctaagaggcaactaattagacaatctatggcttaaaatttatccaacagacacttcataaaaaccattttcatgcatgtacaaatcatgatttttttatagcagagtgagttgactagctctaagacatatataaacacaactgtcttaatcaccagtgcaaggttatacaacagattatatattataattaaaaatttctgcaaggatagaaaagttcagagtcaaagttacaagtcaatcagtagagatgctgaagctagaaatagaaaagttgagagtcaaaattacaagtcaatcagtagagatgctgaggctagaaatcaagtttcagaatcctcagaaattgttttatacatcttatcaaacgatctctacacaatgtatttggagcactgtagcaccttccatggcttcaatgcaccttagattaaaatgacatttcaatttgaaatatgtagcataagaagttataatagtgcctctctttcctcagattataggaagtaaaagtcttataattagaatatccagcatacatagcttatgctactcttggagcctgtatctattttttattctaattccagagacttatggattcctgaggagaattttgaagctctagagaaactgaagaataacacaaaagactagctaataagaaaaaagaactccttgtgtacatggtgtgacaaaatgaatgatctaagtggggtggtttttattttgcagtggtttctactatgtatgtacttatttaacaacttacattatccccaccggatcatcctcactgaacactcattcaggataaacacacaaatgactccagcaccasaccagtcataatggaccatccattagtaatcttgattaactaaatcaaaggtctaaaccaatcaaaaggtctctaaattgaaacaatatggattatggacaataatagaaaaatctcttttgtttttacctggcagtgtcttggaacctggttttacaacaaggccacgggcccggatgatttctacctccagctgtccctttttgtccatcattcctacctgaatgtcacctaatggaagaaggaaggaacaaatgtgctttaatatacaaatgcactaaggaaaatagagtcaaagaccttggtttaacatcgtttcatcatttcccatatattttcttaaattcaaatatacttaaaattctatcaataatatcttcctttaaaaagcattaaaattaaaagagaaataatggttaaatattttttattcttaaaatctaaggtcttgattcctgctgataatattgttaaagattccactgggctgagcccagtggctcatgcctgtaatcccagcactttgggaggtggaggcaggaggatcgcttgaggccaggagtttgagaccagcttggtcagcacaatgaggccctgtctctacaaaaaaaagtcaaaatatttgctggttatggtggcgtgtgcctgtagtcccagctacttgggaagatgaggtgggaggatttcttgagccaaggtggtcaaggctgcagtgaaccataatcatgccactgcacttcagcctgggcaacagagtgaaactctgtctaaaaaaaaaaaaa

SEQ ID NO: 714808 - DNA, 2021 bp, Homo sapiens
ggtgacatttaccagtttagtaatctttggctgaaagagctagcaatcatgccactggcctagctgcattctgtcaaaatcattagataaacagtggataactgtgtctttcagggagttttaggggatgctgacataacctctgagtttattatcatttttttcatcaactggttatataggtttacacactgcattaaataaagggaaatgctcccagtcctgagagatgtcctgctcagtctttaatttatcaatacttaaatctatttaacatgcttgaagctatattgtttcattcactcatccccacaaatagtgattatcactcaaaagtacttactggtggtggtgtgggtataacagtagtggaatttcatgtgatattgatcaaattagctaagaggcaactaattagacaatctatggcttaaaatttatccaacagacacttcataaaaaccattttcatgcatgtacaaatcatgatttttttatagcagagtgagttgactagctctaagacatatataaacacaactgtcttaatcaccagtgcaaggttatacaacagattatatattataattaaaaatttctgcaaggatagaaaagttcagagtcaaagttacaagtcaatcagtagagatgctgaagctagaaatagaaaagttgagagtcaaaattacaagtcaatcagtagagatgctgaggctagaaatcaagtttcagaatcctcagaaattgttttatacatcttatcaaacgatctctacacaatgtatttggagcactgtagcaccttccatggcttcaatgcaccttagattaaaatgacatttcaatttgaaatatgtagcataagaagttataatagtgcctctctttcctcagattataggaagtaaaagtcttataattagaatatccagcatacatagcttatgctactcttggagcctgtatctattttttattctaattccagagacttatggattcctgaggagaattttgaagctctagagaaactgaagaataacacaaaagactagctaataagaaaaaagaactccttgtgtacatggtgtgacaaaatgaatgatctaagtggggtggtttttattttgcagtggtttctactatgtatgtacttatttaacaacttacattatccccaccggatcatcctcactgaacactcattcaggataaacacacaaatgactccagcaccacaccagtcataatggaccatccattagtaatcttgattaactaaatcaaaggtctaaaccaatcaaaaggtctctaaattgaaacaatatggattatggacaataatagaaaaatctcttttgtttttacctggcagtgtcttggaacctggttttacaacaaggccacgggcccggatgatttctacctccagctgtccctttttgtccatcattcctacytgaatgtcacctaatggaagaaggaaggaacaaatgtgctttaatatacaaatgcactaaggaaaatagagtcaaagaccttggtttaacatcgtttcatcatttcccatatattttcttaaattcaaatatacttaaaattctatcaataatatcttcctttaaaaagcattaaaattaaaagagaaataatggttaaatattttttattcttaaaatctaaggtcttgattcctgctgataatattgttaaagattccactgggctgagcccagtggctcatgcctgtaatcccagcactttgggaggtggaggcaggaggatcgcttgaggccaggagtttgagaccagcttggtcagcacaatgaggccctgtctctacaaaaaaaagtcaaaatatttgctggttatggtggcgtgtgcctgtagtcccagctacttgggaagatgaggtgggaggatttcttgagccaaggtggtcaaggctgcagtgaaccataatcatgccactgcacttcagcctgggcaacagagtgaaactctgtctaaaaaaaaaaaaa

SEQ ID NO: 714809 - DNA, 2021 bp, Homo sapiens
ggtgacatttaccagtttagtaatctttggctgaaagagctagcaatcatgccactggcctagctgcattctgtcaaaatcattagataaacagtggataactgtgtctttcagggagttttaggggatgctgacataacctctgagtttattatcatttttttcatcaactggttatataggtttacacactgcattaaataaagggaaatgctcccagtcctgagagatgtcctgctcagtctttaatttatcaatacttaaatctatttaacatgcttgaagctatattgtttcattcactcatccccacaaatagtgattatcactcaaaagtacttactggtggtggtgtgggtataacagtagtggaatttcatgtgatattgatcaaattagctaagaggcaactaattagacaatctatggcttaaaatttatccaacagacacttcataaaaaccattttcatgcatgtacaaatcatgatttttttatagcagagtgagttgactagctctaagacatatataaacacaactgtcttaatcaccagtgcaaggttatacaacagattatatattataattaaaaatttctgcaaggatagaaaagttcagagtcaaagttacaagtcaatcagtagagatgctgaagctagaaatagaaaagttgagagtcaaaattacaagtcaatcagtagagatgctgaggctagaaatcaagtttcagaatcctcagaaattgttttatacatcttatcaaacgatctctacacaatgtatttggagcactgtagcaccttccatggcttcaatgcaccttagattaaaatgacatttcaatttgaaatatgtagcataagaagttataatagtgcctctctttcctcagattataggaagtaaaagtcttataattagaatatccagcatacatagcttatgctactcttggagcctgtatctattttttattctaattccagagacttatggattcctgaggagaattttgaagctctagagaaactgaagaataacacaaaagactagctaataagaaaaaagaactccttgtgtacatggtgtgacaaaatgaatgatctaagtggggtggtttttattttgcagtggtttctactatgtatgtacttatttaacaacttacattatccccaccggatcatcctcactgaacactcattcaggataaacacacaaatgactccagcaccacaccagtcataatggaccatccattagtaatcttgattaactaaatcaaaggtctaaaccaatcaaaaggtctctaaattgaaacaatatggattatggacaataatagaaaaatctcttttgtttttacctggcagtgtcttggaacctggttttacaacaaggccacgggcccggatgatttctacctccagctgtccctttttgtccatcattcctacctgaatgtcacctaatggaagaaggaaggaacaaatgtgctttaatatacaaatgcactaaggaaaatagagtcaaagaccttggtttaacatcgtttcatcatttcccatatattttcttaaattcaaatatacttaaaattctatcaataatatcttcctttaaaaagcattaaaattaaaagagaaataatggttaaatattttttattcttaaaatctaaggtcttgattcctgctgataatattgttaaagattccactgggctgagcccagtggctcatgcctgtaatcccagcactttgggaggtggaggcaggaggatcgcttgaggccaggagtttgagaccagcttggtcagcacaatgaggccctgtctctacaaaaaaaagtcaaaatatttgctggttatggtggcgtgtgcctgtagtcccagctacttgggaagatgaggtgggaggatttcttgagccaaggtggtcaaggctgcagtgaaccataatcatgccactgcacttcagcctgggcaacagagtgaaactctgtctwaaaaaaaaaaaa

SEQ ID NO: 714810 - DNA, 1517 bp, Homo sapiens
tatataattactggattccagaatcagaacacaaactgatactgtattaaatataatgtaattactttctggcttgagtgtttgccagagatgacctaggaaatgaatgacattttgatttacattgtaattttttgaaaatggtttatgagctgtgaacaactaacacatagacacttcacaataaaaattttgtgaagtgtctgtgtgtgtgtgtgtgtgcgcgcacatacatgtgcacctacctccctattcgtcataacttaagttgtgagttcttacagatcagaagccttctataccagtgtttattggtgtgtgtttttaggtctacctatattaatatcacttaaagtgatagttaagaatacaaatttcctgataggtcaatcaaagtctctgcagcagaagcagctctgtaggtgattatcaggcacactcatcatcgagaactgcttatttatttgaattttttttttttttttgagatgaagtctcgctgtgtcaccagggctggagtgctgtgacatgatctcggctcattgcaacctctgcctcccggcttcaagcgattctcctgcctcagcctcccaagtagctgggattataggcatgcaccatcacgcccggctgatttttatatttttagtagagagggggtttcaccatgttggccaggttattctcaaactcctgacctcaagtgatccacctgccttggcctcccaaagtgttgggattacagatgtgaagcactgtgcccagccaagaactgcttatttatattatgaagaggaaaaggaagtcctatataataaagaccctgtaatctaccataataacataaaattttaggttgcctcatgattcactggtttctgtaattgtcaaagtttgttttatcaaaagtcacagagaggggttattgagttatttttattcttgtgtttggaaatgttattagcactttatatgaaagttgaaaagggatattaatttttgcatggtctgaattatagttaatataaattcrtatctctctgaactttagaaacaaaaaattcaaactgtgaccaaggctttgttcagcaatatgttagctgcattaaaaggaaatacattctttgcatttttgtagatgtatatcatgggagatgttgccttggatcagtgtcagaagaatataccattaaattatccatttaaaataatataaaatataatgatgataataatacttcctgagttctcattatgtaccacgcattgtactgggggcttcgtattcactgttaaatgaagtaattctcacaacaacctattgggttattactattatctcctatttacaagtatagagattttaagcaattgcccaagcatggcttacagctaggatgtgtgaaggctgggacatatacccaagcctgtctgattcctgagtttacaccattaaccactgtgtcataatgtccctttgagcaagagtaagtaaacatctgaccagactgtttgga

SEQ ID NO: 714811 - DNA, 3645 bp, Homo sapiens
tgcaggctcttttttggttccatatgaactttaaagtagttttttccaattctgtgaagaaagtcagtggcagcttgatggggatagcattgaacctataaattaccttgggcaggccatactggttttcatagcagctgtacaagtttatattcccaccagtagtgcacaagagttccaatttcttcagatccttgccaatacttaattttttttgtgggggtggtttctgataatagccattctaatgagtatgagggtggtatctcattgtggtttggatttgcatttccctaatgattagtggtattgagcatcttttcatatgctcatagatcatttgtttatcttctttagaacactgtttattggagacctttrcccatttcttaatcaggttccagggggtttttgttgagttaaaaataaacttttttaaaatagaaaactagaagcaggttttttcaatcttaagagtcatctgactgggcacggtggctcatgcctggaatcccagcaatttgggaggccaaggcgggccgatcaactgaggtcaggagttcaagagcagtctagccaacatggtgaaaccccgtctctactaaaaatacaaaaattaggtgggcatggtggctggcacctgtaatcccagctacttgggaggctgaggcgggaggattacttgaacctggaaggcagaggttgcagtgagctgagatggtgccactgcactccagcttgggtgacagaacaagactccatctcaaaaaaaaaaagagtcatctgtatattaataataacatatattataacttatttgcatttgtccaaatcccatcagactataaatttcttgagggaaggagctatatctcattcatttttacatctctggtacctaagataatagttgatatccacaaaatactcagtatttgttagaatgcatgtatgaataaatgagtgaacaaatgaatgaataacaatttaatctctttagagaagataacttaaaactgtattccccaaggtattaaactgatatattgatgttttgaagctataaatgatcatatggatatatgtcaaatgtttcttatttatcatctcatattctagtgtttcattattgtttatggaaataagtagaactcttgaaagcttttgttaaggaatatttatatctacagctacaaatgcaaattatcttgcgttatccctttccaaacatgaaggttgcagtcataatcaaattattaataatttgctaatgtattcttatggtattttaatcatttccctaagtcagtaatattattcatacatttattcattaaataaacatttttatcaactacactatttgtaagaatcattttaatggatgccatgaaagacataacttgacaaaacattgtccctactacctcatagcttctatattcttaggatcttaaaatctactagaggaaatgagttgtcagcttgagtaaacataaaacaaggtggaacatcatgaggattagcaagattctgtaagggagtgtggcagaatgaagaaaacataaattttagagttcaagcaggcctgaattcaggtcccaattctgccacctgggcaagttacttctctcaatctccattttctcagctgtaaaaattatggactctatcctcctactccatgaagttgttatgagcacttatactaagcgcttaaaactttgtctaacatatactaagtttctattaaatgacagctgttattaatattattgttaacataagtttagctgttatcattaatattattattatattgtcattaatgtaatagtggaaatgattccttccagcattgttgccagggtaccaattgatctgaaccttgaagtatggataatgtttaaattgtgaagatgctgagaatatggcctggacattttggacatgggaaatattagactcagaaatatggaaaggtatcttatgtatgagcagacagagagtatttgacacatagtgataaatgagactagcaatagagattggggccagattacaaatcatgttggttgaaggagttagaaacctagggttggcaatagggatctgttgtagaatttcaagcagagtcatgacaacgtaaattagaaacattttgtcaataagaaagactagagatcaagaataagggacaactttttttagattagagtagaaatgatgagggcatgatctatggtgtatcagtttcctattgaggccgtaacccattatcattagcttagcaacttaaaacaatgcacatttaccatgccatcctaagactaggtgagctctactggcttctctgctctgtgtctcacaagaccaaaatcaaggtgtcatccacgctcggattttatcttaagactcaaggcaagactccatttccaaggtcattcagttgttggcggagctcagtgccttgtggttgtggacctcaggttcccattttcctggacatatgacctccttcatcttcaagctaacaaagacacattgaatctttcttgtgcatttaatctctctgactatccattctcccttatcccttctgccttccagtcagagaagtttccctgcttttaagggcttatgtaattagattgggcccactcaggtgatctaggaaaatctccctattttaaggttcattaccttaattacatttgaaaaggtccttttgctatgtaatgtggcatattcccagagtccagggtgcagtgcatggacatctttgggggaccattctgtctaccagaaatgatagtaatagatgaaaaggtaaggaaattcaagaaatactgtagacatatttttgaagttattatatgcatcctgtatgcttcctgggagtcaatgcaaatagaaataaatgttaactttcatagcttaccttctttgaccaaagaacacccacagttattaagatttaagctttttttctaatataaaatttagaagaatttatcagtcattaaaaaatgtaattagcaatagcatgaatttgttgtttaattttcacaacttgagatgtaaatattatcattaccattttacagaaatctaaaatcagaaaactaaaatgcagtttcatggttgacagataaagctctaaagctggtattctttatatgacccccattattgctaacagtgtatttttataattagcttttttcatattattagggggggagatctttcttttcaaaataaaaattcctcaggaaagtacttctaatttaatataagctttatttaactggacatattttaagatgtaaatagccaacaggcattgtccaggttagtaatcagtaaagtcctggtaactgtaaataaaccataaagaatttaattctgagccaagaaatacatacaagaaaaagaagtctttaatttcattaaaatttataagtgccttaaggtttttgagcatcagagtataaacagaaatgcaattttaaggccattttaaatgaaatccccatacactctgaattggtatatggagctgctgaatgctatttactcaattgagtcctgtccgtgttacctactagaaagacttccaaagacacagttgcagttatttga

SEQ ID NO: 714812 - DNA, 1684 bp, Homo sapiens
aaaaaaaaaaaaaaaaaaaaaaaggttcaaaagcactagaaaccaaataaatgtaatgaaaacaatgagattttctgcttaaataccagcaaagaggacaaatggaaggggacactggagctctgcccctgttgggagtataaactgaaccaatttttctgcaggataatttgaaaatttctattaaaaatcttaaaactgctttatgttattttcctccagaaattctacttctatgaattcagcccaaaaatgcttgcttgcrtccattaaactatatttgtataagaaaatttacttctggggtggcaatgattaacttaatatacatcgggcttttaaagaggatgatgccaaggatatatttactgccatagaaatatgcccaaaacacagtgacaaaagactatatattacaattctactttttaaaatgttcatatgcataaaaaatacaaaaagcaacaaaccagaatgttttgagtggcaaaatttaagacttttcttcatattttgtcttccaaattattacaaaaagaaagtgattttctttataatcagggagaagtattattttcatttatttacatataaatttattttcttttccttattttttctcatgtatgtatcacatgtactctagagagcttgaatccccccctcttgaggtaaatcagcccatttccgtctctatccacttgccttttttggacatttcaaatcaatggaattatacaataagtgtctggcttttttacttagctaatgtttttgaggttggtccatgacatataacaggttttggtagtttgttcctttcattactgagtagaagtccattgatggatatataccacattttgtcagcagagaacatttaaactttactttcaacttcctatggtctaaatgaaaccgctggaacacaggacttacagtgaaagctgctgtgcatgtcaaaagaactacttatcagaaccagctttgtcatcaggagcctgaactgctgcagaaatttttatcattttgcaacttctttttttacaagcagcttttgtgctactacacatcaggacttttgaagcatctgatacatccatctaataagtatgagcatgtgtctgaatggacaagtaaaaccatctatgctacactgtatattttttcctcccccagactggaccagggatctctcaactttctagagtatcctgtctccattgacaaagctgaacagtattaaagatcctgctgcctttgttaggcagatttggaagggaggcccaacagcaagcgtggagaggaaaaagagaggggagcttgtggaacaggaagccccctgggtccacacatggctcccagctgttgaggatgttgtggatggggaagtgctgatggtgtcccgaggcaagcctagcacctgcactgggcccagaagggcttgactttggccccttacccacattccagaagtgtttacaagctggttttgcttttcttcttttcctaaataatcattacttggtagttagttattaacctttctttgggagagggatggggctttaaaactgaagaacataattttcattaaaatatcaaaaatggaaaaaggttactttgtaaacaatttgctatacaaaccaaatgacagctgttgagaatctcaataaaatgttaa

SEQ ID NO: 714813 - DNA, 1757 bp, Homo sapiens
tttatttagctcttgaacactagagaatttttactttacctgacccgtgggtagtggttgatctagcatctcaacatccaggtgcttaggaaggttatataaactgcagagttcacatatcaaccacttcaattgctgacgaagctacaaaacacatttcagtaaataagcattatgttaaagagcccttagaagacatcaataatgttatgactactgtaatcaatccagtaggaaatgaaaaagtttgttactgctcaactgcagcttacagatttaaaaaatagtctttaaaatattttcaggaccctctagtgtaagaaagttactatggcttggggtataatcactacaactgatacctagcagaatgacaacaataagggcagaggaaggaagttccagacattgtccaatttctcactgctaacccgttttctgagaaacttacaacttcagacaagagaacattaatgcattaatgaggctaccaaaaaaataaaaacaaaaaataacagaaaaaataacccagacacacacaggcagtgttgttacagatggattacaaaattatatattccagtcatattcatttaaaaatacagaagcaaatatctagtagacagagcctggcaatctagatgacttggatatcctatctaattccctgagtatgagtctacccatctgtaaaacaaagaaatgaaaactttcccagaatggtaaagattaaatgaaacctgtaacacttgatatttagtaggctcttaagtgtctgtataaaaaataacaataattctctaggaaaactgcaaagaataactgtaaatttccatgtttaagtccagattgttttctaagcatatttgctttcaacaagtaagcaaggtaaatcatgtgcacaagtatggtgttcattgtttaaaatgtttttcaatgtataacgtgactcaaatgggatctaataaggcaactcacttaactcggtcaggaacagtttcctaggtggctctgaccaagaaaagagatgaagagaaagaagcaggtttacaaaggacaaagaaagaagacataggattagaatgggttaacgaagcaaagaataagctttcccaaagtggacaacggagcaaatgaaaatgaggaaggttgaacggtaaattacgatccaacaaaaatcttcatgcttaaaaggaaaccaagctccagtgtggatttgatatccacccaatacactctattgcgtgctaagtgcataatgaagatgaggcagagcaatccggacacagacctagmcactctggcctctggcacggaaggggctccaggagtgctggggagagaggcagcagggtagtggagtcataccaagcaacaagaaagacagggtagtacattctccacgaatttcaattttcctcccttcccccacacaccaaaaaagcatttgagggatgggaggaagaaactgagatcacagggaaaatagtaagagacattcaaaaggacaggtcttagaaaattactagtttgcggggggcgggggtcagagaacagtagtatataaaagaacgctaagacagttcccaggtttgggtatgggtgactagtttgattatttcattttgtcccactcacaatcacaagaattactgagaaaaaacacggggctgatagagtgctaggaggtgggtaaacgcaaatttaaacgtcatcattttgaatatccatggcactgtaagtgagattccctaaca

SEQ ID NO: 714814 - DNA, 1757 bp, Homo sapiens
tttatttagctcttgaacactagagaatttttactttacctgacccgtgggtagtggttgatctagcatctcaacatccaggtgcttaggaaggttatataaactgcagagttcacatatcaaccacttcaattgctgacgaagctacaaaacacatttcagtaaataagcattatgttaaagagcccttagaagacatcaataatgttatgactactgtaatcaatccagtaggaaatgaaaaagtttgttactgctcaactgcagcttacagatttaaaaaatagtctttaaaatattttcaggaccctctagtgtaagaaagttactatggcttggggtataatcactacaactgatacctagcagaatgacaacaataagggcagaggaaggaagttccagacattgtccaatttctcactgctaacccgttttctgagaaacttacaacttcagacaagagaacattaatgcattaatgaggctaccaaaaaaataaaaacaaaaaataacagaaaaaataacccagacacacacaggcagtgttgttacagatggattacaaaattatatattccagtcatattcatttaaaaatacagaagcaaatatctagtagacagagcctggcaatctagatgacttggatatcctatctaattccctgagtatgagtctacccatctgtaaaacaaagaaatgaaaactttcccagaatggtaaagattaaatgaaacctgtaacacttgatatttagtaggctcttaagtgtctgtataaaaaataacaataattctctaggaaaactgcaaagaataactgtaaatttccatgtttaagtccagattgttttctaagcatatttgctttcaacaagtaagcaaggtaaatcatgtgcacaagtatggtgttcattgtttaaaatgtttttcaatgtataacgtgactcaaatgggatctaataaggcaactcacttaactcggtcaggaacagtttcctaggtggctctgaccaagaaaagagatgaagagaaagaagcaggtttacaaaggacaaagaaagaagacataggattagaatgggttaacgaagcaaagaataagctttcccaaagtggacaacggagcaaatgaaaatgaggaaggttgaacggtaaattacgatccaacaaaaatcttcatgcttaaaaggaaaccaagctccagtgtggatttgatatccacccaatacactctattgcgtgctaagtgcataatgaagatgaggcagagcaatccggacacagacctagccactctggcctctggcacggaaggggctccaggagtgctggggagagaggcagcagggtagtggagtcataccaagcaacaagaaagacagggtagtacattctccacgaatttcaattttcctcccttcccccacacaccaaaaaagcatttgagggatgggaggaagaaactgagatcacagggaaaatagtaagagacattcaraaggacaggtcttagaaaattactagtttgcggggggcgggggtcagagaacagtagtatataaaagaacgctaagacagttcccaggtttgggtatgggtgactagtttgattatttcattttgtcccactcacaatcacaagaattactgagaaaaaacacggggctgatagagtgctaggaggtgggtaaacgcaaatttaaacgtcatcattttgaatatccatggcactgtaagtgagattccctaaca

SEQ ID NO: 714815 - DNA, 1915 bp, Homo sapiens
tgaagagaatgtacctagtctactttcttgaaaagtttcagggtgttgagaaagagaaatggaataatggtttgcaatagcaaagcaaagggaagcttttgtgtttggttaggtttttattataggacagacagagatggactcactatgaaataagcttcagggcccctcgcagttacacagcccccttctaagtaagtattaacttttcccccttaatttgatatttgtaattttgtatttttttgwagaagaagaagaagactcccaagattaaataagctttaggccctgaaaaccctggatctacctctaaggagagaaccattaacaggcaatgaagactggatacgagagaggagaaaaagcatgctactgggtcctggaagggaagagaaaacatgggataaagagttactcatagaaaggaatgccccctccatagaggatagggttgggggagagaattggggaagacacaaagaaatgttgagttagactagagagttgttgagagacctcatactgaatggataacatgaatttcagcaaaacaagattggggattagtacgatagataaaaacagaagccagaggacaaagaagtactaaaaaaaaaaaaatctgcttgaaaactctgatcttggagtctcatctagaagtgcataaaggaccgtgagactaggatgggttgggaggctggaagtctccaggaagacagagcaggttcagtgtgaaaggaaatatgagagctgccacagcctgcacagtggaagaatttcagacttcaagaacttgaatgcatgcagccataaacaaagaacaagatcatgtcttttgcaggaacatggatggagctggaggccattatccttagcaaactaatgcaggaacagaaaaccaaataccgcatgttcccacttataagtgggagctaaatgataagaacacatggacacaaagaagggaacaaaagacactggggtctacttgagagtgaagggtgggaggagaaagaggagccaaaaatataactattaggtactgggtttaatacctgggtgatgaaataatctgtacaataaaccctatgacatgagtttacctatgtaacacaccttcacatgtactcctgaaccttaaataaaagatttttttaaaaaaagaacatgaatgtggaagaatgcccaattatatgttccatgctattctggtctaacatattctttaaggccgtgttcaaatgccatctccttcagtgagccttccctagtcccctatattgaattttagtccctccttttcctgaatttcccagtaccttgtctattacagcacttatttaactctgcctttgttatgactagctggtttctcatttgtctcctctgcgagattatgaacaacttgtcctaatcctcttcatgtctgtagcacatagcctggttcctgggacatagaaagcacccactaaatgatcgttacgtgaatacagcctactgaaggtgaaacccatgtaacatccttacttagaaagactgcaagtaaattgtgagagaagtgatctagtttgactaaaatgtcagggaagtggtgaggacctctccctgtctaaagtgagcacacatcagcatgtggccactaggcccagacaaccacagcactacccaggaggcacaggaaactgagcccatccctgttgaaatgaacaagtgactcattattcaactgcagccaactcagccagaaagtttttctaagctacaattttcacaagtttggactctggcttataacaaaactcctatctttgattttagttttagttagcaacactcatcatttctctcttgcctgtattataaagggctttcagaccaagatgtaaacaccttgaagtggtatgaatttggg

SEQ ID NO: 714816 - DNA, 1915 bp, Homo sapiens
tgaagagaatgtacctagtctactttcttgaaaagtttcagggtgttgagaaagagaaatggaataatggtttgcaatagcaaagcaaagggaagcttttgtgtttggttaggtttttattataggacagacagagatggactcactatgaaataagcttcagggcccctcgcagttacacagcccccttctaagtaagtattaacttttcccccttaatttgatatttgtaattttgtatttttttgawgaagaagaagaagactcccaagattaaataagctttaggccctgaaaaccctggatctacctctaaggagagaaccattaacaggcaatgaagactggatacgagagaggagaaaaagcatgctactgggtcctggaagggaagagaaaacatgggataaagagttactcatagaaaggaatgccccctccatagaggatagggttgggggagagaattggggaagacacaaagaaatgttgagttagactagagagttgttgagagacctcatactgaatggataacatgaatttcagcaaaacaagattggggattagtacgatagataaaaacagaagccagaggacaaagaagtactaaaaaaaaaaaaatctgcttgaaaactctgatcttggagtctcatctagaagtgcataaaggaccgtgagactaggatgggttgggaggctggaagtctccaggaagacagagcaggttcagtgtgaaaggaaatatgagagctgccacagcctgcacagtggaagaatttcagacttcaagaacttgaatgcatgcagccataaacaaagaacaagatcatgtcttttgcaggaacatggatggagctggaggccattatccttagcaaactaatgcaggaacagaaaaccaaataccgcatgttcccacttataagtgggagctaaatgataagaacacatggacacaaagaagggaacaaaagacactggggtctacttgagagtgaagggtgggaggagaaagaggagccaaaaatataactattaggtactgggtttaatacctgggtgatgaaataatctgtacaataaaccctatgacatgagtttacctatgtaacacaccttcacatgtactcctgaaccttaaataaaagatttttttaaaaaaagaacatgaatgtggaagaatgcccaattatatgttccatgctattctggtctaacatattctttaaggccgtgttcaaatgccatctccttcagtgagccttccctagtcccctatattgaattttagtccctccttttcctgaatttcccagtaccttgtctattacagcacttatttaactctgcctttgttatgactagctggtttctcatttgtctcctctgcgagattatgaacaacttgtcctaatcctcttcatgtctgtagcacatagcctggttcctgggacatagaaagcacccactaaatgatcgttacgtgaatacagcctactgaaggtgaaacccatgtaacatccttacttagaaagactgcaagtaaattgtgagagaagtgatctagtttgactaaaatgtcagggaagtggtgaggacctctccctgtctaaagtgagcacacatcagcatgtggccactaggcccagacaaccacagcactacccaggaggcacaggaaactgagcccatccctgttgaaatgaacaagtgactcattattcaactgcagccaactcagccagaaagtttttctaagctacaattttcacaagtttggactctggcttataacaaaactcctatctttgattttagttttagttagcaacactcatcatttctctcttgcctgtattataaagggctttcagaccaagatgtaaacaccttgaagtggtatgaatttggg

SEQ ID NO: 714817 - DNA, 637 bp, Homo sapiens
cttcctctgtaatgacttttcatatggcacacagtatgttatccacggtggcaggccccatgtctgttctgttctctctgtgctgcttagtgttgcctggaggctcctggcaggtctgattcatgggcttagggcccaggggctgcaaagagggcagcacttggaggaacagtgagtctgaagctccagaaaaatctgctttcactgaacataggcgggacccrgtcctgggggaagtttaatcttaaagcttcatgggtcagaggagtggcacattcatggtgaaggctgtggctgaggttgcagagattgtatgctttttcagggttagtgttcttagacccaccccatcccagaaccagcaggaacttgagagattacccaggcttcaatctaatagtggaagagaatgaagagcagactggggactggcccagggtctcataccaggaagtgactgcctggtctcactcacccacaccagaccagggtgctcctctgcagccccagcctaagcacgctaagatgtaagatggccattgccagggctgggaccagccagccaggtgaatccttttaaccacgtagctgaaggagacgtgctgaaaagagtacgttgcacttttgttggaggtca

SEQ ID NO: 714818 - DNA, 637 bp, Homo sapiens
cttcctctgtaatgacttttcatatggcacacagtatgttatccacggtggcaggccccatgtctgttctgttctctctgtgctgcttagtgttgcctggaggctcctggcaggtctgattcatgggcttagggcccaggggctgcaaagagggcagcacttggaggaacagtgagtctgaagctccagaaaaatctgctttcactgaacataggcgggacccagtcctgggggaagtttaatcttaaagcttcatgggtcagaggagtggcrcattcatggtgaaggctgtggctgaggttgcagagattgtatgctttttcagggttagtgttcttagacccaccccatcccagaaccagcaggaacttgagagattacccaggcttcaatctaatagtggaagagaatgaagagcagactggggactggcccagggtctcataccaggaagtgactgcctggtctcactcacccacaccagaccagggtgctcctctgcagccccagcctaagcacgctaagatgtaagatggccattgccagggctgggaccagccagccaggtgaatccttttaaccacgtagctgaaggagacgtgctgaaaagagtacgttgcacttttgttggaggtca

SEQ ID NO: 714819 - DNA, 637 bp, Homo sapiens
cttcctctgtaatgacttttcatatggcacacagtatgttatccacggtggcaggccccatgtctgttctgttctctctgtgctgcttagtgttgcctggaggctcctggcaggtctgattcatgggcttagggcccaggggctgcaaagagggcagcacttggaggaacagtgagtctgaagctccagaaaaatctgctttcactgaacataggcgggacccagtcctgggggaagtttaatcttaaagcttcatgggtcagaggagtggcacattcatggtgaaggctgtggctgaggttgcagagattgtatgctttttcagggttagtgttcttagacccaccccatcccagaaccagcaggaacttgagagattacccaggcttcaatctaatagtggaagagaatgaagagcagactggggactggcccagggtctcataccaggaagtgactgcctggtctcactcacccacaccagaccagggtgctcctctgcagccccagcctaagcacgctaagatgtaagatggccattgccagggctgggaccagccagccaggtgaatmcttttaaccacgtagctgaaggagacgtgctgaaaagagtacgttgcacttttgttggaggtca

SEQ ID NO: 714820 - DNA, 2270 bp, Homo sapiens
gactgtaaatcgacctatcttaggaattatagaggtatgaccagagctactactgtccayggcaaactctccagccaaggctggattccatctgttccccaatattgtcccatttaatggattggcaaattaagacagaaagtggtaatttgcccagggctgcataaaatattgaacttggagctggagccatagtacagatctcagtcacacatccttagagaatgaaagttcgtgtttaatatcactatgtagaattttctttaggtggtaaatttactataatagaaatcagaaaacatgtttagtgccagctgcaaatagttttgagtgttcttgtgccttaaatcctccactggtagagataactgagaatttgatataattccattgtcaaatttttctgttagccttgagttgtttccattcatcttatttctttgggttttgtattgttttgatccttgatgatctgttcatgtttataaatatatggttacatttataaatcagggttaggttaattacactaggtttcctcaaaagttttgtaatactgtttcagcagtaggcctcttccctaattgctagggctcgctgagggccatgcacggttctgtggggctgggcatgctcacaaccaggcagagggtgcgggtgaggaagctggggctgttgtagggatggggcacttggcagtattttagtcctgggtagtggtgcctttgctatttttgttttaatttgtgtttgttggaaaggcccaggtgtagactgtactctgcttctctttctggcccgaaggcttatgcttaggatgacttcctattgagagagctgttcttaagtgctagtgctataggccatcttctaacaaatcacctaggtggccaggtgtgttggttcatgcctgtaatcccagcactttgggaggccaaggtgggagaatcttttgagcccagaaggttgagtctacagtaagctatgtttacactaactacactccagcctgggcaacagagtaagaccctgtctcccccacgcgcccccccgcccccccaaaaagaagaaagaaaggaaagaaagaaagaacaaattacttaggtgattatcccagaaactcagttcatatatcttttagatttgcgtttctgcagtactttgtttcgttgggaaggatagttctatttctgtaggaaacctcttctatatctgtcttttgttataattacaccactctattttctccattgattcatttctggtattacttttgcctgttgtcttgtaccattcttctttattctttttttaaaaagttttccatcatcaatgggatttgagaaatgaagggaggtaaatgtgcttggtaagtctaccatcttgaaaacataggtttgctttagtttatttggagtatgttttctgtttaggtaggcctggattttgtttcataacaaaatgagcttctctgatggagtattctaaaaatgtacatatggattccctacttgtcatctgctgtacatagaggacaacaggggaggcagcaaagcaccacagttccatagagagactctgcagccagagtgcttggctttgagtcatggttctgcctttaccagctgcttaaattcggacaatttgtttattctctctgtggctcagctttctcatctgtacagtgggaataatgatagcacttatttcattgatatgttataaggattaaatgaaattgcagtttgaaaagttctagccacgtaataagaactgttggtgtttggtcttgttgttaagatatttacaattcctaagctcagataatttagcatcctggtttatgggaattttttactagaatgacttgaaagccttagctgtccattaaagggctaatgtcaccttgctgaggcacttggggccaattcttatcctaacttttgacttaattggttctgttatgctttttttttaatttttattttctattttttctattttttatttttagaataagaaaactaaaacagacgaatgtgggaatttatttatggaaacaggaatgttgttttttgagtaattcgtcacctactttttttgagtgaattaacatgtttttactgtttctcaaaccagtaaccatttttctctgttggattcacattagcaatttccttctaaataatgaaacttttttgaagaaaaaagtctaaaccatagttttccagttgatgtgaaaattcctcagattttcattggtgggagca

SEQ ID NO: 714821 - DNA, 1439 bp, Homo sapiens
tggaaatcttgaaacatacacagaagaaaatatgataatagattctttttttcacatcatccagctgcattaactctcaatgttttggcaatctctcgttttcttcctctgtacagtagcacacttttttattttggctggaggatttaaaagcaaatcctcatcctcatgtctttcgtgtctaagtaattctagctgcatctctgactgataaggacttttattttcagtataaatatccaataaagtcagcaattccttaataatcacctaatacctggtccattttgatggaaggaagcattcttgataatactacttaagagttttaggaactagtcaaatattgttcataatcattttagggtcaattaactggtatggttaccccactcttagtagataataaaaaggtaacttcttggttttgaattgtagtgtaggggtttttttttttttttttgagatgggagtctcgctctgtcacccaggctggagtgcagtggcaggatctcggctcactgcaatctccgtctcctgggttcaagcgattctcctgcctcagcctcctgaggttttcttttttaaatgtgggtgtttgtcattaactctagagttatatctcatatatctattctcaatgctgtgcatgttaatgttatagaagattcattctttaaactatagcttttaacaccatttggtaaatttttttttttttttttttttttgttttgtatttgtttgagacagagtctccctctgttgcccaggctgtagtgcaatggtgcaatcttggctcacggcaacctctgcctcccaggttcaagcgattctcctgcctcagcctgccaagtagctgggattataggcacctgccaccatgcctggcttattttttgtaaatttagtagagacagggtttcaccatgttggccaggctggtctcaaacttctgacctcaggtgatctgaccgccttggcctcccaaagtgctggggttacaggcgtgagccactgcacccggccttggtaaacattttctgagaggccttcygttgcacttgtcttcaccaggcaagggtagtgtttgatcttcgcagagtctgtgcacttgtgcgtcatcctgttgaacatcactggttctggatgcattcaggaatgctgctcttagcttaatgcactgggtaaagttacttgctccacactcagtggttcaaattgctgcacttaggggcttttcctgtctacccacatgacaccacaccagtcagcctcagcacagggagaggtgaacacagatccaggtggaagcatgtcagctttccagcttgtcttggagtcaacccagagtgtggtttcaccaacataaggcaatctctttaattttatatttaggcatcataacacagtgatgaagactatagactctggagcca

SEQ ID NO: 714822 - DNA, 1079 bp, Homo sapiens
tcttagagacagggtctctctctgtcacccaggctggggtgcagtggcataattgtagctcactgtaccctckaactcatgggctcaagaaattctcctgcctcagcctcccaaggagctgggactgcagatacatgccaccatgcccagctaatattttaaattttttgtagaggcaaggtctggctttgttgctcagattgattttgaactgttcttaagtgatcttcctgccttggcttcccaaagtgctgtgatcacaagtgtgagccaccacatctggccttgaatctttgtttttgaagcagcaaattagaaccaatctatataatacagtcacaaaactgaagatataaatctgtatatttggtcataaatattcacaatctattgctaaatgataaaaatggatcactgagtagtatgtaaaatacatcattaaaataatatgcaggcatgtatagaaaaggtttgaaagtatatctatagctatagctataattctaagagtgcttatattacttttttctatagtcttttcttttttgataatgtatgtgaattactgtgttttgggaaaatggtgatgccattaatagatacttcaaagaagccagcataggatattgatttagtggaaaatataatgaatttagatgtcatttaaagctctggctgaaaatccaattggatatgtctgattatcagtttggaagagactataaagaatttaaaatgaaatagctgataatggttaccagaggctgggaaggacagggggattgggtatgataaagggatggttaatgggtaccaaaattcagttagatagaagaaataaggtttagtgttcagtaacacaatagggcaactatggttaataataattaattgtgtatatcaaaatatctacaatagtggaattagaaagttcctaatataaataaatgataaatacttgaagtgatgaatatcctaattaccttgatttgatcttcatatgcttgtatcaaaatttcacatgcaccccagatatatgtacaaccattatgtatccataataattaaaaataaaaaaa

SEQ ID NO: 714823 - DNA, 1079 bp, Homo sapiens
tcttagagacagggtctctctctgtcacccaggctggggtgcagtggcataattgtagctcactgtaccctcgaactcatgggctcaagaaattctcctgcctcagcctcccaaggagctgggactgcagatacatgccaccatgcccagctaatattttaaattttttgtagaggcaaggtctggctttgttgctcakattgattttgaactgttcttaagtgatcttcctgccttggcttcccaaagtgctgtgatcacaagtgtgagccaccacatctggccttgaatctttgtttttgaagcagcaaattagaaccaatctatataatacagtcacaaaactgaagatataaatctgtatatttggtcataaatattcacaatctattgctaaatgataaaaatggatcactgagtagtatgtaaaatacatcattaaaataatatgcaggcatgtatagaaaaggtttgaaagtatatctatagctatagctataattctaagagtgcttatattacttttttctatagtcttttcttttttgataatgtatgtgaattactgtgttttgggaaaatggtgatgccattaatagatacttcaaagaagccagcataggatattgatttagtggaaaatataatgaatttagatgtcatttaaagctctggctgaaaatccaattggatatgtctgattatcagtttggaagagactataaagaatttaaaatgaaatagctgataatggttaccagaggctgggaaggacagggggattgggtatgataaagggatggttaatgggtaccaaaattcagttagatagaagaaataaggtttagtgttcagtaacacaatagggcaactatggttaataataattaattgtgtatatcaaaatatctacaatagtggaattagaaagttcctaatataaataaatgataaatacttgaagtgatgaatatcctaattaccttgatttgatcttcatatgcttgtatcaaaatttcacatgcaccccagatatatgtacaaccattatgtatccataataattaaaaataaaaaaa

SEQ ID NO: 714824 - DNA, 1079 bp, Homo sapiens
tcttagagacagggtctctctctgtcacccaggctggggtgcagtggcataattgtagctcactgtaccctcgaactcatgggctcaagaaattctcctgcctcagcctcccaaggagctgggactgcagatacatgccaccatgcccagctaatattttaaattttttgtagaggcaaggtctggctttgttgctcagattgattttgaactgttcttaagtgatcttcctgccttggcttcccaaagtgctgtgatcacaagtgtgagccaccacatctggccttgaatctttgtttttgaagcagcaaattagaaccaatctatataatacagtcacaaaactgaagatataaatctgtatatttggtcataaatattcacaatctattgctaaatgataaaaatggatcactgagtagtatgtaaaatacatcattaaaataatatgcaggcatgtatagaaaaggtttgaaagtatatctatagctatagctataattctaagagtgcttatattacttttttctatagtcttttcttttttgataatgtatgtgaattactgtgttttgggaaaatggtgatgccattaatagatacttcaaagaagccagcataggatattgatttagtggaaaatataatgaatttagatgtcatttaaagctctggctgaaaatccaattggatatgtctgattatcagtttggaagagactataaagaatttaaaatgaaatagctgatartggttaccagaggctgggaaggacagggggattgggtatgataaagggatggttaatgggtaccaaaattcagttagatagaagaaataaggtttagtgttcagtaacacaatagggcaactatggttaataataattaattgtgtatatcaaaatatctacaatagtggaattagaaagttcctaatataaataaatgataaatacttgaagtgatgaatatcctaattaccttgatttgatcttcatatgcttgtatcaaaatttcacatgcaccccagatatatgtacaaccattatgtatccataataattaaaaataaaaaaa

SEQ ID NO: 714825 - DNA, 1079 bp, Homo sapiens
tcttagagacagggtctctctctgtcacccaggctggggtgcagtggcataattgtagctcactgtaccctcgaactcatgggctcaagaaattctcctgcctcagcctcccaaggagctgggactgcagatacatgccaccatgcccagctaatattttaaattttttgtagaggcaaggtctggctttgttgctcagattgattttgaactgttcttaagtgatcttcctgccttggcttcccaaagtgctgtgatcacaagtgtgagccaccacatctggccttgaatctttgtttttgaagcagcaaattagaaccaatctatataatacagtcacaaaactgaagatataaatctgtatatttggtcataaatattcacaatctattgctaaatgataaaaatggatcactgagtagtatgtaaaatacatcattaaaataatatgcaggcatgtatagaaaaggtttgaaagtatatctatagctatagctataattctaagagtgcttatattacttttttctatagtcttttcttttttgataatgtatgtgaattactgtgttttgggaaaatggtgatgccattaatagatacttcaaagaagccagcataggatattgatttagtggaaaatataatgaatttagatgtcatttaaagctctggctgaaaatccaattggatatgtctgattatcagtttggaagagactataaagaatttaaaatgaaatagctgataatggttaccagaggctgggaaggacagggggattgggtatgataaagggatggttaatgggtaccaaaattcagttagatagaagaaataaggtttagtgttcagtaacacaatagggcaactatggttaataataattaattgtgtatatcmaaatatctacaatagtggaattagaaagttcctaatataaataaatgataaatacttgaagtgatgaatatcctaattaccttgatttgatcttcatatgcttgtatcaaaatttcacatgcaccccagatatatgtacaaccattatgtatccataataattaaaaataaaaaaa

SEQ ID NO: 714826 - DNA, 1079 bp, Homo sapiens
tcttagagacagggtctctctctgtcacccaggctggggtgcagtggcataattgtagctcactgtaccctcgaactcatgggctcaagaaattctcctgcctcagcctcccaaggagctgggactgcagatacatgccaccatgcccagctaatattttaaattttttgtagaggcaaggtctggctttgttgctcagattgattttgaactgttcttaagtgatcttcctgccttggcttcccaaagtgctgtgatcacaagtgtgagccaccacatctggccttgaatctttgtttttgaagcagcaaattagaaccaatctatataatacagtcacaaaactgaagatataaatctgtatatttggtcataaatattcacaatctattgctaaatgataaaaatggatcactgagtagtatgtaaaatacatcattaaaataatatgcaggcatgtatagaaaaggtttgaaagtatatctatagctatagctataattctaagagtgcttatattacttttttctatagtcttttcttttttgataatgtatgtgaattactgtgttttgggaaaatggtgatgccattaatagatacttcaaagaagccagcataggatattgatttagtggaaaatataatgaatttagatgtcatttaaagctctggctgaaaatccaattggatatgtctgattatcagtttggaagagactataaagaatttaaaatgaaatagctgataatggttaccagaggctgggaaggacagggggattgggtatgataaagggatggttaatgggtaccaaaattcagttagatagaagaaataaggtttagtgttcagtaacacaatagggcaactatggttaataataattaattgtgtatatcaaaatatctacaatagtggaattagaaagttcctaatataaataaatgataaatacttgaagtgatgaatatcctaattaccttgatttgatcttcatatgcttgtatcaaaatttcacrtgcaccccagatatatgtacaaccattatgtatccataataattaaaaataaaaaaa

SEQ ID NO: 714827 - DNA, 1514 bp, Homo sapiens
aaaataaaagaaagactgctggcacaaggagctaccaagatgctacagaatggcaactttacatttttctcccccacactcccaggccagcccaatgaatttttcagaggctactccaaaggcaaagtttaataagaattatttggaaatgaactcagggctgagttaaggcagttcaatcaaatctgtaatgtcaatttacaagtgtaatttttgaatctgcacatatgtcccaatcctgattatttggatttctttaactatcatgtcagaaaactaggaggggtttgaattcaactgatgttctaattaattacacaagaaatgtaacactgacttttgtttctccagtgatttcaatccagtgcctagaagtatgatttttttttgtataacaattctaacattttatgactggtggtgagaaattaaggatttgagtatgctgttctcttgttttatttaagctagtatgcagccgtctttttcccttcatcattagataattcctcatcctcttcaaattattctatacatttggctacccaatcattcaggacactttcctaaagtaggcatagggttttatgtgaccacaagtgatagtgaattagatactatgaggtgttacttttacatcacagaaaatcaatgagatttcccctgcaatttgccccttgtcagctcaataacaaattaaaagttattgccatcaaactttaggcttactcgactctatatcttttgctatataatggttgctgaaaataccaattgaatttggttaacataaatacaataaaatacatttaataaatctattgggaagctgaccaattaaaggaaaaactgaagaattgtgtctcagaaagaataagaactggtaaagttactaggcatcgaccctctcttcactgtgttcttctattaaaaatcaaatttccacaacagattgccatagactgaagaaggaggagaacattaaatgactcaagttaaaactataagcaatggaataagactatttaacaaagaaaaatcattatatcctaagagaaaaaatggataggcaggcaaaagcaaccaatgtcactattttgcacaacactttaaaaatttaaaagtgagttaaatgaattaataaaaatttacataatataattagagaaktaaatcagcaataagaattaaataaaattgagaagtcacattaaagaaaaatcattcattgaaaagctttagaaattactcaaaattcaggagacatgtcagcattaagttgactagcttagtataaacaataacaacatatataatgcagaatccatcaacaataaattcttcagcatgcaagtaacaaactataaacttagcacgattgcctattgttgttactttctacttataaatggaaaaagcaccccatccataataaaactaatcactccatctgtgttatggattcaaattttactgatttttttaaggatcacattctatctatgaatatctct

SEQ ID NO: 714828 - DNA, 964 bp, Homo sapiens
ccatggctgggctttaagtctttaaaaagtaaatctgagatttttttatagaacaaagtttcagcaatgctatttttttaagctcctatatggcaaataattattcctactgcattttatgcaaaaaaaaatcaggcctattataataagaataaaacttgttttgcaagtaaacttaacctactatgatttatcgttaataaaatggggatggaagagagaaaaaaatatgtttttttaaaacactgcagtacacctgttgttcttgaggagagtttttcagcaatttggacaaaatcttaaattcattgtggcgacaagtccccaaactaatgcttttttttttttaaactgggaatttcactttttatcctatttatttattttatcctattgtttatcctatgctatccattttttatcctatttatttattttatcctattgtatccattatttaccttataatatgccatctatttaaatgctgcacctaagctatagatgagaatactaacacctttgttatgaaagccttggaaccccagtctggcctgcttgaatatgttcagacagctcagacagctgcaaagtgattctactcctctcaccttggggtcaacatctaccccaytaccactccgtcagcaggaaggtgttagatctgttgtcaacctttttctatctttattagcccacaccttaagattaaaatgttataaaatgcaaaggaaggaattaaaaccacctttgcaaacattataactaaagtaattatgacagtgaaagagatcagacctagccgattccattttgcttctaacctttaagctttccttgttcattcctaggtgttccttttggaggaacatagtttatggtgtcactttgaagcaaagacaataatacctgtttcccaaaacacacccccttcttgcctggggaccagtttgccgttgtagga

SEQ ID NO: 714829 - DNA, 1660 bp, Homo sapiens
  misc_feature 451, 452, 453, 454, 455, 456, 457, 458, 459, 460, 461, 462,463, 464, 465, 466, 467, 468, 469, 470, 471, 472, 473, 474,475, 476, 477, 478, 479, 480, 481, 482, 483, 484, 485, 486,487, 488, 489, 490, 491, 492, 493, 494, 495, 496, 497: n = A,T,C or G
  misc_feature 498, 499, 500, 501, 502, 503, 504, 505, 506, 507, 508, 509,510, 511, 512, 513, 514, 515, 516, 517, 518, 519, 520, 521,522, 523, 524, 525, 526, 527, 528, 529, 530, 531, 532, 533,534, 535, 536, 537, 538, 539, 540, 541, 542, 543, 544: n = A,T,C or G
  misc_feature 545, 546, 547, 548, 549, 550: n = A,T,C or G
ttaactataaaatgaagcagacatgatagggaaccagtctgaaataggccttaagatgtgttatatatttcccatctctcttttggaattcagctactaccatgtgaataagcccaggtacttgcatgatgaagagacacatggcacagttgtcyttgtctcgcaaacctggccactgttatatatgtgagtgagaccactctagacctatcaaccttgagctgactatccagctaactgcaggacattaaggagcccaacacagaccagacaaaactggctcagcaagaatcatgagctaagtgaatattcgtttttttaaagtcattatgttttgggatagtttttatataggtacagctaaatgaagcatagatcttttccatatttttgtaacagtggaaagatataaaatattttatttggatttagaggctgtttagaatagtgnnnnnnnnnnnnnnnnnnnnnnnnnnnnnnnnnnnnnnnnnnnnnnnnnnnnnnnnnnnnnnnnnnnnnnnnnnnnnnnnnnnnnnnnnnnnnnnnnnnnaagttaactaacattcccataatatttatctattagtggattatcttttcaactccaaaatatgtattaagcacatattatgtgctgatattgttttatgtactgggaagtgctaaaatttaaatgaaggcagtctgactagatagcacatcttctgtagtacaattctatataggttcttcactgtagctcatctcagattctctgaaaaattcaattggaaaatgcttgtttagaggtctgtaaaacaatgaagagggaaaccagtcagtgtactattgccttgttttaggtggtagggagtcagtggccacattaacgggggtggaatcaggggctggggaaagtaaagacaaacgtttaagaggatggaattcattatacagtttacatgaaagggttggaaagactggacttctgtgctgctgttatttgagaatgtaaaccaaatgaggttattggggaaactgctatgtgctctgttgggatatgttaactttgagttgcttatactaaccttcaagtagtaaatgtgtcttaaaaggggctggatagaagaagaatgtaaaaattatttaactcgagcacggatcacttagaatggaaactgatcagcatactctacaggtgagtaacaactttatatcagtgcagcatatacaggattgatgtcagaaaaccatgtcaaacttaaaacaaatagtttacaaataggtgaagaaaggaagaaaaggagagaagaaacaaatgaactaatgaatgaataaaagaatgaagaaagaagatagagagacaagaaatgaagaaaggagaagggaaggaataaaaaattaaaaataagcaaaattatttaagatcatttaagttagatattttctcttagatgcagacaaattaaaataatatctgcaggaaacacagaaagcaaactaatgttcattcaataaatataaattggctcctaccttatgcaggcatttctctaggggcaatgagtagaacaatgagtaagataattgaggacattgtttaaggtgtatttgtttccattcaagtatgcgacatgtaataatttcagtttgaagctattgaaaattatccttcaatttg

SEQ ID NO: 714830 - DNA, 1079 bp, Homo sapiens
tcagtgatcctccaacctcaccctccccagatgccgggattacaggtgtaagccacactgtgcccccccttacctgacttctttctgagaccatgcactaagaccatagcccagtgaagcctgggactgcatgacaggtttgagaacaaaggagccacctgctactctgctactcaactgtcccggagacacgtgatcagggggagaaattgttcccaaagctacataggaaaccatgtctctgtaaactcagccatgacatcagcaccacgtctacaaaggcccttgcgtcttcctcccactcatcctccgcattaaccaattaccaaaaacagctcaaaatagcacacgtcccttggctggggctgctgcaggaatattgtttgtgatcattttgagagggaacaaatctgttggaaattggtgcagtgagaggattattatcaggctctcactccaatgcggggctctgattttaacctgcctggatcaggccagaacatagattttgtgccttttcctgcaagacattcatgggtggaatgtggccacttgtacaagctgtaggcctaagggtcagcaagggatgacccccatgagacacagggcaccagaggctccagggtgggaggcaccccagactccactggaagcagctgctctgagaagctggccaagacacaggagtcatttggagactgtttagtggcctggcttcaatctagcccagtttctccacaccccagttccccaaaagatcccaagggactcctgcccccaccagtcactcaygggcctattttaaaatctgtggcagccatgtaaaggggtgcttattgtgaaacaataagaaaacaacaacaaaataaacatccatcaatagggttacagttaaactatgttacccctgatcaatgcaactccatgcaacaattaaatgagtgaaatggatccctccataaggatggaaatgatgccaaggaatattgtcaggtgaaaaaggcaagccacataaattatctatctatcaaacagtgaatcatctatctatctccctcatctatctacccatctatcta

SEQ ID NO: 714831 - DNA, 1038 bp, Homo sapiens
gatccaagggcaggaggagagaggccaaggtatttatttccctgtttccctctctgcttggtcacggtccaagggtggctgaatccctctgctaaaggctgtagcacyagtccaacagctccagatctcccaaagttccagaaacttcccattgcccttgcccttttagattcaagatacttccccatggcctgtggctccctgaactttccccacacctttgtaaagtccctttgactctgtccaattacccctttgagtatgctgtctatttcctaccagaaccctgcccaatagaagtattgtcagacgtagccgcggccttatcaagagagaaaaactggctcacagccctctcccatcagccaaccccatcctggtaagagaaggcctgagactgtgagtcttttggggaatacaatgagtttcccatcccctgtccattccaagccaagtaaaggaagcttcaggaaaatcacatattgaaagagggtgttgactacaaatgggaaacctgaccccacccactgctgggtacttaagctgtagaaagtcagaggcctgtccctagttctgctggagtggagctgagagaggctcttgggagctgcctgcgtgggcagagtttgaaggcttaggatatctcctgaaggccggatgggccagtagagattaacgaggcttgagctgtcttgaaagatggctgccctgagaactggctagaagaggagaccaaggaggctgtgtgggtcacccttgcattggagatgaggggagtcgtgagagatcagtggggagcccattgccctgttggggaactgcctggtggagctttcccagggatattttaaagaacctacatgggagaaagcctgcatttggacatcttccaggccattcaatagccaaagagaaccaccaacagcttgaatcaaaaaaaaggtaacctttctccctgccctgaccctgaaggagtcagggtatgcacagaccatgagggaggaagaaggggaaggccaggagggagaatgagcagca

SEQ ID NO: 714832 - DNA, 1038 bp, Homo sapiens
gatccaagggcaggaggagagaggccaaggtatttatttccctgtttccctctctgcttggtcacggtccaagggtggctgaatccctctgctaaaggctgtagcactagtccaacagctccagatctcccaaagttccagaaacttcccattgcccttgcccttttagattcaagatacttccccatggcctgtggctccctgaactttccccacacctttgtaaagtccctttgactctgtccaattacccctttgagtatgctgtctatttcctaccagaaccctgcccaatagaagtattgtcagacgtagccgcggmcttatcaagagagaaaaactggctcacagccctctcccatcagccaaccccatcctggtaagagaaggcctgagactgtgagtcttttggggaatacaatgagtttcccatcccctgtccattccaagccaagtaaaggaagcttcaggaaaatcacatattgaaagagggtgttgactacaaatgggaaacctgaccccacccactgctgggtacttaagctgtagaaagtcagaggcctgtccctagttctgctggagtggagctgagagaggctcttgggagctgcctgcgtgggcagagtttgaaggcttaggatatctcctgaaggccggatgggccagtagagattaacgaggcttgagctgtcttgaaagatggctgccctgagaactggctagaagaggagaccaaggaggctgtgtgggtcacccttgcattggagatgaggggagtcgtgagagatcagtggggagcccattgccctgttggggaactgcctggtggagctttcccagggatattttaaagaacctacatgggagaaagcctgcatttggacatcttccaggccattcaatagccaaagagaaccaccaacagcttgaatcaaaaaaaaggtaacctttctccctgccctgaccctgaaggagtcagggtatgcacagaccatgagggaggaagaaggggaaggccaggagggagaatgagcagca

SEQ ID NO: 714833 - DNA, 1268 bp, Homo sapiens
tccaaagatatctctggggaggacacaacgtggaggcagccgcagagaaatgaatgtcctatcactaaaatttccagaaaaggagatgatgtcagtgctgcccttaggccctgctttgtacctatcagatttttggagacagaaagcccttcgagatggcttctcscttactcagcccactagagccgccaaattgctctcccctctccacctggagtcagagggaatgggcagaagcctagagcgctccttcagcagggtgggagactgtctgccaccccctccgtgggtggggccagcttccggtcccttctgctggtgaccgtgctgcgctcctttctagcaaacaagggagcgtctggcagctgctttgtctccctgcggcccctccaagtcgctgctctggaaaacacttgcctctgtcaccaggctgcacctgtaaataaagcagaagataaaagaggcctttctgtttttcaaactgtgacaggcacatcccggcaaattaccttcatgtttttttaatagaagtaaaaaggtttgggtggcttgcgttgcctgatacagaagcacttttctctcattcaagccgccacagatgggataatgaacgcatttttatctccatctctaaacaagacgcaaagaacctggagttagacaaactttcctttacggcattttgaggacagagctgggagtggtgaaaagctcttggtgcttgggaactaaaggccgggaacttgttcaggctagaagtgtatttgcctcctgtatgcagagacccacttgtgtatttcaatctcagtttatttatctacaaaatgggcgtaagggaccctatttccaggtttgttgagaaaacccctggcccagcctcgccccaaggaagctattcaataaacttcactgaagcccatcctggttgttatccagatgttcataccacttggccaaatgtgcccaccaagaagcagccattcaagggcccctatcccagtgaggagaagcctggggtctatctccacagcctgctggacacatgcctgtgcgtctggccactggagcccctgccatgccctgcaggcccttcccagggacacggatgttggggtgcctccctccatcagccccgcctctgggctgtcactgtgcctgtctcatgttgctatgcagatatttatccacacatttctccttcctcaaaaactaggagagaaaaatcacagagggcaagtctcatcccctgcggatgttcttatcctcag

SEQ ID NO: 714834 - DNA, 1268 bp, Homo sapiens
tccaaagatatctctggggaggacacaacgtggaggcagccgcagagaaatgaatgtcctatcactaaaatttccagaaaaggagatgatgtcagtgctgcccttaggccctgctttgtacctatcagatttttggagacagaaagcccttcgagatggcttctcccttactcagcccactagagccgccaaattgctctcccctctccacctggagtcagagggaatgggcagaagcctagagcgctccttcagcagggtgggagactgtctgccaccccctccgtgggtggggccagcttccggtcccttctgctggtgaccgtgctgcgctcctttctagcaaacaagggagcgtctggcagctgctttgtctccctgcggcccctccaagtcgctgctctggaaaacacttgcctctgtcaccaggctgcacctgtaaataaagcagaagataaaagaggcctttctgtttttcaaactgtgacaggcacatcccggcaaattaccttcatgtttttttaatagaagtaaaaaggtttgggtggcttgcgttgcctgatacagaagcacttttctctcattcaagccgccacagatgggataatgaacgcatttttatctccatctctaaacaagacgcaaagaacctggagttagacaaactttcctttacggcattttgaggacagagctgggagtggtgaaaagctcttggtgcttgggaactaaaggccgggaacttgttcaggctagaagtgtatttgcctcctgtatgcagagacccacttgtgtatttcaatctcagtttatttatctacaaaatgggcgtaagggaccctatttccaggtttgttgagaaaacccctggcccagcctcgccccaaggaagctattcaataaacttcactgaagcccatcctggttgttatccagatgttcataccacttggccaaatgtgcccaccaagaagcagccattcaagggcccctatcccagtgaggagaagcctggggtctatctccacagcctgctggacacatgcctgtgcgtctggccactggagcccctgccatgccctgcaggcccttcccagggacacggatgttggggtgcctccctccatcagccccgcctctgggctgtcactgtgcctgtctcatgttgctatgcagwtatttatccacacatttctccttcctcaaaaactaggagagaaaaatcacagagggcaagtctcatcccctgcggatgttcttatcctcag

SEQ ID NO: 714835 - DNA, 638 bp, Homo sapiens
attcccccagggtcagcaggagcctctgagatttcccctgcctctctgatctcttgctctactgactgtgtgctgtctgtctcagtcttggaaactcctagggatcggaattacacactgtcttttctctaggtcaaggactgaaaaattaaattcttacagggccaggcagtaattaagtgaagtgggcagaataagtgcaaattygtttgttgcctgagtggtggtaaatgcagctcctgaagagcacttgcttctcagggatggctgcttctcagctccagccaattgttacctcctggtatcagggctcagtgttatcagaacctctgatctttaaagagaagctacatttcctgatttctaaaagttggtctaaatctgctggttctgagcagtactttaaaacaacaaatgaatacatgaataaaatacattaacagactgaatgttactctgccaggtgacagttttgcaacctctgaagcctgatttcatccttgccttgtccaggcaagcttggttgaaagtctcctcttctatggttgctcaggaggtgatgctgatgcctttgggtgggaccatggtttggtgtttgtgatgaagtgggaagaagtctcccagaagtctcttacctt

SEQ ID NO: 714836 - DNA, 592 bp, Homo sapiens
agaaaggtgacacagcagtcctgtaaaggtgacacgtgggcattagggagggcattccaaggtacatcttcagggtayaaagccaggactctgagcagctatcccacctggggatttgggaaggcttagaacacttgagccacatgtaaacttggccactagcaccctctatggctctctctcaactttttgggctcttagacccctttgaggttgcaatgaagcctgttaccagaaaagcacacttacaaacaacagtgcaaattcaggggatccctggatcctagcctaaaatcctttgatctattcacccctttattgtaatttgggaaaactgaggtcttcattggtagtggttgtttaaattcatgcagttggtggtagagttagggctctgtttcaggtgtcttgccctctggtttgctgcttctccccacttgctcctcccctctccccctagagctctcctgggtggagtcctgccgctgtgttttgtgtgagaggcagcactctcacaggacatggtgtgggggaaggtcagctcattaagttgcacggggtagaataaggttcctgagaggttttgggggaa

SEQ ID NO: 714837 - DNA, 656 bp, Homo sapiens
cttaagttcttatttactgtgtatgcttttttgtatatgtaaataaaagtgtatttcctaaatcagtaatgaacttttgggtaatctttatttttgaaataaatcacacttttctgataaaatatttaataatgtgaaaagtttataataaagaattgagttggacacataaagaactgtggattaaataaatattgcctcagggttttccattcccttttatataatttctctgccagttaatccagagcttactgtttgtgtagaatatctatgtatctgcctaaggtgactatatatatgaatttctaaaaaaatcaagggaatgtattaaaatatagtaccatttaaatatagatgatttagaagtctttttttcttttttttttgagagagggtctcactctgtccccaagcaggagtgcagtggtrtgtacatggctcactgcagcctcaacctcccagactcaagtgatcctcctgtcttagccccccaggtgcacaccaccatgcccagataattttcctattttttgtagagatgaggtttcaccatgttgcacaggctcgtctggaacttctgaactcaagcgatctgcccacttttgcctcccaaagtgtagggaccacaggagtgagctatgtgattggctcaa

SEQ ID NO: 714838 - DNA, 600 bp, Homo sapiens
tgtatacatttgaagggaaaattgctggtgacaatttgccccattccccatgcaggacaaggtaaggacccggtcttcctgtgcagcctgatgatggctttgtgtgtctcttggtggcagaactggcatagcctggcactttgcacaatgtctagcaacagatcaactttaacacaagaaggcaagaatatgttcagggaaaaaggagttgtcgctctactcttgtacttctccccagacaacttcaaaggcaccagmccctctgctcgcagactctgtgcgtggttttttttgctgcacgaggcatccccacaaaggtgctggcagcctccccagcctctgcctcctctcttttgcagccttctgatgtctttccaggttggagctcctgcttagatgaaacagatgactttctgggcctgcttctgctcacagcaggcaggagcaacagtgactgattggttgaaacatgaggattaatgggtatttatatttcattaaattgtatgctcactggagaataatgtatcactcgcagatattgaaacatatgtcaaccctatccacttacatatcattcaatttgacttaaatggattg

SEQ ID NO: 714839 - DNA, 2146 bp, Homo sapiens
tttgaacatgaaggcaaagaggaaatctcaacaactttcaaagaattgctatcctactgatcacaatatcttaccacacaattaaattaaaaataatttaaatgataaaaagtagtttagcaatcctactctctttctcttcttacttatcaggaaactgaagaatgacactctgaataactcatgaattaaagaagaaataaataccatattaataacatttataacaataatatataaatatttgatctaattaaagtgrtgtctacaggtaaatatatagcttaattgcatttattataaacaaaaaatgaaaataaatgtatggtattatattaaaaatagctttaaaagaataatgaagcaatctatgaaggtggaaggagggaaataataaatataagagcaagaattaatgaaatagaaaataagatagaaaaccaaagtttgtttttggaaaaaaggaaaacaataaaataggcaaaccctagcaagatttaccactaaataagaaaagatatatgggtaagtaatattaagaacaaaagcttggtcaacacacaggatcttaaatatcttgaatatctggatttatgagaggtggcattaccaattgatggagaaggatattatcaatatgaaaaaagcccctaaatttaaatgtctacttcatagcatacacaaagatcaagtccagttacattaaagactaagtataaaaatcaaaatccaagcattttttagaatacattttagtcaaggcgcaaaagcacaagccatacaggaaaagatttgtacattttactacataaaacttaaagatgttaaatgaaaacaacaacaacagcaaactcaatataaacaaagttaaaagactgggaacatattgattataaaacaaagtatgagtttttagaaaacacaaataatgtctacaaattattaaaaaatggttaaaaactactgaatagaaaactgaaagtgcataagaacgggaatccatttggccaataaacatttgacaagatgcctaacccacagatggcggaaactgtcagagggttgtaattacatcgtgctggttttgtatgagaaattggtaactctcaaacactgctggtgggaatatagttggggcaacccctttggagagtaattcagcattgtttagtgatgtgagatgtgtccatttaggtcaccctcaagcagcagttctcaaactttagcttgattcagcatcacccggagggcttgttaaagcatgtattgctagaccccactcctagagtttctggttcagtaggtccgaggaaggagtggatttgcatttccaacatgttcccaggtgatgctgctgctgcaggcgaccacactttgagaaccactcctttagacagccttttgcagatgcgcacaataagacgagtcatgagaatgtttattgtgaggaatagtagaaaattagacacatcttcaatgcctattaatgagagaatgaataagtatacagttttaaaaaatacaacagaagatacatggaaattaaaatgaatgagctagagctgcaagtatcaacataaaaatattaaaaacaacgctctaagaagaaagcaaattgcaaagtgtagaggttaatccactatgcctattttaaaatatgcaaaataaaataaaataatgttcatggatgacaaatagtatgaatcatttgtgagcatgataaatactgaatttaccatattggttaattttgaggaggaggggagggtgcaagggtgatgggactgaaaacaaacagaaggcctcaactgtatctacatttttatctgtctatcatcgatttatctatctatcttcaccattataatcatgatcatcatcatctattaatatatatatgtctttgtttctctcagtctatcaatcatatttttacaaaaaaaggatgtggaataattattgccaaaagttaataattgataaagctggatagcagtaaacattatattatgttccttcttgtgtataaagttgattatttcatgataaaaatacaatgaaaagaaatgcctgcaaaaaatactgtgccagactctgtttctgaatgctgttaaggctgaaaaacaacatgttgagattgagcctc

SEQ ID NO: 714840 - DNA, 596 bp, Homo sapiens
tgtagttctttgatcttgcccaagtttacttactgtctctctgagccttcagtgatttcaattgcgtgaaaaccaagacaaataacacctctatatcaasaatagttcataggatcatagtacaatattgtggggattaagccagatggtatcagcccatcagaatctagcccatgggaggggctccgtaaatgaccctttctttttgagacggagtcttgccctgtcgccaggctggagtgcagtggcgcgatctcagctcactgcaacctccgcctcccgggttcaagagattctcctgcctcagcctcctgagtagctggggtgcccgccgtgctactatagggtgtgtcctacaggcgcacgccaccatgaccagctactttttgtatttttggtagagacggggtttcaccgtgttggccaggatggtcttgatttcttgaccttgtgatccgcccgctcagcctcccaaggtgttgggattgcaggcgtgagccactgcgcccggcctcctttctccctttttggagagaagctcatcttcctaccaacacatgacccgaagacgtgttggggcaggggggaagaggagt

SEQ ID NO: 714841 - DNA, 596 bp, Homo sapiens
tgtagttctttgatcttgcccaagtttacttactgtctctctgagccttcagtgatttcaattgcgtgaaaaccaagacaaataacacctctatatcaagaatagttcataggatcatagtacaatattgtggggattaagccagatggtatcagcccatcagaatctagcccatgggaggggctccgtaaatgaccctttctttttgagacggagtcttgccctgtcgccaggctggagtgcagtggcgcgatctcagctcactgcaacctccgcctcccgggttcaagagattctcctgcctcagcctcctgagtagctggggtgcccgccgtgctactatagggtgtgtcctacaggcgcacgccaccatgaccagctamtttttgtatttttggtagagacggggtttcaccgtgttggccaggatggtcttgatttcttgaccttgtgatccgcccgctcagcctcccaaggtgttgggattgcaggcgtgagccactgcgcccggcctcctttctccctttttggagagaagctcatcttcctaccaacacatgacccgaagacgtgttggggcaggggggaagaggagt

SEQ ID NO: 714842 - DNA, 611 bp, Homo sapiens
tgagtagaaagaaattcctttaactcaacagatagcatccatccctaatcctagacaacttcatacttaatggtgaaacatgagaaagattactgttatactgggagaagagagaaaggcaggtcctggccaaaggatggagatgagaaaaagaaatgcaagtatattaaaagagaataggaagaaacaaagttatcgttttcacagataacacgactctgtacacagactctgaggatagaaattattagacacttcagcatgttttcttaatataaaaatatacaaatgtacacaaaatacatatatatattttgtttrtttgtttgtttgttggagatagagtctcgctctgtcacccaggctggagtgcagtgaggcaatctcggctcactgcaagctccgcctcccgggttcacgccattctcctgcctcagcctccggagtagttgggactacaggcgcccaccaccacgtccggctatttttttgtatttttagtagagacggggtttcaccgtgttagccaggatagtcttgatctcctgacctcgtgatccacctgcctcgccctcccaaagtggtgggattacaggcgtgagccaccgccc

SEQ ID NO: 714843 - DNA, 611 bp, Homo sapiens
tgagtagaaagaaattcctttaactcaacagatagcatccatccctaatcctagacaacttcatacttaatggtgaaacatgagaaagattactgttatactgggagaagagagaaaggcaggtcctggccaaaggatggagatgagaaaaagaaatgcaagtatattaaaagagaataggaagaaacaaagttatcgttttcacagataacacgactctgtacacagactctgaggatagaaattattagacacttcagcatgttttcttaatataaaaatatacaaatgtacacaaaatacatatatatattttgtttgtttgtttgtttgttggagatagagtctcgctctgtcacccaggctggagtgcagtgaggcaatctcggctcactgcaagctccgcctcccgggttcacgccattctcctgcctcagcctccggagtagttgggactacaggcgcccaccaccacgtcyggctatttttttgtatttttagtagagacggggtttcaccgtgttagccaggatagtcttgatctcctgacctcgtgatccacctgcctcgccctcccaaagtggtgggattacaggcgtgagccaccgccc

SEQ ID NO: 714844 - DNA, 2245 bp, Homo sapiens
aagaaaaaggctttcacacagatgaatgtataggaaaacacaagtaatgacaattttcaagagccttattgtaaaaaaagaaagaaagaaaaaaggacaattatttttggagttactgtctctaattcttaaaaagtaagtacagtgtctgtatctctaagttttagtgctatacagcactaaatgtactttatgaatttggggtaggtaaagtttgtattttatcttaaacatgttttctatgatgaaaaggaacaaaattgtaaaaaatgaggatcttccctctaaaggtttcaaagcgttagaggacatgcaattaaatgttgttacaccttgaacaatgagcctcttgagtttgtaggaagggcagaccggctccattaccaacaactttggggtagaaagcacagctctcctcttttacccagcacaaatgcaatcctgattataaaactatttgtgtttctaaatacaaccaaaggaaatcttagagaaacataaattagaaacctcttttattaaggggaaacaacaaaaaaaggtgcttttttaaaaaaaaaaaaraaaaaagaaaagaaaaagaaaaacctagctgtaaaaccatgaagttaaagagctgggtctggagcagatgtgcataataactagttagttgctcccagcaggatcagaaacagctttgggggagcagaggaatatgggttggtgtgtttcagaagaggcaccagttaatactcttccaataaaaatgatgtgtcaacagtgttcagcctcaaccagtgctttctcacagaatctgcttggtaagttcagttcacaatgtgtttacctttcatggcaatgcacgatgcaattattgggtaggtcactgtcaagcaaaaacgagatataattacagagaaggcattaatgcccaaagagtacataaagcagtaagtagcttctgaggctggttcaatgcagaagtaaaactaacaggtttgctaacagctaaagacttttaattgcctcatattttctgcagctctgaccagcatccttcttacacgacaaaaaaaaaaagaaaaaaaaaaagaaaaaaaagtgtgcagctccaacagagtgaaaatgacaacacttttcttttgcctcagaagaagactggtgcttggtgtgctggattttccactgactccaaatgacaagaatatttgggcaaacaattggtcaaaagtgggtttaaatattactattgaaaaaggaaggctaaaactaaaaagaaagatcacttgctatcattattaaagattaatttttgtgtttcattttggttttaaagtaaaattctgtcaaggctacaaggggttgagtaatttaagataaaccattactgccctgtctgcaagccatttgttgttttaatggtagatgttagatacccaagcacatgtagaaaaaacaaccttccttttttggtaggttgtaaagaaatatttcaaaagacagtttctgactggaatgacagaatgttctgagtgttcctttaaaaaagtatgtgacttcatgtataccatttttaacagaaaaagctacacctgccaaaatgttgtaagaaaaccagcactaagcatgcaatactgagtgtgagaaaggaacttaaactgtattacttcctatcttttaaaattcaaactaaagtttcaaagtggagagcctgtggttgctccctgagtccaggttttatcttccacgagagaaaagggcacaggtggtcttctgacgtcttggtcagcatacaatgttatgaataatgaagggcttcctgtcaaaatgcttgatcggtttcacgacaaagggggttccattttctgatcttaaggatgagatgggtttggcgcaggaagaaggacgccaagggagggagcctgggcaccacctgcctgagtacctggagggacagcgctcacctcaatgaggtgacctgggcagtccagtaacagcatgtgatccgggctgttgttgacgagttccagatctgcctctggtacggggagtctgttaggattgggcctttaagaaaaatgtgtgtgttccttgtcgctaaaagcctgatgattgtttaataatattctggcccaagttatttcaccccgatcactccctgctatgtacacagtatcgaaattacattcagagattaaaaaaaattgtagcaatatttttcccacaaaattaagtgcaaaatatctttaacaaataatgatgg

SEQ ID NO: 714845 - DNA, 2245 bp, Homo sapiens
aagaaaaaggctttcacacagatgaatgtataggaaaacacaagtaatgacaattttcaagagccttattgtaaaaaaagaaagaaagaaaaaaggacaattatttttggagttactgtctctaattcttaaaaagtaagtacagtgtctgtatctctaagttttagtgctatacagcactaaatgtactttatgaatttggggtaggtaaagtttgtattttatcttaaacatgttttctatgatgaaaaggaacaaaattgtaaaaaatgaggatcttccctctaaaggtttcaaagcgttagaggacatgcaattaaatgttgttacaccttgaacaatgagcctcttgagtttgtaggaagggcagaccggctccattaccaacaactttggggtagaaagcacagctctcctcttttacccagcacaaatgcaatcctgattataaaactatttgtgtttctaaatacaaccaaaggaaatcttagagaaacataaattagaaacctcttttattaaggggaaacaacaaaaaaaggtgcttttttaaaaaaaaaaaaaaaaaaagaaaagaaaaagaaaaacctagctgtaaaaccatgaagttaaagagctgggtctggagcagatgtgcataataactagttagttgctcccagcaggatcagaaacagctttgggggagcagaggaatatgggttggtgtgtttcagaagaggcaccagttaatactcttccaataaaaatgatgtgtcaacagtgttcagcctcaaccagtgctttctyacagaatctgcttggtaagttcagttcacaatgtgtttacctttcatggcaatgcacgatgcaattattgggtaggtcactgtcaagcaaaaacgagatataattacagagaaggcattaatgcccaaagagtacataaagcagtaagtagcttctgaggctggttcaatgcagaagtaaaactaacaggtttgctaacagctaaagacttttaattgcctcatattttctgcagctctgaccagcatccttcttacacgacaaaaaaaaaaagaaaaaaaaaaagaaaaaaaagtgtgcagctccaacagagtgaaaatgacaacacttttcttttgcctcagaagaagactggtgcttggtgtgctggattttccactgactccaaatgacaagaatatttgggcaaacaattggtcaaaagtgggtttaaatattactattgaaaaaggaaggctaaaactaaaaagaaagatcacttgctatcattattaaagattaatttttgtgtttcattttggttttaaagtaaaattctgtcaaggctacaaggggttgagtaatttaagataaaccattactgccctgtctgcaagccatttgttgttttaatggtagatgttagatacccaagcacatgtagaaaaaacaaccttccttttttggtaggttgtaaagaaatatttcaaaagacagtttctgactggaatgacagaatgttctgagtgttcctttaaaaaagtatgtgacttcatgtataccatttttaacagaaaaagctacacctgccaaaatgttgtaagaaaaccagcactaagcatgcaatactgagtgtgagaaaggaacttaaactgtattacttcctatcttttaaaattcaaactaaagtttcaaagtggagagcctgtggttgctccctgagtccaggttttatcttccacgagagaaaagggcacaggtggtcttctgacgtcttggtcagcatacaatgttatgaataatgaagggcttcctgtcaaaatgcttgatcggtttcacgacaaagggggttccattttctgatcttaaggatgagatgggtttggcgcaggaagaaggacgccaagggagggagcctgggcaccacctgcctgagtacctggagggacagcgctcacctcaatgaggtgacctgggcagtccagtaacagcatgtgatccgggctgttgttgacgagttccagatctgcctctggtacggggagtctgttaggattgggcctttaagaaaaatgtgtgtgttccttgtcgctaaaagcctgatgattgtttaataatattctggcccaagttatttcaccccgatcactccctgctatgtacacagtatcgaaattacattcagagattaaaaaaaattgtagcaatatttttcccacaaaattaagtgcaaaatatctttaacaaataatgatgg

SEQ ID NO: 714846 - DNA, 2245 bp, Homo sapiens
aagaaaaaggctttcacacagatgaatgtataggaaaacacaagtaatgacaattttcaagagccttattgtaaaaaaagaaagaaagaaaaaaggacaattatttttggagttactgtctctaattcttaaaaagtaagtacagtgtctgtatctctaagttttagtgctatacagcactaaatgtactttatgaatttggggtaggtaaagtttgtattttatcttaaacatgttttctatgatgaaaaggaacaaaattgtaaaaaatgaggatcttccctctaaaggtttcaaagcgttagaggacatgcaattaaatgttgttacaccttgaacaatgagcctcttgagtttgtaggaagggcagaccggctccattaccaacaactttggggtagaaagcacagctctcctcttttacccagcacaaatgcaatcctgattataaaactatttgtgtttctaaatacaaccaaaggaaatcttagagaaacataaattagaaacctcttttattaaggggaaacaacaaaaaaaggtgcttttttaaaaaaaaaaaaaaaaaaagaaaagaaaaagaaaaacctagctgtaaaaccatgaagttaaagagctgggtctggagcagatgtgcataataactagttagttgctcccagcaggatcagaaacagctttgggggagcagaggaatatgggttggtgtgtttcagaagaggcaccagttaatactcttccaataaaaatgatgtgtcaacagtgttcagcctcaaccagtgctttctcacagaatctgcttggtaagttcagttcacaatgtgtttacctttcatggcaatgcacgatgcaattaytgggtaggtcactgtcaagcaaaaacgagatataattacagagaaggcattaatgcccaaagagtacataaagcagtaagtagcttctgaggctggttcaatgcagaagtaaaactaacaggtttgctaacagctaaagacttttaattgcctcatattttctgcagctctgaccagcatccttcttacacgacaaaaaaaaaaagaaaaaaaaaaagaaaaaaaagtgtgcagctccaacagagtgaaaatgacaacacttttcttttgcctcagaagaagactggtgcttggtgtgctggattttccactgactccaaatgacaagaatatttgggcaaacaattggtcaaaagtgggtttaaatattactattgaaaaaggaaggctaaaactaaaaagaaagatcacttgctatcattattaaagattaatttttgtgtttcattttggttttaaagtaaaattctgtcaaggctacaaggggttgagtaatttaagataaaccattactgccctgtctgcaagccatttgttgttttaatggtagatgttagatacccaagcacatgtagaaaaaacaaccttccttttttggtaggttgtaaagaaatatttcaaaagacagtttctgactggaatgacagaatgttctgagtgttcctttaaaaaagtatgtgacttcatgtataccatttttaacagaaaaagctacacctgccaaaatgttgtaagaaaaccagcactaagcatgcaatactgagtgtgagaaaggaacttaaactgtattacttcctatcttttaaaattcaaactaaagtttcaaagtggagagcctgtggttgctccctgagtccaggttttatcttccacgagagaaaagggcacaggtggtcttctgacgtcttggtcagcatacaatgttatgaataatgaagggcttcctgtcaaaatgcttgatcggtttcacgacaaagggggttccattttctgatcttaaggatgagatgggtttggcgcaggaagaaggacgccaagggagggagcctgggcaccacctgcctgagtacctggagggacagcgctcacctcaatgaggtgacctgggcagtccagtaacagcatgtgatccgggctgttgttgacgagttccagatctgcctctggtacggggagtctgttaggattgggcctttaagaaaaatgtgtgtgttccttgtcgctaaaagcctgatgattgtttaataatattctggcccaagttatttcaccccgatcactccctgctatgtacacagtatcgaaattacattcagagattaaaaaaaattgtagcaatatttttcccacaaaattaagtgcaaaatatctttaacaaataatgatgg

SEQ ID NO: 714847 - DNA, 2245 bp, Homo sapiens
aagaaaaaggctttcacacagatgaatgtataggaaaacacaagtaatgacaattttcaagagccttattgtaaaaaaagaaagaaagaaaaaaggacaattatttttggagttactgtctctaattcttaaaaagtaagtacagtgtctgtatctctaagttttagtgctatacagcactaaatgtactttatgaatttggggtaggtaaagtttgtattttatcttaaacatgttttctatgatgaaaaggaacaaaattgtaaaaaatgaggatcttccctctaaaggtttcaaagcgttagaggacatgcaattaaatgttgttacaccttgaacaatgagcctcttgagtttgtaggaagggcagaccggctccattaccaacaactttggggtagaaagcacagctctcctcttttacccagcacaaatgcaatcctgattataaaactatttgtgtttctaaatacaaccaaaggaaatcttagagaaacataaattagaaacctcttttattaaggggaaacaacaaaaaaaggtgcttttttaaaaaaaaaaaaaaaaaaagaaaagaaaaagaaaaacctagctgtaaaaccatgaagttaaagagctgggtctggagcagatgtgcataataactagttagttgctcccagcaggatcagaaacagctttgggggagcagaggaatatgggttggtgtgtttcagaagaggcaccagttaatactcttccaataaaaatgatgtgtcaacagtgttcagcctcaaccagtgctttctcacagaatctgcttggtaagttcagttcacaatgtgtttacctttcatggcaatgcacgatgcaattattgggtaggtcactgtcaagcaaaaacgagatataattacagagaaggcattaatgcccaaagagtacataaagcagtaagtagcttctgaggctggttcaatgcagaagtaaaactaacaggtttgctaacagctaaagacttttaattgcctcatattttctgcagctctgaccagcatccttcttacacgacaaaaaaaaaaagaaaaaraaaaagaaaaaaaagtgtgcagctccaacagagtgaaaatgacaacacttttcttttgcctcagaagaagactggtgcttggtgtgctggattttccactgactccaaatgacaagaatatttgggcaaacaattggtcaaaagtgggtttaaatattactattgaaaaaggaaggctaaaactaaaaagaaagatcacttgctatcattattaaagattaatttttgtgtttcattttggttttaaagtaaaattctgtcaaggctacaaggggttgagtaatttaagataaaccattactgccctgtctgcaagccatttgttgttttaatggtagatgttagatacccaagcacatgtagaaaaaacaaccttccttttttggtaggttgtaaagaaatatttcaaaagacagtttctgactggaatgacagaatgttctgagtgttcctttaaaaaagtatgtgacttcatgtataccatttttaacagaaaaagctacacctgccaaaatgttgtaagaaaaccagcactaagcatgcaatactgagtgtgagaaaggaacttaaactgtattacttcctatcttttaaaattcaaactaaagtttcaaagtggagagcctgtggttgctccctgagtccaggttttatcttccacgagagaaaagggcacaggtggtcttctgacgtcttggtcagcatacaatgttatgaataatgaagggcttcctgtcaaaatgcttgatcggtttcacgacaaagggggttccattttctgatcttaaggatgagatgggtttggcgcaggaagaaggacgccaagggagggagcctgggcaccacctgcctgagtacctggagggacagcgctcacctcaatgaggtgacctgggcagtccagtaacagcatgtgatccgggctgttgttgacgagttccagatctgcctctggtacggggagtctgttaggattgggcctttaagaaaaatgtgtgtgttccttgtcgctaaaagcctgatgattgtttaataatattctggcccaagttatttcaccccgatcactccctgctatgtacacagtatcgaaattacattcagagattaaaaaaaattgtagcaatatttttcccacaaaattaagtgcaaaatatctttaacaaataatgatgg

SEQ ID NO: 714848 - DNA, 581 bp, Homo sapiens
atcttgttaaataaagtggctcagctatttatgtggccagagacatgacctgtgtcattctatataatacttacaacgaccctgtcagagagagatttattctctctgctaaatagatacagggcaacaaggttcagagacgktaagttacttcccaaggtcacacagcaagtcaatggcagagctaagattgaaattatatctgtttgaagccaaaactcatacatgtccctccacatcctgtgcctcccccagagatctggttcctcaacaggctctgggccaggggacgggtctggcagggagaacaggtgtggctgtggagggaagttcaagggaactcaagagctgtggtccaggaagtatccatgtttgtcccggcttcatgctaccctccttttgcaaggaggcaggtgattgaccagtatcagccagatcctgagggcaagatcacagccttgcagacttcaaagctatccaggcactttccaagcaaacattcatgttcacaaagtctatagaaatgtagattcgcaggcagaactcaggaggaaaagtgccatctcccatgattaagaaaa

SEQ ID NO: 714849 - DNA, 581 bp, Homo sapiens
atcttgttaaataaagtggctcagctatttatgtggccagagacatgacctgtgtcattctatataatacttacaacgaccctgtcagagagagatttattctctctgctaaatagatacagggcaacaaggttcagagacggwaagttacttcccaaggtcacacagcaagtcaatggcagagctaagattgaaattatatctgtttgaagccaaaactcatacatgtccctccacatcctgtgcctcccccagagatctggttcctcaacaggctctgggccaggggacgggtctggcagggagaacaggtgtggctgtggagggaagttcaagggaactcaagagctgtggtccaggaagtatccatgtttgtcccggcttcatgctaccctccttttgcaaggaggcaggtgattgaccagtatcagccagatcctgagggcaagatcacagccttgcagacttcaaagctatccaggcactttccaagcaaacattcatgttcacaaagtctatagaaatgtagattcgcaggcagaactcaggaggaaaagtgccatctcccatgattaagaaaa

SEQ ID NO: 714850 - DNA, 588 bp, Homo sapiens
tgatgctatgaggatcacactttgaaaaacagtgatttaatatttatttatttatttatttattttgagatggagtctcgctctgtcccctaggctggagtgcagtggcatgatctcggtttcatcacattggtcaggctggtctcaaactcctgtcctcgtgatctgcccgcctccagctcccaaagtgctgggattacaggtgtgagccactgcgcccagccttgacacattatttttaaaactctctgagttactaaataatactggatcattaaatcaatttaatgggtctgactagcaattttaaaaaaagaaaacagaataggcaatatcggagcccatcacatttaatgatggtaagtactgttttatcaaactttcatttcagttgtatataaatgtgtgaattgtatcatgatgtaaaatgtattttttgctgtgggtggcagtctaaagagtttgaaarccactaattactttactgtaccattaaataatacaagccacattaatacagcagagagaaataggggagtcctattgttccagttggacactaagctgaacttgccttgggccttctct

SEQ ID NO: 714851 - DNA, 2229 bp, Homo sapiens
aggtaacatactcacaggttctggggattcggatgtgagtatcttgaggaggcattattctgcctaccacagtgagcacatagcattgtttccactacaccctcgtgtttcatgagatttcatataaagtatttctttcatgacttctacccaaagaggtttacttgctaaaagtaattagtcctccttaaaacagagtcacatcatggcaatcatgggctcccatatggagattacaaagaagctctggtgctgtcttccctttatacattctccctaaaaaattttccttttcaagagtaaatgactgctattcttaaagaatgtctatgaaatctcccaggcctagatctccttttctacctttgttatgactaatctatttctaaaaggaagacagcaatttgaattgcatggagaaataaattactgaagttgaattggtgtgaggaaaaaaggaaaaacaaaaattgtatctgtatatataccaagtcagagtaaaatctagtacatttaagctagttctcttaaaatcatcttttcgtaatgttaaaggcaattgtttttaattctgatgaaatatagcctgccaagtcatgccatttttttaagcaatttcacttgctgcccctaaaagcaaaaaaaaaaaaaaaaaaaaattaaaattaaaataaatttaaaaattaaaaattaaaaaaaataacttttttcttattttttaattagtagcagcaaaattgtttatgagatgtttagaggcatgttcacacaatgtggtggggtgcaatgagggaacatcacatttcattcctcaggcaactttgctttagttcaattatttcggaaagaatgaaagtcctgcttggatgccctctgcttcagttgcgctatgcatcattttgtgggcttttattaatagaaggaatttggagaaaggatgagaattcacattttaaaaagagggaagatgaaaggatcaattctagacatttcattttccctcctctcaacagctgtgtggggggaataatgacagacactccgtgagacaaactctcatcaggtgtggcatctggtaatagttaaagcccacctgaggagaaagaagaaagatgtcccccaggtgcagataatcttttagattatgcttaacaagaaattttaatagcgtcagaccaaaaagagtagaatttttatttatatacttgtatattagaataaaagtctcttatgtatatgtatataatcaactctcactgggttatgaaattattattaaataaccctaacatcttagtagcatacaataactatagtttagctcttgcttgtattcttggctgtgatgagctttgcctctgctctacatgttgtcacctgccagaacacaggctgaaaaaagaggagtcacgttggaaacatgttattcttatagcaaagggaaaagagcagggcagctggtggaaacagtcaacagtacataaagcttcctctaggaatggactcgcactacttctggttcattattactggcagaagtcagtcccatggccaaccctgacattgaggagagaaagtatatttcacttacaggatgacaatgcaagtcacacggcaatatgccaagctatgcaaacctcttaattgaaactggaagagaggggcaaatgattgggaactataacacaattaatgtaccttgttgacacatttcctagcagggagggaaaccccttatttttctaaaaccatggaggcctttgaagcacatttcttatgctgtaaaagttacagaaaatagagtagaracatgttgatactataatgttttaggtacttagaaatttaaagagtgtaacaattcagagaaagccagagtaatcattgtaatacagatggtacaatgtactgacttaagatggttcaagtttttctactttaagatgatacaaaaacattcagtagaaaccatagttggaattttgacttttgatcttttcccaggctagtgatatgcagggtgatactttctcatgatgctgggcatcagcagtaagccgcagctcccagtctgccacatgatcatgacagcaaacaaccaatactctacactgtactgtgttgccaggtaattttgcccaactgcaggccaatgtaagtgttccaggcatgtttaaggtaggctaagctatgatgtttgttaggttaggtgtattagatgcattttca

SEQ ID NO: 714852 - DNA, 1883 bp, Homo sapiens
ccaaaagaaaagccacaggcccttccccttcccccttactccacttaagcagccttcattttccaccgtagtggattttctagatacatccttagacctcaaagtgctggaaaggaagcttctattcaaacaaatttatactgagataccataaatgatactaattttttgtccatttgaaatatgtaagttgtgttgtaacaaattatcctgtcaagtgtaatcaaccatccatgtagttgagcttctgggatcaagaaagtatatttaaattgattcctatcattactagtggggcacrtctaattcaaatgtaaaaagacacatcacacaatcaacttgctgctgatgacaaggcctggggtcccggccttctccccctattcctctgcctgcttcccaccgtacctacagcagccctctagcctgggggcgcttgttagagtagatgggaaagtttcaagtttgcagcctgtgggattactgcttggtgtatggagcactttgtctgtacccttggtttctttctttaggtcttaaatgatggcagaaacatagattatacctcctctgctcccctcagagattggcttttggtgaggaattcagggctttccctacatcttttctccccacctttatggagacgtgctgctttttcctccctctccctcaagtcctttttagcactgtcactacccaacactttccatttcatttccttgctttggccagaagccatcaggtaaggttggaaagagactgtgacctccttcttttagttttaaaactacatttattcactcttcaccagcctgggaaacgaatattaggttctcagccctgccaccctttgctgtcatcaccaactgatacaatttttagctcaagttttgataaggttaaaagaacaatcaaccagggttactcagacctgccagctctcagagtccttggtggttaaacttggagaaaggccacatgaagacacttgtaagcacacattatctccccaaattactttcttttcctgacattgtttttgcttttaaaagttgaagaagttttaagcagacctctcatttggttgtccttgcaatctattggggtctagtttggaatttgaaaactggaacaaaaaaaccttgaattcagtgcatatttggtttcggtgctgctgcttctcaagattctcagcagggattgaggaagaattcagtgtacacagcagacgtctgaaattggcgggcttgacttcctggcaaattgctgcatttttccactttctgttcaggactcctaaatgctgaaatgtggatgcataccaaaataaatgcaattctttatgtgaaataaaataagtaaataaatgaaacagagtggtggtgctgattcacatgcctaaaacctttatttatttatttttccagctggagacccacatcaataacatttccaaaactcaacttgtgtctttaaatttaaaaagctagaaaataaagtttatctgatccacttgtattacaaatggctccagcaagaagtgacatcagcaagatggtaaagtgggaagccctggaacctccttgtctccacagacacatcaattcagcaacaatttatggtcaaattccctttttgagaaatcagaaactaattgaaaggctcttgtgccctgggaaaatataacaccagaatcactgaaacccatagggagatttaggacaccctcttgccagagactctgcccccagacagagttacacaatcaggaagagcccctcaagttcccagattcacccagcaaagggggtattgcttcttgtgtctggcatcccaacttttccatggggactcctcagagaactggcttctgtcttgcc

SEQ ID NO: 714853 - DNA, 598 bp, Homo sapiens
ggagaaccacctctggcccatgaaggacagttgatcctccagggttgcagatgactagagagtcctgagctggccagcacaggtggctgcatcctcgctcctgtgctccctgagtatgtgtgtgtggtggggggtacttctggaagtgctgacctcagatactcacttatgcctctagtgtttctgcctgacccgctcctatgctcctatcagacctggaaacctggtgactgcccacaccctacagacagtcttatctgcaactgggaatcaataggtatttattgttgatttaatgcccagagattgtaagagagcatatggctcccaggaaagtgtgtacatgatatacaggatctgcagctggtctctgcagaagtacttttgggctttaactaaggtgcatcatgrtgcaagggagatttttggttggaaagacattagagtctcacttctcatagcctctcaaggacaatgaggagtactgtgtcagtcagctactgctgtaaaacaactccaaaacttaatggctttactcacatgtccatgagtggaaggttattggctggaatgacagaggcccctcatcaccagaagc

SEQ ID NO: 714854 - DNA, 2315 bp, Homo sapiens
taacctgatttagcagggttcttttgctaaacctgaattttacaaggaagtgcatagatgggtccatgagaaggttccaaagccagactaaagtttggccaaccaaagaatctttgtcagaattacctgagttcaatgaattttaaaactcaatttataattaattatctgctttttattatcaatatcccaactaaataaaaatgatctatgatcatataaagtgagtgcagctttgggggaggttgttacccagccaggagcagagaaaaggacagccaggtataaaagccagaggtcacaaagcctggcttctcgtcctaggtctgcttccaagtagttaagtgtctttaggcaagttagtgatgataacaagttattaaatacaataaattttttttgagatggaatcttgttctgttacccaggctggagtgcagtggtgtgatctcagctcacagcaacctccgtctcctaggttcaagtgattctcctgcttcagcctctccagtagctgggattacaggtgcatgccaccatgcctggctaatttttatagttttagtagagatggggtttcaccatgttggccaggctggtctcaaactcctggcctcaagtgatctgcccatgtcggcctcccaaagtgctgggattacaggcatgagccactgcacctggcccaaagataataattaattcatagaatatggaaataaaaactagtggattgccttactcacaggtctgatgtgaatgtctaatgtatgtatgtatgtatgtaatatcactttctagatttacaagtgagctggcttagctggtgttcaccctagtacaggtatttggtttgtttgtttgtttggagacaaggtcttgctctgttgcctaggcttaagtgcagtggcatgatcatagttcactgcagtcttgaaatcctgggctcaagtgatccttccacctgaacctcccaagtagctgggactactggtgcacgccaccatgcccagctaattttttttattatttatagggacaaggtcttgctatgttgtttgggctgaatcaaactcctgggctcaagtgatcctcccatgtcagcctcccaaaatactgggattacaaacatgagccattgtgcccagctccaatacagattttaaggaatcaaacaaatgaaagatattactattattattatttagtcttcaaagcgtataagcaatcttgaatgtggatgtaatcaaacatatttgggataaacatatgtgtcacatataaactcacacaaacacatctactcagtcgtgtcctggtccaactcttttggaaatggactcatcagacctgtcacaatatggaggaaatatttgaagtcgattttaatccattcccctggccacagtcatttttttaatcgtcgaatctgaaatgttgatctcaaaatactatcacttttttttacgcagacttcatcttcagagcaattttaaattgaaagagagagaaacacatatttttcattctctcctttatggcgatccagtctccagcctggagggagtggaaagtagcaataaggaagatcrgatggcgtgaacataaaacttgaggtggcttctaatgactttaccaaaaagcaaattcaagtatttccccacatttagccatctcagcaagaagggagggcaaaactcctagaagtagaaagcgagggatttagtgtgccttgaaaactaacaggtatttcaaggacactgaagcagcaagtgagaaggaagctgggagctctgatttggggtggttctgcagaacaatgccgctattggagagcacttgtgggggcccctgggctgtgaaagaccactgatagacatgcaaatggaaggggcctgaatagacgttgcaaagctgggtttctgcgggctgggcggagaaagctttggggagatagtggaaagcaatgcctcgagccaaaaataacgcttgcgcttgcgctgtgaggacatttaggtcgagctgaaatgagccattaaacgcttttttttaagtgcctttggatctgaaagggcagtaataatgcaaattcgaagtttgccttagttaattgggtagaggacccatcaattaatcagagaggcagaaaactattatgtagttaacactttttaaaaagagtcctactgataaaatgcatttcaaaaaaaattctacagctccgtctgaatctgacaacatgaaaaagagtaagaaggcctttatgtaacgtctcgaattcacctgggctgagatacacagccagatcggtagttaga

SEQ ID NO: 714855 - DNA, 892 bp, Homo sapiens
attttctttataaattacctggccatcaacaagcataaatatattcaaaagtattgaaatcatgcaaagtatttttccagttactttggaattaaatctgaaattaatagwaaaaggacattttaggaaaatcacaaataagtggaaattaacaaaatactcataaataactgatgagttgggccaggtacggtggctcacgcctgtaatcccagcactttgggaggccgaggtgggcagatcacgagttctggagtttgagaccaccctggccaacatggtgaaaccccatgtctactaaaagtacaaaaattagctgggtgtggtggcgcatgcctctagtcccagctacttgggaggctgaggcaggagaatcacttgaacccgggaggtggagattgcagtgagccaagatcgtgccactgcactccagtctgggagacagagtgagacttcaaaaaaaaaaaaaaaaaaaaaaaaggtttaataactgatgagtcaaagagaatactaaaaggaagtttagaaactaactggagatgggaggggttccaagatggccaaataggaacagctccagtctgcagctcccagcaggatcgacgcagaagacgggtgatttctgcatttccaacttaggtacctggttcatttcactgggactggttagacagtgggtgcaggccatggagggcaagctgaaacagggcggggcatcgcctcacccaagaagcactaggggtcagaggatttccctttcctagccaagggaagccatgacagactgtacctgggaaaaatgggatactcccccctccaaatactgcgcttttccaaaggtcttagcaaatggcagaccaggagttactatcccatgcctggctcagtgggt

SEQ ID NO: 714856 - DNA, 892 bp, Homo sapiens
attttctttataaattacctggccatcaacaagcataaatatattcaaaagtattgaaatcatgcaaagtatttttccagttactttggaattaaatctgaaattaatagtaaaaggacattttaggaaaatcacaaataagtggaaattaacaaaatactcrtaaataactgatgagttgggccaggtacggtggctcacgcctgtaatcccagcactttgggaggccgaggtgggcagatcacgagttctggagtttgagaccaccctggccaacatggtgaaaccccatgtctactaaaagtacaaaaattagctgggtgtggtggcgcatgcctctagtcccagctacttgggaggctgaggcaggagaatcacttgaacccgggaggtggagattgcagtgagccaagatcgtgccactgcactccagtctgggagacagagtgagacttcaaaaaaaaaaaaaaaaaaaaaaaaggtttaataactgatgagtcaaagagaatactaaaaggaagtttagaaactaactggagatgggaggggttccaagatggccaaataggaacagctccagtctgcagctcccagcaggatcgacgcagaagacgggtgatttctgcatttccaacttaggtacctggttcatttcactgggactggttagacagtgggtgcaggccatggagggcaagctgaaacagggcggggcatcgcctcacccaagaagcactaggggtcagaggatttccctttcctagccaagggaagccatgacagactgtacctgggaaaaatgggatactcccccctccaaatactgcgcttttccaaaggtcttagcaaatggcagaccaggagttactatcccatgcctggctcagtgggt

SEQ ID NO: 714857 - DNA, 892 bp, Homo sapiens
attttctttataaattacctggccatcaacaagcataaatatattcaaaagtattgaaatcatgcaaagtatttttccagttactttggaattaaatctgaaattaatagtaaaaggacattttaggaaaatcacaaataagtggaaattaacaaaatactcataaataactgatgagttgggccaggtacggtggctcacgcctgtaatcccagcactttgggaggccgargtgggcagatcacgagttctggagtttgagaccaccctggccaacatggtgaaaccccatgtctactaaaagtacaaaaattagctgggtgtggtggcgcatgcctctagtcccagctacttgggaggctgaggcaggagaatcacttgaacccgggaggtggagattgcagtgagccaagatcgtgccactgcactccagtctgggagacagagtgagacttcaaaaaaaaaaaaaaaaaaaaaaaaggtttaataactgatgagtcaaagagaatactaaaaggaagtttagaaactaactggagatgggaggggttccaagatggccaaataggaacagctccagtctgcagctcccagcaggatcgacgcagaagacgggtgatttctgcatttccaacttaggtacctggttcatttcactgggactggttagacagtgggtgcaggccatggagggcaagctgaaacagggcggggcatcgcctcacccaagaagcactaggggtcagaggatttccctttcctagccaagggaagccatgacagactgtacctgggaaaaatgggatactcccccctccaaatactgcgcttttccaaaggtcttagcaaatggcagaccaggagttactatcccatgcctggctcagtgggt

SEQ ID NO: 714858 - DNA, 396 bp, Homo sapiens
gtgaatgggtataaggatgaaggaatggcaggctttaaytgaaaatgaagactaagtatttctgcaggaacacagaggtgtaacaatgaaaaaatcttttaaaaagtatgaggaggaagataaatagataactaataatttgattttattttatagttaatgggtagcttcctggaagacagagagagagagataggtaaaataaattaacttttatgtgaaataagatgtaataatcctgattttttcacctctgtactagtgtcattacaaacagatccatttacttgacatatcttattatcacaattaagcatgaaatacccatttgaaatgttgatttaaaaagttgatatgagacaacaggacattaagtgctatgtacattaaaattcg

SEQ ID NO: 714859 - DNA, 1616 bp, Homo sapiens
aagaatttgctacagttttatttttctgattttgatagaagcaaattcattgatatctttaaaaatactttggggaaaaactaatcatttaaacaatacacagaaaagcatgtatataggtgcacatatttttttcttttgccttctgctccaatgtgactttcacgtggaactgaggacaaaagtgtggttgagtgaacctgttctacatggttgtgatataagttgaaatctaacagagaactttggctatatgaattcattcaatggaacaacaaaaatctagagaggtttgccttttaaactcttagactaattattccaggaattgcctcagtgcttatgttagcttggtgtcagatatctgtactcgtaagaacaaagtcaaaaaagaagtcatgaaatttagaatggcttcttcctgtcaaatacatttagaacatatttttggaataatttcaagtccattgggaacacaattactaggaatttgggacagaggtgacaatgagaatctgctttgagaaagtagatcataatattacagagctatgccttcatcagtttaaaattggaagtggtttctctgttattttctaccctggagtgttcttaaaattatttttatctcctttaagaaatttgcagcgcttctaaaaatgaaactgaaagtgccacaaatatgcttgtgctccaaatcagttttaagttaacatgcaaagagaattttggctactttttgtttggagtcaaatataaaactaaacaacatgtgcccagatttcctaccatggatttgcaaaagatattttgaaacctttcttggcaaaaatcatattctgttatgattcagtgttgcactgtaaacagagtgtttagaaattggggtttgagaagtgtaacggctagtttccttaaaaaaaaaaaagattcaaatgcttggtttgcggctggagctttttgtaaattaatcaaattgagtgcagtgggaggggtgattcattaagtagagagctagtgaagacatatcctgtgaaaggcagtgggctaagtggtagggggagaaggaagatacagagtgctttcaaaagtgcctaaatgtaagtcaacagggcagtgtgccaattacaatgttataatgttctacagaagagggatgtacaccaagaatgccagcctggacctctggtgtgtcttggaagacttaaccaggaaggggacgattcrtttctatttgacccaagactgatgctgcgtggtgaaggagaggaactgcgttccaggcagaggaagtccagatgcgcaagagcagagatgggagggacagcacagtggcttctcagaattgaatatggtgttagacttctaaaagagctgtggtagagggagaaaactgtcaaaggaaatcagtaactgttaaaggaaaataccttaaacgtcctgttttcaggctgactaatgccttaggggagcaaatgagcaacagaaacgatatgagcaactgctgttctttcaaaatacccaggcagaggaaccggcagacgatgggcaggcaagtaagagggctattagttccctagaaaagtggagaggcatatttaacaagtaagaagtat

SEQ ID NO: 714860 - DNA, 1174 bp, Homo sapiens
  misc_feature 98, 99, 100, 101, 102, 103, 104, 105, 106, 107, 108, 109,110, 111, 112, 113, 114, 115, 116, 117, 118, 119, 120, 121,122, 123, 124, 125, 126, 127, 128, 129, 130, 131, 132, 133,134, 135, 136, 137, 138, 139, 140, 141, 142, 143, 144: n = A,T,C or G
  misc_feature 145, 146, 147, 148, 149, 150, 151, 152, 153, 154, 155, 156,157, 158, 159, 160, 161, 162, 163, 164, 165, 166, 167, 168,169, 170, 171, 172, 173, 174, 175, 176, 177, 178, 179, 180,181, 182, 183, 184, 185, 186, 187, 188, 189, 190, 191: n = A,T,C or G
  misc_feature 192, 193, 194, 195, 196, 197: n = A,T,C or G
aacagagtgagactctgtttccaaaaaaaaaaaaaaaaaaaaaaaagaaaagaaatagtaaaaacaataacctgttaatcagtcttatccctgtgagnnnnnnnnnnnnnnnnnnnnnnnnnnnnnnnnnnnnnnnnnnnnnnnnnnnnnnnnnnnnnnnnnnnnnnnnnnnnnnnnnnnnnnnnnnnnnnnnnnnnagagagagagagagagacagagagagagagagagagacagagagagagtatatagtatatatacataactcctgacctcgtgatccacctaccttggcctcccaaagtgctaggattacaggcgtgagtcaccacatccatccggtaatttttttttaaactctctcttgtacctgtatcttatgtttaaccgaaaaaggttgaaaattgagttgctagacttaatcattattttccctggctgaagggatagtgggaggggtcaagcctctaaaagggagatatctgggccaggcgccgtgactcacacctgtaatcccagcactttgggaggccaaggcgggtggatcaaaaggtcaagcgatcaagaccatcctggccaacatggtgaaatcctgtctctactaaaaatacaaaaattagctgggcgtggtggtgcatgcctgtagtcccagctacttgggaggctgaggcaggagaattgcttgaacccaggaagcggaggttgcagtgagccgagataatgccactgcactccagcctggtgacagagcaagacagcaagactccatctaaaaaaaaaaaaaaaaaaagcaatctctgcacactggcagcaatgtgaataaataaaaggactaaggattactgaatatttgtcarttaaagaaaagccaactcagtgtctataagaataaatcattcttgactattctttcagaaggaaagcaaatttacagagaaaggggagaaataatgaatttatttgatttttggaaaaatctttgaaaaattttcacaccaatagctattccttagttgagttagcctagggtttcactatgagaaaagaattaacatcaaggtagtagggcagagacattattaaatggagaagtgtaaattgtggtatttcctgaggaagcaattctgggtcagtccaatttaatggtttattatgttttggaaaagacagtaaa

SEQ ID NO: 714861 - DNA, 1125 bp, Homo sapiens
cccatacatgcctttatatttttagtatgttacatatatatgtgtgtgtgtatgtgtgtgtgtgtatgtatgtgtgtgtatatatatatgtatgtatgtacacatatcaacacataatgttaggcatgggtattaggcctggccttgtcactgactttgaaatttgcttctttgggcatcttcttctcctctgggagttggagattccagtgtgtagcccagttcaagaatcatgactcagagacctagatgatttttaaggcacctctcaccctcatattcattgatttggtctccttaacaaggtttgtgttaaacataggcaatagatgtggtcacccatgtcaccaacttgaggtaccagagtagtttttagattccttagatttcgttaacatacttgtcactgaggtcttcagaagtccttttttttctttttaactttttttttttttttgagattgggtcttactctatcgccctggctggagtgcagtggcacaatcatggctcactgcagccttgacctccctgtgctcaggtgatcctctcacctcagcctccctgattagctgggaccacaagcacgcaccaccatacctaattttttttttttttaatttgtagagatgaggtcttgccatgttgcccaagctggccaaagtcgttattaaaaggatttccctctgggaagggaaattcattaaatcatagatccccaaccattttggcaccagggaccagtctcgtgggaaacaatttttgcacagatggtttggttgggggcgaaatggtttcaggatgaaacttccacctcagatcatcaggcaatagttagattatcataaggagcgtgcaacctagattccttgcatgcacagcacaatagggttcgcactcctatgagaatctaatgctactgmtgatctgacaggagctggagcccagagcaagggcggtaatgctcgcgtatagctcacctcctgctgtgttgcctggttcctaacaggccatggaccagtactggtccactgtattgtgctgtaaaggagttggggactcctttattaaatgatcattaattagcattttggttagatggaatttgttggatttattttatta

SEQ ID NO: 714862 - DNA, 900 bp, Homo sapiens
attaaatttgatttttctcatgtagttccagctaacctcacctataaatgaataaagcatttgaggattcagtctggcaaatgcagagcaggtctgcagaacagacatattaacaaattgttttggaagtggagcagcagcaggatgggagattgaaaggggttgggatataggtgacgaacagcacagacacactggtgttgcaagtgctttttccttcttttgactggtaagagcttctattgatagctcattttaataaatggtacttccttgcaaaattctctatctttctttttcataagagctaggaaagttccgtatcaattccttgtttggacttccacttcctcccccaaagggcaaaattatgatctaatttatttaaatgagcattacccaataaggttggctctgtttagcatgactgcctgcagtctcaaagtattcacagacctgctcagttttagccttagggatagatggagtcagggctatgactgcagaaatcacggtagatgttgccttccctgatcatagatttccactattaatagttcattactgtagctttaaactagataacccacaatttaaaggttgcttttcctcttaaatttwaaaaaaaaattaagatgaaaaatagtgtgattcttttctttacaatttttaaattaggtcccaagaaaaatgtgctagagatgggtgtcattgttgggaaatgggaaatggaaaagcatgggagaagtagaactatgaagctaaaaagtttgtgtaatttcccaagtttaccttgagctggctttgaccttagggtaaattacccatggttgtcgccataaacctgcaacccattactgcacagactgaattaagatgaggtctgtaataaactctgct

SEQ ID NO: 714863 - DNA, 645 bp, Homo sapiens
acattccagtcacctggggtttcatgcctagagattctaatttagtaggtctgggagaaagacccaagaatctgtatttcttaaaaaagacaccaaatcttagttttctcttgctatgactgagaaaagtaataatatccatgtggtaggaaaatggtgagaagcaaatgaaataatgtctataaagcacttagcatagtttctagcatacaagaattgcccagtaaatattaggtgttattcctctttccctttgtaactttggatagcacatatttgtagttggtaggctaaatttggctgataaacaggactttccatatgtgaattagacacaaatatttgcaattaggggatttctaccttctcttgaaaaacaaagagacctagcaacaccaagccagaracaatttacagtggctgtgtctggacattggctgttcctttagctgtgggttctccatttaaaacagtcctcactcaatcggcttcaccgatctacacttcttgtttggctcccataggcatttgggtttgtagatttctgttgtatgccctaattaagcctctctatccagagttttagaagagctaacagactattctttcatgttttattttagctattctagatcaattaacagt

SEQ ID NO: 714864 - DNA, 690 bp, Homo sapiens
actaaagcctacatgttgcctttaaaaaaatattgatttgcctcttggaagagaactccaaagccataattgtctgattttttatttagcttgggctaaaaggcaaatcctctacatatgaacatgccaatgccctccaaaagagctctttagccaaaccagtttctctttgccagaaatcaaaaggagcacaaagctttttaatgttccaggtttcagaagatgtaaaacaacgatatttgtcaaaatcaaattgggtttatttcctgggacgccatctgtccagaggtctaagaccactttagaatataaagattcccattctcatcccrtgtgaccctgcctctcatcctctgaggactcctaggtgaaagaggctaagctctctggattcagcttcaccatctgcactcatggaaaaattcagtgtttttattttagtttgctgtatttattttaatttgttgtaatattcaataaaactaaaacaaagtttgaagaaaggtgatctgttctctcttttgttcgaacagttggtgaaaggggtctcaagcggtgatgtgtgcatctccagagactaacactagttaccagttactacttccttccaatcccagaaattctgacctgccagttattaataatacttccaacccgttagcatcggctaatcagaggcacctggcatct

SEQ ID NO: 714865 - DNA, 646 bp, Homo sapiens
aggaggcggaggttgcagtgagccgagattgcgccattgcactccagcctgggcaagaagagtgaaactctgtctcaaaataaataaataaataaataaaaatttaaaaagactgaaaaccagtttattgtaagaaggaaacaataatcttcctctagggaaaacactatctaaagggaggagcctaggatttattttgatatgaggtacaaggcaaagacaattctaaactcatctctccttaaacatttccatttcttttcacattgcaaaacaggcgtgttacctgaaaaccacctccccctaaaggtgtgcatttcttttacaacttccagtgaacttaattggatatttccaaaagatatcttaaagcctaaaatatgaatgttcttgaacaaatcttttaataactagagtcaacatgttgcctttaaaaaatgttgatttgccagacactctgaaatgtaaatacaaatttaagaacacagaattgkgaatccctactctgaaatcttagctctgctctcctagacattgactcttcttgtaccattccagaaggaacaaaggctgagctggtttgaaggtgaaattatcctccaggagcttatactagactccacagaaactggaaatgggacttgca

SEQ ID NO: 714866 - DNA, 1532 bp, Homo sapiens
caccccagtctctgcacctgcttctctgcgcgctccccctggaagtgtgagctgctgggcgagccacacccctgccgcacttcctgtgaggggactcagggaactctcccattttaataccaagggagagccctgcccatccttccccgtcctgcgcctcctctgggggagaaggggagagggagtttctggacatgggtggatgtgtgggagaaagacccatctcctttcccttacarcatggaggaaaaattacagaagggcaaggaagaggagaagggccagcaaggaagacgtcacgttcaggccagtctctgcagtcttgcccaggtggggctgaggcgctctttcccgctgcttcctccagctcctggcagccgcctggctaatttggaagcaagggtctccaaggccagggagctgcctgaggtcccctgggacactgcgcggcagtgagacgcctccatgcccggtgctctggctggctagaaccacctctcctgcgacgcgcacctgtgctggaggtgctcagaacccgcgagtctcctccctcatctcctggggccctgtggagtgggtggtcttcggtctccatcggaagcctaatgagtgtggtctggcttctgggaaaccctctttttctattatcccctctgctgccaccacgggagacctgagcatctccccttggccttcaattttaggttcatccaggtttcttctggcatacctgcaaggcagattgtagatcaacttggaggtgaccctgctgaggacactccagagatccccaggggccagagacagaggctggagccggtagccgtggggaattttagcctcaggggctaattctgctggtcccctgtctatcagagctgtccagcacgaagcagctgcaaatggactcacccaggaggaaactggttccgcctgaggtactacgattgctcatattttgagggacatggagaggcgacaaggactcgctgtgaggctgtgctgggccctggcatccctcagctacccgggggatgggagaggagcaggcactcacagcactgtgggagtgaggcccacaaggatttctagtgcaggtggggccagatggtgaagaagtgaagaagaaaatgagaaaaatataaagaaaagggaaaaaaaatgaatgagaagaaaagaaaaagataaatcagaagtaaaaggggagaacaaagaataagaagacaaaagagaagaaatcaaaaatcaaggaaataaaaagactaaaggcaaaaaagaaaaagcatgaagaaaaagaaaatataaaaagtaaaatgagaataatgaaagaataagaaaaaaaagaaaaaataaaaatggagagaaataaagtacaaagcaaaattagaaaaagatgacaatagaaataataattggaaagctaataataatactaataacaataacaatcaaaagcctcagaatgtcaatgtgatgtctgcaaaagaagaagccagctgactttggtcacatccctcaggtagctatcacca

SEQ ID NO: 714867 - DNA, 657 bp, Homo sapiens
aaggcatgtgagtttgttgctcatgctatggctttgaaaggtgcacaatattttccatatcacttccatacttccctaagtcacctattataaaaagccaaaagcagaccacagtggtttgcaactccatagttaataatttaaaaaattcacatggcttagagggagtgagaaagaagaaaattcagactggtggaagggtaacataattacatagggttaaaagtctatctgaaagcttttctgggagtgagaaaaaaggtgaacgaacacaaaaacattgttgaaacactaaaagctttcctgattgaacactgttactctctggtggttccttaccacattccatgcttcagaaacttccttcctactttgtatgtattaatataatagctgttaggtcatacacgctgagaaatattgggaaaatttataaaacacatttacatcatcagaaataattcttctcacactttttttttttttttttacaccagtcttggtccactttcaaatcccttcccaagtattttctactgctttccgctttatattcaaatgacaactgcagtcctgggtttcaggmctgaacttcaatcctggacaggctctctaatacagaaactcttttggccgttatggctgcattctttatta

SEQ ID NO: 714868 - DNA, 611 bp, Homo sapiens
aacacggtgaaaccccgtctccactaaaaaatacaaaaaaaatagccaggcgtggtggcaggcacctgtagtcccagctactggggaggctgaggcaggagaacggygtgaacctgggaggcgtagcttgcagtgagccgagatcacgctactgcaccccagcctgggcgacggagagagactcgtctcaaaaaaaagaaagaaagactgacagggtatagaatatgactagggatgaaggaaagggtaagatacttcagggtgggatggggattttgttttgtaaggactttggtatttatctaggagcaatgggaaggcatttaaagattttaatcaggggtgtaatctgatgagatctgaatttttaaaggttctctttgcctgcagcttagagaagggactggggagaaagggcacaggagtggacatcatgagtccagttgggagactaatgcaaacacagtggtggcttagaaaggatgtggagagaaatggtggatgaataaaaccattcatttagtgcagagctaaatgaatgtggaggtgaagtgcggggaagtatcgcagataaacttccaagtgtctggcttagcactgggtggcttgtg

SEQ ID NO: 714869 - DNA, 3456 bp, Homo sapiens
gggactaaacacacctattaattaatttatcgatctggagaactactaaccaaagccctttgtcagttatagttagtgagcagcagtgtagctactggattcctcgcattatccaagtttctagrcacagagaacccattgcagacatagattgagtctgcataatagcaccagtgtattttagaaatagcaaaacataacaaagtgaagatggtgatggggaattttaaaggtgaagttttaacacaatattaagaagagccacagccctttgttaggacaagcacaaaaatttgtttttgttaagctatgcaaatagaactaatttacacaaagtgatgaaattactgcatggtacacatgacttttgtgtccttggtagggataaaatctttccatttggggaaagtttggattctggttgtctcctgggagggaagtgatggaggtggatatgtggagggccttttctctgattcctctactaaccaggtgtcacctatccaatttggaaaatagaatgtttacagttaaagaattatttgacttagtttgctccagtttcaagtgtgggaacatgcagggacaggcaattttcccagaatctgctgcctgaataaggagatactcagtttgcagacctgcagaaataagaaatcaagtcctaagtaggaaggagatgtttccttgcaacaaatacttatgaagcatctttcatgtggcagtcttggagcacaaaaacagaccataatatctgccctccctgagtaaatagcctatgggggaaaataagggcagattcacccgcaccgcacctcagaagctagtcatagcattggaggagacaaaggacttaataatttggtgattttatagtaatgattttctgctcaaataactcttgcttggggaatggaggcagagagagccttttcgtttatgttccacagcttgacaaccttcaggagccatggcagtgtggggagttctggtaaagcccttttagaatggaaagcttttcttctgagccatccaagtatcattcatcagcaaatatttcctgagcactttctctgtgttactgaatctccaccccaatgctatagacgggcgttttcccctgagctccattttgcagatgggttggagaagtaaaatgtaggcaatggaggtggaattttaattttaaattttaaagcaagaaatttaacaagatgtgtttttttctaaaccccttctaaagacaacattcttactccagcctagacatgctgcctctttagaagtcccctaggcatcattctagtaaagcatcttcatcttagatgtggaaactgagacccaggcaagtcagattatgtctgatttgagtccaaaaatatttatatgccaagaacaatgccaaaagaatccctgccaagccagctgggttgcacactcacacccacatacagtaggctattataacccagaggtctgcacacacgtggtgagagcacaggcccacaacagatcctaaagattgatttgaccaagtgccctctactaagcagtcatccaatgaaggaagcccccagtaatatttacataatcatttttctcctctaatgctttggaggcaacatcttttctgccaggactgcagagttaattttaagggtcctaatctccactcactttggatcacgagccagatagggatataaatctaaaaataattggattctgaacctcagcccagagccaggacaaggcagcagatggagactgagagtgtaaaggctgcccctctctcaatgccagggtttgttcaaggaagtgtctgaaggaagaaccaggactcctttcctctggtttgaagagaaggagaataaagaagcaggatgaggaggtggtgaggatgataaaggcacagttaaagttgaatgtcccagggctttttttgggtgagggaggagtctgataagtcagtggagaatgtcatcaaagaactttctattcattaattcattcatggagcaatgggaaaaatatacgcagatgttccttgactaaccatggtgttacatcccaataaacctattgtaagttgaaatatcataagtggaaagtgcatttaatatacttaacttatctaacttcatagcttacctagtctgcctcaaacatgcccaggacacttacattagcctatagatgggcaaaatcatgtaacactgatatggtttggctgtgtcccaactcaagttttatcttgaattgtagttcccataatccccatgtgtaatgggagggaccaggtggagataattgaatcatgggggtggtttccccatcctgttctcatgatagtgtgttagttctcatgagatctgatggttttataggggcttcccccttccctgggcactcattcttctcttttctgccaccttgtgaataaagacatgtttgctccccttctgccatgattgtaagttttctgagtactccgaagccctgaggaactgtgagtcaattaaacctctttcttttataaattatgcagtcttgggtatgtcctgatagcagcatgagaatggactaatacaaacacaaagcctattttataataaagtgttgaatatttcatgtgatttattgaatattgtactagaagtgaaaaacagaattgttgtatgggtacttgaattaggtttctactgaatgcatgggacttttggaacatcataaagttgagtcatcttaagttgaggaccatctgtatttccagttttaatttttttagttgcaaagtctgtaatgtagaggaaatcatattatagatatatcccatatttgtaagcacccttccctccctcatttctagaaatctgagttcaggttctatctcctgtttattttgtgtgactttgaataagccattgataccgtaacttttaagctcttcacctgtaggactgataaccactcctgccttgctcctgtaccagtctttagaacaatcaataatgggttggaaataaaaccacagactccgtgaggaaaccacagagcaactacactcaaagtgagtagaggttgggagccctaaatttcactctgcagtgatggtgaatatagatgttacttccagagcactggaggagaaaagagattatgtaaatattaccagggactaactttgttgcattgatgctgaaagatcatgactgactcattgattgctgtttccaaggtgccattcacagtgctttgcaaagagtagaccaattctattggtgaaggatagaatgaaatgctcagatatctatggagtgttcatttattagtatttaaaacaccttgtacatttgaactcacattgttagcctgtgaacacatacatgctttgtgactatcttgtcagacacagaaaaaaatcaaagggtaaaacaggagatgcttctaacgtaa

SEQ ID NO: 714870 - DNA, 3456 bp, Homo sapiens
gggactaaacacacctattaattaatttatcgatctggagaactactaaccaaagccctttgtcagttatagttagtgagcagcagtgtagctactggattcctcgcattatccaagtttctagacacagagaacccattgcagacatagattgagtctgcataatagcaccagtgtattttagaaatagcwaaacataacaaagtgaagatggtgatggggaattttaaaggtgaagttttaacacaatattaagaagagccacagccctttgttaggacaagcacaaaaatttgtttttgttaagctatgcaaatagaactaatttacacaaagtgatgaaattactgcatggtacacatgacttttgtgtccttggtagggataaaatctttccatttggggaaagtttggattctggttgtctcctgggagggaagtgatggaggtggatatgtggagggccttttctctgattcctctactaaccaggtgtcacctatccaatttggaaaatagaatgtttacagttaaagaattatttgacttagtttgctccagtttcaagtgtgggaacatgcagggacaggcaattttcccagaatctgctgcctgaataaggagatactcagtttgcagacctgcagaaataagaaatcaagtcctaagtaggaaggagatgtttccttgcaacaaatacttatgaagcatctttcatgtggcagtcttggagcacaaaaacagaccataatatctgccctccctgagtaaatagcctatgggggaaaataagggcagattcacccgcaccgcacctcagaagctagtcatagcattggaggagacaaaggacttaataatttggtgattttatagtaatgattttctgctcaaataactcttgcttggggaatggaggcagagagagccttttcgtttatgttccacagcttgacaaccttcaggagccatggcagtgtggggagttctggtaaagcccttttagaatggaaagcttttcttctgagccatccaagtatcattcatcagcaaatatttcctgagcactttctctgtgttactgaatctccaccccaatgctatagacgggcgttttcccctgagctccattttgcagatgggttggagaagtaaaatgtaggcaatggaggtggaattttaattttaaattttaaagcaagaaatttaacaagatgtgtttttttctaaaccccttctaaagacaacattcttactccagcctagacatgctgcctctttagaagtcccctaggcatcattctagtaaagcatcttcatcttagatgtggaaactgagacccaggcaagtcagattatgtctgatttgagtccaaaaatatttatatgccaagaacaatgccaaaagaatccctgccaagccagctgggttgcacactcacacccacatacagtaggctattataacccagaggtctgcacacacgtggtgagagcacaggcccacaacagatcctaaagattgatttgaccaagtgccctctactaagcagtcatccaatgaaggaagcccccagtaatatttacataatcatttttctcctctaatgctttggaggcaacatcttttctgccaggactgcagagttaattttaagggtcctaatctccactcactttggatcacgagccagatagggatataaatctaaaaataattggattctgaacctcagcccagagccaggacaaggcagcagatggagactgagagtgtaaaggctgcccctctctcaatgccagggtttgttcaaggaagtgtctgaaggaagaaccaggactcctttcctctggtttgaagagaaggagaataaagaagcaggatgaggaggtggtgaggatgataaaggcacagttaaagttgaatgtcccagggctttttttgggtgagggaggagtctgataagtcagtggagaatgtcatcaaagaactttctattcattaattcattcatggagcaatgggaaaaatatacgcagatgttccttgactaaccatggtgttacatcccaataaacctattgtaagttgaaatatcataagtggaaagtgcatttaatatacttaacttatctaacttcatagcttacctagtctgcctcaaacatgcccaggacacttacattagcctatagatgggcaaaatcatgtaacactgatatggtttggctgtgtcccaactcaagttttatcttgaattgtagttcccataatccccatgtgtaatgggagggaccaggtggagataattgaatcatgggggtggtttccccatcctgttctcatgatagtgtgttagttctcatgagatctgatggttttataggggcttcccccttccctgggcactcattcttctcttttctgccaccttgtgaataaagacatgtttgctccccttctgccatgattgtaagttttctgagtactccgaagccctgaggaactgtgagtcaattaaacctctttcttttataaattatgcagtcttgggtatgtcctgatagcagcatgagaatggactaatacaaacacaaagcctattttataataaagtgttgaatatttcatgtgatttattgaatattgtactagaagtgaaaaacagaattgttgtatgggtacttgaattaggtttctactgaatgcatgggacttttggaacatcataaagttgagtcatcttaagttgaggaccatctgtatttccagttttaatttttttagttgcaaagtctgtaatgtagaggaaatcatattatagatatatcccatatttgtaagcacccttccctccctcatttctagaaatctgagttcaggttctatctcctgtttattttgtgtgactttgaataagccattgataccgtaacttttaagctcttcacctgtaggactgataaccactcctgccttgctcctgtaccagtctttagaacaatcaataatgggttggaaataaaaccacagactccgtgaggaaaccacagagcaactacactcaaagtgagtagaggttgggagccctaaatttcactctgcagtgatggtgaatatagatgttacttccagagcactggaggagaaaagagattatgtaaatattaccagggactaactttgttgcattgatgctgaaagatcatgactgactcattgattgctgtttccaaggtgccattcacagtgctttgcaaagagtagaccaattctattggtgaaggatagaatgaaatgctcagatatctatggagtgttcatttattagtatttaaaacaccttgtacatttgaactcacattgttagcctgtgaacacatacatgctttgtgactatcttgtcagacacagaaaaaaatcaaagggtaaaacaggagatgcttctaacgtaa

SEQ ID NO: 714871 - DNA, 661 bp, Homo sapiens
taattcacagaggcagtttcctcaaatgtgaattatgcgtctagataataccactgggttgcttcccaacagttcagggtggtcttcagacatactaatctcaataggatagactctggtaggctctgaaattagagtaaaatatcataaatgtttaacttacatgagcttaactgtacctattagattttttttaaaaaagtaagaaaaatcttaaaacagagtaagcaattctgcctgccttttcactcaaagrgaaaatgcccaatgatgagaaagtgatcctgatactttaacacttggacttagtttttgcatgcctcttgcagtgcaaccacctttcatgacatttaattgtagtttttaaaggtatgaatttaatatacatcagggtcataaatgcaagatgctaactaaagaaacagtcatctatcccaatgctggaaaaagcgtaggctgtgttgggattatcgagaaatgggaatatcatggcatcttccaaagattctaccatctacttattacctacaactttgaacaaattttaacaactaagacttctctctgtctcagttcttcatttgtgaaatagagaaaataacagtatctacctcaaagagtttctgtaagaattaatgcagctagtgcatagcaagtacat

SEQ ID NO: 714872 - DNA, 2201 bp, Homo sapiens
tgtgtgtttccatcttagtgacatttagtacaacccaaacaacttgtttcctactttatatgttattggtgttaggtatyagagttctattttactgtatatttagctttacaatatgtcattagtagctgtttatttagtaaatatttataggttttgctttctttgtccatcatttcttcttgcattttagtcttttcatctagaatcactttctttctacctgaaaaggcttcttagtggaagggtgttgttgcaaactctggccctttttattttctaaaacaactttagttcatattcatttttgaaagatatgtttagtgaatatacaactctaggttggctgttgtttcctttcagtaatttggagatattctatgatcttttgacttcaactgttgctgttgagaaatcattcatcattctacttgtttctttttggatagtcttttcttctggccatttttaagacttctttgtgtctagatgtgtttgaatgtcaacttgtttttatttattctgcatggaagttgggcttttggactttgaagataagtgtttttcattaacattctaaagttctgaaaatttctcaacttttattgcttgggatactgtctctttcattatttccctgttctgcttctggaatcccatatattagatctactcgctctattttacctgtcttttttattgttattctacatacttctttttttatcttcctacactagattctagataattttttaaaaattttattcctgttctctcctcagctatttttaatattctactgtgtgtatatgtgtatttatgtgcgtgtgtgtgtatttgcatgtgtgtatatattatacatagaacaagagatagttctaaatttattttaattatgtatttttattactgaaagttatttttattatttattctgttagtatagtgtcttgctcttattcatcttttttattcccccttacttctttaaaaagttgtttaaatgtattaggtatcactattttctgtgtatgtctgataattacaactgctcaagtttttacggatctaattctttcttattttgttgctactgactctgatttatagagcaaactggaataatgttctcaacattatcacattctatattgaaatactctaatttctgctttcaactcagaacatcttcagactttgtattaaagtattgattttcaaacttccttatttgtagaaccctttttaaaaggaagttttacaccacacaataatatatacattttaaagttaattttattcatataattgctttacataagtttaaaacatttgttacacatttaatcagataagtctattctaaggaatatttttagtgagtgccttcaaaaagcttaaacatttgtcagatggcataatgactagttggatggatgatttatttagagaagctcgaaaggttcaataaatagcacatagggaaaaagtcaatagcaaaccactttactttagcacaaacaggagaaagtcctcttaagatgactctaaggtcagataatcaccattacccttctctaaccttcatctgttgctaataactaattcaatcacacacaaacaaagtaataacatttgacacaaacagaattaataacttcttttttcacttggaatgtttctaatttagtagaactaatatgaaaatgcaatagtgcatttcttaaaaacaaaacataatcaacaggactcttaattttcagctttaattgctatttttattgagttcacttttggaatttaccattttttagaagaataaattctaaataactttactattgtcattcatagtgtattaggcttgaaacgctcaatgataggaagccatgcacaaataatttgatactgttaatggaacagcctcattaattcaatcaaacaagttagaactatctcagtttgctcaaagctgacaaatcaatattaaatatacagacacagcttcagagaattgattctactcctcctactcttagaatcattccaggtataggtgtattattctggaaagaaacccaacacacaaaatgttaacctccaaaaccacaaagcaagcatgcaaagggtaatatttcttttttcaaatttttatctacaattggtttccctcttggtacttggaatgctctcctcag

SEQ ID NO: 714873 - DNA, 2201 bp, Homo sapiens
tgtgtgtttccatcttagtgacatttagtacaacccaaacaacttgtttcctactttatatgttattggtgttaggtatcagagttctattttactgtatatttagctttacaatatgtcattagtagctgtttatttagtaaatatttataggttttgctttytttgtccatcatttcttcttgcattttagtcttttcatctagaatcactttctttctacctgaaaaggcttcttagtggaagggtgttgttgcaaactctggccctttttattttctaaaacaactttagttcatattcatttttgaaagatatgtttagtgaatatacaactctaggttggctgttgtttcctttcagtaatttggagatattctatgatcttttgacttcaactgttgctgttgagaaatcattcatcattctacttgtttctttttggatagtcttttcttctggccatttttaagacttctttgtgtctagatgtgtttgaatgtcaacttgtttttatttattctgcatggaagttgggcttttggactttgaagataagtgtttttcattaacattctaaagttctgaaaatttctcaacttttattgcttgggatactgtctctttcattatttccctgttctgcttctggaatcccatatattagatctactcgctctattttacctgtcttttttattgttattctacatacttctttttttatcttcctacactagattctagataattttttaaaaattttattcctgttctctcctcagctatttttaatattctactgtgtgtatatgtgtatttatgtgcgtgtgtgtgtatttgcatgtgtgtatatattatacatagaacaagagatagttctaaatttattttaattatgtatttttattactgaaagttatttttattatttattctgttagtatagtgtcttgctcttattcatcttttttattcccccttacttctttaaaaagttgtttaaatgtattaggtatcactattttctgtgtatgtctgataattacaactgctcaagtttttacggatctaattctttcttattttgttgctactgactctgatttatagagcaaactggaataatgttctcaacattatcacattctatattgaaatactctaatttctgctttcaactcagaacatcttcagactttgtattaaagtattgattttcaaacttccttatttgtagaaccctttttaaaaggaagttttacaccacacaataatatatacattttaaagttaattttattcatataattgctttacataagtttaaaacatttgttacacatttaatcagataagtctattctaaggaatatttttagtgagtgccttcaaaaagcttaaacatttgtcagatggcataatgactagttggatggatgatttatttagagaagctcgaaaggttcaataaatagcacatagggaaaaagtcaatagcaaaccactttactttagcacaaacaggagaaagtcctcttaagatgactctaaggtcagataatcaccattacccttctctaaccttcatctgttgctaataactaattcaatcacacacaaacaaagtaataacatttgacacaaacagaattaataacttcttttttcacttggaatgtttctaatttagtagaactaatatgaaaatgcaatagtgcatttcttaaaaacaaaacataatcaacaggactcttaattttcagctttaattgctatttttattgagttcacttttggaatttaccattttttagaagaataaattctaaataactttactattgtcattcatagtgtattaggcttgaaacgctcaatgataggaagccatgcacaaataatttgatactgttaatggaacagcctcattaattcaatcaaacaagttagaactatctcagtttgctcaaagctgacaaatcaatattaaatatacagacacagcttcagagaattgattctactcctcctactcttagaatcattccaggtataggtgtattattctggaaagaaacccaacacacaaaatgttaacctccaaaaccacaaagcaagcatgcaaagggtaatatttcttttttcaaatttttatctacaattggtttccctcttggtacttggaatgctctcctcag

SEQ ID NO: 714874 - DNA, 2201 bp, Homo sapiens
tgtgtgtttccatcttagtgacatttagtacaacccaaacaacttgtttcctactttatatgttattggtgttaggtatcagagttctattttactgtatatttagctttacaatatgtcattagtagctgtttatttagtaaatatttataggttttgctttctttgtccatcatttcttcttgcattttagtcttttcatctagaatcactttctttctacctgaaaaggcttcttagtggaagggtgttgttgcaaactctggccctttttattttctaaaacaactttagttcatattcatttttgaaagatatgtttagtgaatatacaactctaggttggctgttgtttcctttcagtaatttggagatattctatgatcttttgacttcaactgttgctgttgagaaatcattcatcattctacttgtttctttttggatagtcttttcttctggccatttttaagacttctttgtgtctagatgtgtttgaatgtcaacttgtttttatttattctgcatggaagttgggcttttggactttgaagataagtgtttttcattaacattctaaagttctgaaaatttctcaacttttattgcttgggatactgtstctttcattatttccctgttctgcttctggaatcccatatattagatctactcgctctattttacctgtcttttttattgttattctacatacttctttttttatcttcctacactagattctagataattttttaaaaattttattcctgttctctcctcagctatttttaatattctactgtgtgtatatgtgtatttatgtgcgtgtgtgtgtatttgcatgtgtgtatatattatacatagaacaagagatagttctaaatttattttaattatgtatttttattactgaaagttatttttattatttattctgttagtatagtgtcttgctcttattcatcttttttattcccccttacttctttaaaaagttgtttaaatgtattaggtatcactattttctgtgtatgtctgataattacaactgctcaagtttttacggatctaattctttcttattttgttgctactgactctgatttatagagcaaactggaataatgttctcaacattatcacattctatattgaaatactctaatttctgctttcaactcagaacatcttcagactttgtattaaagtattgattttcaaacttccttatttgtagaaccctttttaaaaggaagttttacaccacacaataatatatacattttaaagttaattttattcatataattgctttacataagtttaaaacatttgttacacatttaatcagataagtctattctaaggaatatttttagtgagtgccttcaaaaagcttaaacatttgtcagatggcataatgactagttggatggatgatttatttagagaagctcgaaaggttcaataaatagcacatagggaaaaagtcaatagcaaaccactttactttagcacaaacaggagaaagtcctcttaagatgactctaaggtcagataatcaccattacccttctctaaccttcatctgttgctaataactaattcaatcacacacaaacaaagtaataacatttgacacaaacagaattaataacttcttttttcacttggaatgtttctaatttagtagaactaatatgaaaatgcaatagtgcatttcttaaaaacaaaacataatcaacaggactcttaattttcagctttaattgctatttttattgagttcacttttggaatttaccattttttagaagaataaattctaaataactttactattgtcattcatagtgtattaggcttgaaacgctcaatgataggaagccatgcacaaataatttgatactgttaatggaacagcctcattaattcaatcaaacaagttagaactatctcagtttgctcaaagctgacaaatcaatattaaatatacagacacagcttcagagaattgattctactcctcctactcttagaatcattccaggtataggtgtattattctggaaagaaacccaacacacaaaatgttaacctccaaaaccacaaagcaagcatgcaaagggtaatatttcttttttcaaatttttatctacaattggtttccctcttggtacttggaatgctctcctcag

SEQ ID NO: 714875 - DNA, 2201 bp, Homo sapiens
tgtgtgtttccatcttagtgacatttagtacaacccaaacaacttgtttcctactttatatgttattggtgttaggtatcagagttctattttactgtatatttagctttacaatatgtcattagtagctgtttatttagtaaatatttataggttttgctttctttgtccatcatttcttcttgcattttagtcttttcatctagaatcactttctttctacctgaaaaggcttcttagtggaagggtgttgttgcaaactctggccctttttattttctaaaacaactttagttcatattcatttttgaaagatatgtttagtgaatatacaactctaggttggctgttgtttcctttcagtaatttggagatattctatgatcttttgacttcaactgttgctgttgagaaatcattcatcattctacttgtttctttttggatagtcttttcttctggccatttttaagacttctttgtgtctagatgtgtttgaatgtcaacttgtttttatttattctgcatggaagttgggcttttggactttgaagataagtgtttttcattaacattctaaagttctgaaaatttctcaacttttattgcttgggatactgtctctttcattatttccctgttctgcttctggaatcccatatattagatctactcgctctattttacctgtcttttttattgttattctacatacttctttttttatcttcctacactagattctagataattttttaaaaattttattcctgttctctcctcagctatttttaatattctactgtgtgtatatgtgtatttatgtgcgtgtgtgtgtatttgcatgtgtgtatatattatacatagaacaagagatagttctaaatttattttaattatgtatttttattactgaaagttatttttattatttattctgttagtatagtgtcttgctcttattcatcttttttattcccccttacttctttaaaaagttgtttaaatgtattaggtatcactattttctgtgtatgtctgataattacaactgctcaagtttttacggatctaattctttcttattttgttgctactgactctgatttatagagcaaactggaataatgttctcaacattatcacattctatattgaaatactctaatttctgctttcaactcagaacatcttcagactttgtattaaagtattgattttcaaacttccttatttgtagaaccctttttaaaaggaagttttacaccacacaataatatatacattttaaagttaattttattcatataattgctttacataagtttaaaacatttgttacacatttaatcagataagtctattctaaggaatatttttagtgagtgccttcaaaaagcttaaacatttgtcagatggcataatgactagttggatggatgatttatttagagaagctcgaaaggttcaataaatagcacatagggaaaaagtcaatagcaaaccactttactttagcacaaacaggagaaagtcctcttaagatgactctaaggtcagataatcaccattacccttctctaaccttcatctgttgctaataactaattcaatcacacacaaacaaagtaataacatttgacacaaacagaattaataacttcttttttcacttggaatgtttctaatttagtagaactaatatgaaaatgcaatagtgcatttcttaaaaacaaaacataatcaacaggactcttaattttcagctttaattgctatttttattgagttcacttttggaatttaccattttttagaagaataaattctaaataactttactattgtcattcayagtgtattaggcttgaaacgctcaatgataggaagccatgcacaaataatttgatactgttaatggaacagcctcattaattcaatcaaacaagttagaactatctcagtttgctcaaagctgacaaatcaatattaaatatacagacacagcttcagagaattgattctactcctcctactcttagaatcattccaggtataggtgtattattctggaaagaaacccaacacacaaaatgttaacctccaaaaccacaaagcaagcatgcaaagggtaatatttcttttttcaaatttttatctacaattggtttccctcttggtacttggaatgctctcctcag

SEQ ID NO: 714876 - DNA, 1296 bp, Homo sapiens
tccagtacacagaggatccttaaggcatataataggataagcaatgcaaaaaaaagttctatgattttttaaaygttactacaagttcattaattattttgtaatggtagacaaaaagttgatggcaagttaaataaattgatttaaaatttacagaagtttgtgtgacggtttggtctttatctcctatgttttaaaatccctcacatgtttaagatgtacattatacttaaataattctggtgctttttttgatcattcgcttcaagtaccagagtgatattgacattattcactcaggtaaatatatttatcttgccttgagtggctgcttttgtgataacatctcttcacataggaaaataggaagaggaaaaggaagaggtggaagaggcatttataatttctcacaatttaagaaataataatttctcacaaaaatttaagttcctaatggctacttttgtacttaaaaaagcactaattaagcataactatatgaactgggaagatactttacttaaatgaagggagcagagattcctctccatgatatctgccaggcaaatccaagtatagatgaggcaaaggagaacaacacacacagagggctgtaatgcaacttttctctctacactttgctcttctggattctgggagctgtggattctattatttgccaataagccaggagtaaaaggtaagaaactcttgagagctgagtgaacattattaatatgatatccttgtcttctgaattgggctcaaaaagtttcttttttaattttcaattttaaaatgcacaaaaaaatttttctaccatagttacctcgtgctagcaaatagtaagtctttctaatttactctaacactttttttgtatccattaactattccccctgccccctgctgcactgacgacccttctcagcctctagtaaccatcctcctactctcggtctccattagttcaattgttttaaattttaactgtcacagataagtgagaacatgtgatatttgtcttcctgtgtctggcttatttcacataacataatgacctccagttccatccatgttgttgcaaatgacaggatctcattcctttttatggttggatagtactccatcatgcatatgtgaaagtggactaaaagaagctttgtttgttttgtgatgaattgtaattatttcctatctcttttgtcataggatgcacaatttaaaggtgttgtttgtgatatctgagctgccatgagtatagtggagtgtaggaatgagtaaataacagaaata

SEQ ID NO: 714877 - DNA, 1716 bp, Homo sapiens
gagtcttgctctgtcgcccaggctggagtgcaatggcgcgatctcggctcactgcaacctccacctcccgggttcaagtgattctcctacctcagcctcccaagtagctgggtcgcacccaccaccacgcctggctaatttttgtatttttagtagagacaggtttcactgtgttggccaggctggtcttgaactcctgacctcaggtgatccacccgtcctggcctcccaaagtgctgggattacaggcacgaggccactgcacccagccccaaaagtctctttttaatggagttcttttctctcctggagtgtcactctctcagtccaggaggctgatcctgacatctggattttatgtagataytgtcacaaaactaaatgaggggtcttttgccacatttttctcttcttggatctgcatgtaggagggatgcctgatatccttcatgtccccttttccacgtttaaattgtaagtttccctttatgtttccatttatgatagagtcccttgcaggcagttggaaccctcttggcatgggtggtgctgggagagccagggtaggcattggtgtggggaaaactgtgcttctctttgccttgggtgtcttctggagcccttgcctggtttttgattcaacaagagacattgtgcttgaagaattggaaagataatttggggcactggatgataccttcctccaaacaccatccacttttgcctcagccacttggctgtgctagcaaagatttaatccattttgagatgcagttggtttgacactggttttgatctctctctgtaagggctgtccctgtcactccctgctagctcctactggaagacctggggatacctaacagggtcctgtgctccagtttgtctctctctagcccttaatactaccaaaagctttcttagcctctcagcatctttgttgccattttcttccgaacttcccatattctcagctggccgcttttagcaacaccttgggaggaaaaagcatttaagagtttcgctcacatctctatacttcccttctctttgaggtccaggttcaatgttgcactgttttggtagctttctgatgttcgaaaacatcttttaaaacaagaaatatgttctcctttttttaaaaagagatgttcttaatcgaaacttggtcttgtgcaggccatagtttgaagcagaacctatgcagcttttgaaaacaatgattatgtttttatttctagaatttcttttcagatcatttcaaaatattcttaatccctttttataggttggaacataatttccatttcctatttcattaaatgtgtgcacatggtttatcaagataaaattattataacctaaaatgcacaaatcttaatggcacagtgtgatgaattttgacaatcatatacacctatgaaaccactatctagtcaatgtatagaatagtgctgtaatcccaacaacttccccatatatcttttcaattaattttcctcatctcccttaaatgttctggtttttgttacccatagattaattttgtcagtttttgtttgtttgtttgtttgtttgtttgttttgagatggagtctcgttttgttgcccaggctggagtgcagtggcgcgatctcggctcactacaacctccacctcccgggttcaagtgattctcctgcctcagcctcctgcatagctgggattacaggagca

SEQ ID NO: 714878 - DNA, 613 bp, Homo sapiens
ttttttttctttttggcacaaagaaatatcacagatggaccccgagatcaatcagaagctcataagattcatcagtcatcactggtccaggggcggccacgagactcagacagacagacagcatcaccacagactggaaacagaaacaggtccacgttcacctcacagtaaaaacctgcctcaccgacaggcaagggcgggcaggagggggcagtttcgctgctctaaggggggaaatgggcgtcaggggcaggaggcagggatggggaaaggatggacaccattcataaattagagacaagtggtcctcttgtttgtatcctcttaccttgaatagtaagacagtgcaaaaactagatacccgaccactcacccattcaaaagcttgagaagtcgcctcgcgagtgcccgtgtgcgtgtgtggatgtgtaaatgtggtgcttgtaaacattgtcaccgtccgcacagagacccaacatccatgtgtctgaatggggkgggggggggcgggaccctacttcaggcgccctctgccccagtgattcccgtccaagacgtagtgcaaatttcagagacaaaaaaggggcagaagggagtggggtgagctgggggc

SEQ ID NO: 714879 - DNA, 2342 bp, Homo sapiens
actcaaatgtttttaagtgagaaattcttcttccagcctgccaaaggcccagaattctgttttttcaacacccctaattctctgcacatttatattgcttgtctgacccccaaaggcatatgattctgcaactcctggttgagaccctccagctgccttttctgaagggccatgcagagggtttgactgatgtggtcagtagtttctggtttacagggttacatggcagaagctggggtaacggccagtaagaagcattaatataatgggtaggaggcattacttcttttgccccttcctgtgctaactctccccagatccaggctgcaggccccacagatcttcttcctggtactagcctttgtgtgaattctgggactctgccctcctcagactcatcggctctcatataggtgccaggccatcctgccctgccccagacccagggaggtccactccaggcagtggggcccatgcaagcctctcagctagtttgcattgtatttgtgggataattactaatggcaccgatcatttttattagctgagctgtctgcattaaaataatagatttttttttattaagaacatctgagggagctgccatcacagcaggagaaggataattttctgtttattttaagagcagatggttactaaaatgttcaatgtaaataaattgaggactggccacggggtaaacatataggaaatttcctggcttgcttcaagcctcctgccctgtcttattctcccagtccctcctttgtgggagctgaccagtgaagaattgtctcccaaaccacttgggagaatccagacctcaggtgtggtgggctggaaggagagtaatgatctgctacagtccaccccagaactgggggtgctgctgaagatgttacacaggctggagcttaggaaatcaggaaggagggcagaggcaaaaaatctatccttgccacagagcagtgatccagatgggattaacctacctgggtgctctaaacctcagccttctatctgaacagtgagggtcttgtaccagccacagctcctaaaataggctaagagggaaagaatagtttcatttaaaaataaagtgttggcggtcaagagatcaagaccatcctggccaacatggtgaaaccacatctctactaaagatacaaaaaattagctgggcattgtggcacatgcctgtagtcccagctactcaagaggctgaggcaggagaatcgcttgaatccaggaggcggaggttgcagtgagccgagatggtgccactgcactccagcctggcaacagagcgagactcggtctcaaaaaaataaataaataaagtgttggcaaccaaagtgatcagaaaacatcgagttaaacaagttttttattgcaggacttctcagaacatttactatgttcacttagattgtatttctccaaagcaggcaatcataaagagtaagttgcaaacttacagtgaccggacccttttttttcccaaggtgcagtgtacggcttgggaaatgctggatgctaagtttttccaagggcttgctcagctccagtgtctctgctctgtgaacmattttcatctagagacgtttctttactcattcagttattccacaagtcatcactggctgctgaccatgtccatggcattggcctgtagactgcagatacagcgctgcatggaatccaggtgctgcctcccacccacatccacatcccctcggcctgccctagaggtcttccggagtcatttccactcacatctccctattcttgcatcactgtgcctggatgcattttccagctgcaggagtagattccccccaagcacgggcaggctagatatgccaaggagttaacatccctccagctctgagcaaccctcaaccaacaaaggatgggaggtgtgaataaacatcctagcttcgaggggtgggggggtgcgggattcagaggtgtgtcccacaaattatcagaggttgcccaaccatactgagttcccactgcccatagcagtatcccctaataagcaccgcattgactgacttttttcccttccctgttgtctcttccccactctctcacagtacattctgaggtcatctcccaaatacaatatccctgtctcagtttctgttttggggaaacccaaaccaagacagcttctgctcacatggatcttacagtctggtggaagagacagcaagaaatggatactcaaacaaatacatgattacaaattgtcatgagacgtatcaagtgaaaaaatggtgatatggcacaatgtgaaggtaggtgagctaactcaggaagattctgctaatgct

SEQ ID NO: 714880 - DNA, 1476 bp, Homo sapiens
attccaaagcaaatggcctctccactcctcccactcctttccagcccatctcccttcctcaaacccaaccaaactgcacctggttgtggctgtccagctggggaaagttcatggctggtctccacaatggaccctccagaacccactgctgtctgagagccaggcagctgggccagagctagagccctcaagaagctgctaacctcgagagccaagtgccccactggctcctgaatgcaatgagtgccacagggtggctgacaactcactgggaccttccagctcagggtgactccccaggtccccatgcagcccagtggtctccaccttactgtcactgcctcccacgctccctccatgggtcagcaggcaaacccagcccaggcctggtcatgaggaagatcccaggtccagaggcataccgaaagtyaacagtcaggcaatgagtgcagcgagaggcagcctactagaggaatccaaggctttagatgaccacagctgagcctgtggcttctcaaaaagagccagcttggtttacagtcctgggttcaaatcccagttctgccatttcctggccaccagacctcagacaagtaacttcgtctcattgtgcctccattttctcatctacaaaatgaaaacagtgacacccacctgttgggattattgtgccagggaatgagatgctgatgaccctaagtcctgagcctgtagcagagtaggtgaatctgaaagagaaacactcaccaccactgagaaccatgatctaagcagagctttagagcagtttacaaagtgctgcttgggcgcagccttccagaaggaggtgatcgagaggaaggccctgccccagctgggaccccaggtccctcctgggctcctccctgactgtgggttgtcaagaagggtgttgacaggccaaggggggcccaggatgttgaaggatttgggaatttgattgcgggtcttagggctgagaggccgtaaagctcatggggccaaggggccatctccaggtatccaagagttaccatgaaaataataataataataataataataataataataacgggagtttgggagggccagggttcagtgcagcatatcaccatcacctacctggctttccttatcacaccagattccctggggtgaaactgagttgctttgagcaaatcactgagcctctgagccgtatctgtgcagatcccatggacgtccacgcctgcactctctgtggactctctgtggactctggtggtggcagcagtacctgcctccctcgctccctggggtggtgtctcattgccctctgaagcccccactcggccaatatgaagggtcacctctgtgtctgggtcttatggtggatgtgggagaggtgacgatacacaagcagctgcccctgcggtgaaggagctcccaggccagtgaggtgggggtgggcaggggtggggcagacaggccagaaag

SEQ ID NO: 714881 - DNA, 1175 bp, Homo sapiens
ggagaaatgtttatttgggcattgaacagaagtgtttagtaatagaggctagaaatctgaagataaagggactctaggccatatttcttctgagctattgggcaaatcactaaacctcttttcacttagttttcttatctgtgagatggtaatactatagactatcctgtgagaaagtggtkgtattattaactaattaagagaaaagaaaattaaggcttagaatcattaagtgatttgctaaaggtcacagataaccttgtaatccttattttcttattcataactcagctggctttctcttattacttgtaaggtgatattctaaacattgtaaaacacttctattccagataactagtttagttgggagacagctggatagtagaaattatttaagtgtatagtatgaaagtagtatggtaaaactttgttaccagaacaacatagagaacctattttaaaggatagaaaattgcaaagtggtaagaatatacatttctaaactgcattgtcatttaaaaagcttttcaaactttttcacttttagatctgttctggttttgaagaatggatttttaaaaggtgggcttggtggtgtgcgatggctcacgcctataatcccagcagtttaggaggccaaggcgggcagatcacttgaggccaggagttcaagaccagcctggccaacatagcaaaaccccgtctctaccaagaatacaaaaattagccaggcatagtggtgcgcacctgtagtcccagctactcaggaggctgagccacaagaatcgcttaacccgggaggcagaagttcctgtgagttgagaattcgccactgcactccagcctgggcaatactgtgagtctccatatcaaaaaaaaaaaaaaagaaaaaaaaaaaggtagactctatcccaataactgtctgaaatcaaattccatatatgtggcatccaaataaattaatatttcataacattttttaggcagtattgcaacatctatagtgggtatgctgtgtgtttaacttaacattttaaatacttgctttatttctagctgtgaattcctttggacaattgatgatatttatcattgtgcccagtttctacaaataaaagatgggtggattattttctcgatggagggtaaggtacttttctttacagctagtt

SEQ ID NO: 714882 - DNA, 652 bp, Homo sapiens
gaaatatttattggatacgctataaatttttcaaattccctttttttttcttttctgttacattcaagaraaaaattaaatttgcaaatagcaaatagcatttatagaattatcttatttttagaaatctctctgtccctctcatcttttccccctctctttctatcctaacatctgtataagtatcagagagagtctaaagaaagatcacaaatgttaacactgatcatttctgattgataagaattcttgtgatttgctgatttgtacttttctgtatatcttgcattttgaaaatagtgactgtgaatgataacatttatcattgtcccaaaatgttatacatgctctttgcagaaaatttgaaacatgcataagaaaaggaaaaacatacctaagaaaaggaaaaatctgccatccagatatatttactattggtggctcctaatgaccaatgcttctgggtatccatgccccctcccatgatgactcaggccttggccatgtgtgatgggtaagtttatgcaccaacttgactaggctatggggcccagttgttaggtcaaacactagtgtagatgtttttgtgaaggcattttctaaatgtgattaacatttaaatcagtagacttagagtaaagcagattacctg

SEQ ID NO: 714883 - DNA, 638 bp, Homo sapiens
tcaaaatattgtaacatattaggaagaattaaaaagaaattaatgctagaattaaaaatgtaatatctcaaaattcagaacacactggatgaattcacaaaggtgaactcaaagagcaatagaaaatatgactaaagttcaaagagaaaaaaaacacagccttaggaaacagaaatataagtcaatagaaaatccaaactgaagtacataaagaaaaaagaagatagaaaaacacagaaaagattrttaaagaaatgtgggaaatggtgagaatgctcccacatacatggagttggagagcaaaaaagaggatgagacagaagcaatatgggaaaagataacagtcaaaattttttcaaagtgatgaaagacaaacccacaaattctacatgcactactaatacttaaaagaaacaaagtcaaaggaaagtacacttagacacatcattgtaagactcttggcaggagagtgagagacagagagaaattaagatattaagaatggctagaaggtaaagatacattactttcaaagaataaacaataagatgggtatttgattttgccaccgaaatgacagaagtttgaggataatggaatgattttcaattatgccaggaaaaaaaagcaaataaata

SEQ ID NO: 714884 - DNA, 897 bp, Homo sapiens
tgaacaggacctcatagatgtcttctagttctaaaactatgctttgggtcttatgacaatggaacactcaaatagctataatatctgcaaggcttcctgtagctatggcttttctgctttttctatttgttttcttctttctccttacacagccacataatttgtacctaatttctgaccaaaagaagaccatcactcagctttcatagcatctgctcatgaatattcccaggcatatttttattggtgggatggggagtgagactgtatgagtcaagcaaaagtagattttggaataagaggttctaagctatcattcatggatcctcattaagatagtttagaccttttattgtattagcatgtattaatactaagcaaaatccagagtaacaagtaaggtgtggtttatatttgatctattaatgtttttatttaattgaagtacaagttttcgtacacttcagtagattgggtttaacacagagaagttttcaaggaaagcaatggcataatttgagatgaagagatcaaaatagcattttacactgtccaaagcatcatcaacctaaatatttattatgtgtcatagtgggcaaaagtcaaagggttaaaataccaagagagggaatctttcctcatatttatttttatgctggagtattatttatgtttctgtagctaatctcaaattctgtttttaattatttttgagtttgggcatgaataaatattccctacatattcctttgttaaggatatggtttgtaatgccmtgtgtttgagggaattatgaggagagtaggcccatttatttgagagtgatattttctgtcacaggctcaagaaccctaagccatgggagcggaagtctggaaacaggagtgaagagctgca

SEQ ID NO: 714885 - DNA, 1545 bp, Homo sapiens
ctggagtgcaatggcatggtcatagctcacagcagcctcaagctcctggactcaagccatcctacctcagcctgccgagtacctaggactacaggtgcatgccaccagcccagctaatttatttacttatttatttttttgtagagatgaggtctcactatattgcccaggctgatgtagaactcctggcctcaagtgatcctcccaccacagcctcccaaatgttaagatacrtctgtataataacatcacatactacagctaagccttttttggattgcctgtagatatttaatccttcttttgcctagcaagcaggtttttactttaattctcaatagcccaactattttttcttaaagtaattaagggattcctaaacaagaaaattattacaaaatgaagtataatttttcatttgtttaaatcttgaaaactgtattagtattctaatatggtaagaggccccccaaatatactacctactttaaataagtttatttatcttaatagcatgaaagtcagtgatccaagctagtaaggcagctcttttctgtaggattatttattccagatcttgttgcttgacagtatgctagtatattggcctgcatttccatggtcaaaggggctcagtttcacatgtgccttccagcctgtgggaagcaggaaacaattagcccctttctagagtagttttgtttttgtttttgttgttttgttttgttttgttttggtgacagagtctctctctgtcatccaggctggagtgcagtggcgccatctcagctcactgcaagctctgcctcccgggttcatgctattctcctgcctcagcctcccaagtagccaggactacaggcacccgccaccacgtgcggctttttttttttttttttttttttttttttttttttttttttagtagagactaggtttcattgtgttagccaggatggtctcgatctcctgacctcgtgatccacccgccacctcagcctcccaaagtgctgggattacaggcgtgagccactgtgcccagcctagagtagttgtcttttaagttgaagatgacctggaagttgtgcccattattaatttccactcacataccattggtccacaccaagcaacaacttcaagggaggccaggaatgtattctctcactgggtggctaagtgaccagctaaaattttattcctgtggacaaaaggaagaacatagtggaaaacaactaactatctgtcacaaaagcctttatcaaaaatgagggatgtaagtttcaatgtgagtatttctgaatagtttttttcaaatgcagccaagtcagtaatactctgttgtaactttagatagggtatctatgaattaaaaatccctgaatgtgacattactctaaaatcttgcatcttgaactggagagcactgttgttttctggtaggaggtccatgaagcatgcattagaggtagcttcttttcctggaggaagatttggatgagtatgtattttttatattgaaacagacatgaatatattttggag

SEQ ID NO: 714886 - DNA, 1883 bp, Homo sapiens
gaagggctagagttgaccgtgcctgtgggggactgtaggagtctagagaacatgtctgagtgctcttccagggaatgtatatccttgagggcagtaaattcattatgcatttttgcattctcccatcctagtagcaaccctcaataaatatttgttaagtgaaggagtgaatgaaatgttgaccttggcaatgcacaataacttctgaattggtctatgtgtatgcacatttcctccctttcctatttaaacatttattctaaatcagtggagccacagctgtccaagttaagagtcatacttacagtcattattaaccaagtgaggttccaagccagtggttctcaacattggctacatgttacaatgacttagggagcatttcaaaattccagtgctcaggcttcatctcagactagaaaaacaatctctgagctgaggcgcaggcatcagaattccaaggctgagtaccactataagctagcatagaaactgccatatctgtggaattaggagacctagaagaaatcccacagcacaaaaaagtgctagtgccactttcactgatgttcaaagtgcagaaaagttggggaaaaaattctgatgggagttagaaatgtgtttyatttatttattgtattgtatttttttttgagatggaatcttgctctgtcacccaggctggagtgcagtggcatgatcttggctcactgcagcctccgcttcctaggttcaagccattctcctgactcagcctcctgagtagctgggattacaggcgtgggccaccatgcctggctaatttttgaatttttagtagagttggggtttcaccatgttagtcaggctggtctcgaactcctgacctcgggaaatctgccagcctcggcctcccaaagtgctgggattacaggcatgagccactgtgcttggccaggaatgtgtttttgtgctcatctggaacttgaggactggaaggtgagtcacatgtctaggaatacataacacttcaaacaacaaaatgatgccacactgtgaaaagagatgggaagctattgaatatccctgtcctgccctggctggtgacccctccccaacattcaggctgcaggaacacctgagctctggggctctctgcctgatacccagtggtggccttatttattccactgccgagttctttctggcaaccttgtaccattcttgggaaaggttggggaagcaataggtaaatgttgttttggtttgtagacatcttttggtggggatgggggagcagctgtgctggaactgggggaaggggagctgtgactcaggggaaattctaagttgctacaagctgcagcaagtgtgtgtcagtgggaggtgagaaaggcaaacagagggctgaaaactgagccaggaacctgcctagtggataatcaaaactcgactataaataactaatggaacgacgaacgtgtttagtgaagttattttctaaagcagcgtacaggcaaaatgagtgctttcctggagcaaatcctcaagctgttccagaagggtgagtaaaaatacagaaacacctgtctggcagtggtgattttacataaataatttttccaggtaactgaaagctaccttgtaaatgccaaaaccctgaacattttagttgtgtaagggaaatttttctaaaatgggttatattttctccagaggtggcgaacagagtacatttcatttactggcttttggtggttcaggatttggtagcagaacctggatttccttcttcaccacccttttcactcaccttcagtttcagctccaggcatggagcatgagacataggcttaaagccatcaatgtctcctttcgcttggttacaggtgatgggctctaat

SEQ ID NO: 714887 - DNA, 1883 bp, Homo sapiens
gaagggctagagttgaccgtgcctgtgggggactgtaggagtctagagaacatgtctgagtgctcttccagggaatgtatatccttgagggcagtaaattcattatgcatttttgcattctcccatcctagtagcaaccctcaataaatatttgttaagtgaaggagtgaatgaaatgttgaccttggcaatgcacaataacttctgaattggtctatgtgtatgcacatttcctccctttcctatttaaacatttattctaaatcagtggagccacagctgtccaagttaagagtcatacttacagtcattattaaccaagtgaggttccaagccagtggttctcaacattggctacatgttacaatgacttagggagcatttcaaaattccagtgctcaggcttcatctcagactagaaaaacaatctctgagctgaggcgcaggcatcagaattccaaggctgagtaccactataagctagcatagaaactgccatatctgtggaattaggagacctagaagaaatcccacagcacaaaaaagtgctagtgccactttcactgatgttcaaagtgcagaaaagttggggaaaaaattctgatgggagttagaaatgtgtttcatttatttattgtattgtatttttttttgagatggaatcttgctctgtcacccaggctggagtgcagtggcatgatcttggctcactgcagcctccgcttcctaggttcaagccattctcctgactcagcctcctgagtagctgggattacaggcgtgggccaccatgcctggctaatttttgaatttttagtagagttggggtttcaccatgttagtcaggctggtctcgaactcctgacctcgggaaatctgccagcctcggcctcccaaagtgctgggattacaggcatgagccactgtgcttggccaggaatgtgtttttgtgctcatctggaacttgaggactggaaggtgagtcacatgtctaggaatacataacacttcaaacaacaaaatgatgccacactgtgaaaagagatgggaagctattgaatatccctgtcctgccctggctggtgacccctccccaacattcaggctgcaggaacacctgagctctggggctctctgcctgatacccagtggtggccttatttattccactgccgagttctttctggcaaccttgtaccattcttgggaaaggttggggaagcaataggtaaatgttgttttggtttgtagacatcttttggtggggatgggggagcagctgtgctggaactgggggaaggggagctgtgactcaggggaaattctaagttgctacaagctgcagcaagtgtgtgtcagtgggaggtgagaaaggcaaacagagggctgaaaactgagccaggaacctgcctagtggataatcaaaactcgactataaataactaatggaacgacgaacgtgtttagtgaagttattttctaaagcagcgtacaggcaaaatgagtgctttcctggagcaaatcctcaagctgttccagaagggtgagtaaaaatacagaaacacctgtctggcagtggtgattttacatamataatttttccaggtaactgaaagctaccttgtaaatgccaaaaccctgaacattttagttgtgtaagggaaatttttctaaaatgggttatattttctccagaggtggcgaacagagtacatttcatttactggcttttggtggttcaggatttggtagcagaacctggatttccttcttcaccacccttttcactcaccttcagtttcagctccaggcatggagcatgagacataggcttaaagccatcaatgtctcctttcgcttggttacaggtgatgggctctaat

SEQ ID NO: 714888 - DNA, 888 bp, Homo sapiens
ctgttttgatgcctgttgacagcttgtaacacagcagagaaaagaggccttcctctacagtctgcacagagctctggatggccctgggtgctccgtggcctcagctggggcaggagagggcagggtccagtagccgggcagtgcccgggtcgaggaagcagtgcccagcaacaggccgcagtgtctaggagaaggcagcagtgcccagggcaggcagtcacgccctgaagaagggagtggtcctctcatagttcctatgtcatttgatcactgctaaaaaacaatgtccactcamtgtatactaaaacacagcatattctgaaaagtgaacagagaatacaacccttaaccaaaagaaatttgggaacgtcacatttaagaagggataggaaatggttaccaaggacagtttaaaccaacagagacgacatgtaaagaggagattgtaaagaggggcggcagcattatctcttggtagaaaatccaaaactaacaggtcaaggttcagtgactttctgatgtaatgaagtgtaagttcaaagtccttttgttattcagtgtccagggaaaaattattgaccagagaacccgagcagggaatcggggcatacagggtgacctggagtggatggggatggggcctagggcaccctaatttccgtcagcacttcccttactttgctatgaatgactggcgttttctcaagttgaacataaaatgctatgtgagcgccaccttttgtgacatggtagttcaccttaccaccggccaggcttacctgagcttcacccaagtagaaaattctaaccccccagcaggtacgagccttaggtttgactctccctgccactctctgagtgggtttctaacacacacacacacacaca

SEQ ID NO: 714889 - DNA, 617 bp, Homo sapiens
cttacgtaacaaacccctgagcctaaaataaaagttttttaataaagaaaaagtaaataaagctatgtattttaattctttttggattttctagaattaacgtgctaccaaatggtcaaaaatttgataagattttaaagataatatattgtaatgtttatattaaaactctttggtgtgtatatttatggggtacaatgtgatattttgatctagttatattttatagattcagtcaggctaattaacatatccrtcaccccaccaacttaattttttgtgatgagaatgttaaaaatctattcttttagcaatttttgcagaaatacaaatacaaataatcttatttatatgaagtatctaaaaaaagtcaatctcacagaaacagagactagaaagaatggagagaggagagggatggggaaggggaaaaaaagaaaatataatctcttttaaaaaatttggttgtccctttcttgggctatagtttcttgttttctacatacatgttatagctgatttctagtaaccaatcaatatccactctgaaatttgaaagcagatagctcacttcctcatttgtaaaatggaataaaaatagccttacctcttagagt

SEQ ID NO: 714890 - DNA, 588 bp, Homo sapiens
gaaacaaaagcactccccttcctaagagccccctatctgcttcttaggggccgcaccttaggtatttggggtaactcagtgtactatccgttttcacactgctgataaagacatacccaagactaggaagaaaaagaagtttagttggacttatatttccatatggctggggaggcctcagaatcatggtgggaggtgaaaggcacttcttacatggcggcagcaaaagaaaaatgaaagaaatgcaaaacyggaaaccccttataaaaccatcagatctcgtgagacttactcactaccaagagaacagtatggtggaaaccacccccatgattcaaattttcttgcaccaggtccttcccacaatccatgggaattatgggagtacaattcaagatgagatttgggtggagacacagagccaaaccataccacttagtataataacagcagcagccccaacagctgctaataatttttattgaacacttactgtgtgctagtgggaaatgaatgagtgctgaacactcacatgggtcatttcgttttattctcacagaaatattttgtgctaagtgctgttattat

SEQ ID NO: 714891 - DNA, 639 bp, Homo sapiens
cctgtctcctcttccctgaggacactattccactaaatcacgtgaacgagacccttgtctcaggctctgcttatagggacctcgctgtgacaggaggtgagggaaacataggtaggtgagtggggaagtgagataaggaagaagacaataaaggtatgttattaagacagtcacsaccggaggtgactggaaattaatcctgtggcaaaactggaggccgatgtagaacacagacctctgaattatcccatccaatgggctggggtatttatacaccagttctcaccagacattggtcaaaagctgccagactacatcaaccccgcagcactccagcctgcccaaggtggacagggaagccctcctaggtttcagagaaagcccttgggctccaaagctggcagttggaagtcagataactgagactgaagaggggaggtaatatgggcagggtatatgaattctcaattctagccccaaatttctgtctgtttaatgagttcaatgcatggacctctaaaacatctctattcgatgccatactgacccaaatgggcttgaaccccgctctgttcacacacacactctctcacacagcatttatatataagttggcttcacctagggctcaggtgattg

SEQ ID NO: 714892 - DNA, 636 bp, Homo sapiens
tgaggagcgtgccgtaagttatcaacaagaagtgattacagagcaccatggaaggccagcagaagctacacagctttaatgttttgtggaaaagtttaactttatccaaaaatctagagccagagaaagggggagaggaaaggaaaagagctgagaggagaggaaaaagttcattcatgaggggttataacaggctggaaactggcaaggcagaaaaggggagttaggacagggtgaaggggaagagaaaagaagtcarggaatggaaaatcagaaaaacggtttccgttttcacacaaagaggaattgtctgtgaattgtgaatttgatatgctggatgtgagaagatttgtaggagagaagaatgtgtagaaatatcaggtaaataaaaagcaggaaaagacagatgtgagagacaatggaatatacccactctgcttcagaatctctcagctctttgtgagtctctgagttgttgcaagtgatgagagacctcagagctattgcaggaaatcctcagggtcaagctgtagcctgagtaaataaaatgcaaatatagaagtgtgcagtgggctgggcacagtggctcacgcctgtaatcccagaactttgggaggctgaggtgggtggatcacc

SEQ ID NO: 714893 - DNA, 636 bp, Homo sapiens
tgaggagcgtgccgtaagttatcaacaagaagtgattacagagcaccatggaaggccagcagaagctacacagctttaatgttttgtggaaaagtttaactttatccaaaaatctagagccagagaaagggggagaggaaaggaaaagagctgagaggagaggaaaaagttcattcatgaggggttataacaggctggaaactggcaaggcagaaaaggggagttaggacagggtgaaggggaagagaaaagaagtcagggaatggaaaatcagaaaaacggtttccgttttcacacaaagaggaattgtctgtgaattgtgaatttgatatgctggatgtgagaagatttgtaggagagaagaatgtgtagaaatatcaggtaaataaaaagcaggaaaagacagatgtgagagacaatggratatacccactctgcttcagaatctctcagctctttgtgagtctctgagttgttgcaagtgatgagagacctcagagctattgcaggaaatcctcagggtcaagctgtagcctgagtaaataaaatgcaaatatagaagtgtgcagtgggctgggcacagtggctcacgcctgtaatcccagaactttgggaggctgaggtgggtggatcacc

SEQ ID NO: 714894 - DNA, 1025 bp, Homo sapiens
gatggatgaatctggaggacattatgttaagtgaaatatcttagccacagaagaacaaatactgcatgattccactttcttaaggcatctaaaatagtcaaactcatagaaacagaaagtagaagggtggttgccaggagctggagaagggaaaacaaggagttgcttttcagcagctatagagtttcaattatacaaaataaatgaattttagacatctgctatctaatattttaacctaaagtaaaaaacgatactgtattgtgctwaataaaaattcattaagaaggcagatctcatgttaaatgttcttaccctaataaaaacataaaaaagaatagacttcctcttcgatggtccattgagtgaccaagtgaattattaaatataatatattaaatatattatttttaagtatattgaaggtaattaaaaaattaccttttttgctgtcaaaatcatactatctaactccagaatggaaatcatttataaatgactaatttttaaatgtcacctcagaaatgactaattcatacaattattactcaaactttctcacacatgaatcacattttaatttcattacatttcccaaaaagtaaatccatattttaatataagaatataaatctcttttcttccttttagataaactacttctgcttcactgtttgggtttgagggagacctatcatttacttcatggtcagattccctggaggcaacctcagagactgtgccatgtctgtcacaacccttaatgatttcagattgttctgaatttctttcattatgtttattttcattggcttcaacctaatgtttcaaacttctctttttaaccaccaatctatgtctaggtttaaaataaaatgtggcaggaagatgaatggatttttaaaggcaatgctttttactgtgacccaaactaataaacagacattgatttgagaggtgaaaatcttacttataaaataaatcattgcttataaaaaattttaaaactacgttttttaaagtca

SEQ ID NO: 714895 - DNA, 1177 bp, Homo sapiens
ttccttcattcagacatcttctcatatgtcaccttccctgaccaccctaaataaagtagcrctgtctgccaatatttccttactgcatgtaattttttttcatagcactgttatcaccggatgtttagttgtgctttactattttctcttcccaccggaatgtaatctccctgacagcaaggactttcgttcattacttatctccagggtctaggtacttagtacatgttagaatgaatgaatgactgatgataataaaaagtgaccattcattcactatcttcagtgtgccagagacaggattagatgctttggtgtactttcattttctcatttcattcttatatcaaacctgaaaagtaggtaataacagtcctattgtgtacatgaacatacatttcattggacatgggaagccaccaaatgtttctgcacaaggaagtgataaattcactttaggaaaaggcaacccaggcttctggacagagagggcaggtctggagacaaggaacatatggtcacatcattaccttactctgggaacagaggatgaggtcctaaaccaaatcatgtgaaaggaggagagagtggacacagtgagattaacaggatatagaagtccagtgttcagagacatgcttctataaggcagggggtggggggtagattgccacagaaacaggaatccccggggaaatgagacggagtttccctcttgttccccaggctagaatgcaatggcgccatcttggctcactgcaacctccgcctcccaggttcaagcggttctcctgcctcagcctcctgagtagctgggattacaggtgcctaccaccatgcccagctattttttttgtattttcagtagagacagggtttcactatgttggccaggctggtcttgaactcctgacagatgatccacccgcctctgcctcccaaagtgctgggattacaggcatgagccaccagcctggccccagggggaaaatttgatttgagcttggtttgagataggttgagtttgcagacccagaggaccatctaggtaaacatcggcagaacacagaggaacaggctctgaagctcaagaaggggtggaaggtggagatgcagatttgtgggttatctgggtattggacagaggtacctgctaaggggtgattaggagtgagga

SEQ ID NO: 714896 - DNA, 504 bp, Homo sapiens
  misc_feature 443, 448, 471: n = A,T,C or G
ttcagcctatctagctagttaaggttgttctcttctgccatacgtagatattctggctttcagggtcaggcctcactttgcatcacctttgcacacatcttcaagttcagaagcactgcaaccagcattccctggtcccaacactgaaggctgagtttgttgccttctactgagtgaytcagctagctctaaacacaactgagttgtagtcaagtgctgctccttccgtggcaggtgatgcccctgaaattatgtttagataacacaggaaaccaattaaaatggaaaaaaaaaatccagactgggcacaatggctcatgactgtaattccacactctgggaggccgaggcaggaggattgcttgaggccagagttctagatcagcctgaacaacatagcaaaacccccttctcaaagaaggagagagagagagaagacgganggganagagggagaaggaaaagaattangaagggagggaggaacaaggagggaggaaggaa

SEQ ID NO: 714897 - DNA, 1471 bp, Homo sapiens
tttttgaatgatgtattcaaatagaatgaaaaatttagaaactgctggaaggtttatgaaaagtaacagggattatatagtttgctaaagtttttcattgtttaaaaagtactccatgaaaaaaatctaggaggaagaaaaagataaagtatgtccataattaaatcttcccattctagagcatgacttttcatttgttcatatcttgttttacattttatatcccttaaaatattatacctttattctttattaaaattagtatcaaatagttgtaagttttatagatattgaattttatttytagaaacttgctgctaaattttttaaatgctattggattttgtatatttatcttatactcgggcacctcacaaaatttcgtttttaattctaatagttttttagaatagagtaacatcaacaaaaatggcagctttatttcctaatttctacttttatgtgatgttttattttctttcattttcttaccgaatttgctagaacttctatgccagtatcttctatttttccctttacacattctctgctttgggacactgaccacgtgaactacatcaataagttcccatgccctctagcttctcattggatttggccaatgagaagccccagaagatatcagaggaggggcagaaaggaagacttaggtatttattccctgacattttccccctgaaatgctaccttgaactaaaagtgtccctgaacaggttatcgctctccaccaggtgacatattccacaagctttctcccactgaattctaatgaccactctctcctcttgttgctttgaacctaagagtgataactgtttggctactcccaagctccagatgcctgcactattctttgtagttcttctacaaataaactttgcaacaagtcctctataaataaaaccttcttgaattatccagtttcaagttttcatttagaataatatttggtattagattttggtaaatactttgaattatatttaaacagtttttttttacttagaatttttattagtaacgctgccgcatattattaaatgtcttttcctcacagatatgattatatattttattctcttataatgtatcgatgtaacaggttatgttaatgggttccatgatattgtaccactctcactttcatggtatattctgcctaactagcattattattcttttgatggatttatttatctgacaaatatttactgatagtctcctctgagacagcttatattctaggcattgggaatatattgttgaacagaatttctgaccatgtgcaactaacgttgctgagttctttttataagatttcttataaggttgttcaaattatattctgactatttcaggaatttatttcctgggtgtgtgctctgtttattctgaccagtcttcctccctcaggctgctgaaaagtcttgatgtgcttttatctttcttt

SEQ ID NO: 714898 - DNA, 650 bp, Homo sapiens
atggcaccatatacagtaagggtttgtgtgtgtaggttaggaaatttcaactttttataatagatttgtgtatattttatggtactaaatgatagactagtatrtacatgtattttatgcatttgttacatacctttttcttatttttaaaaatatttctaggctatttagaaatatttttaaaatatttaaatatttataaatatttaaataaatggtgcgtctgtgagatttttttccaattgttgcatatctgcaaaacattttgcaatgtatttattaaaaaaaagtgtgtataagtgtacccatgcagtttaacccatgttgttgaagggtcaactatgttgtctctttaaattgctctgatttctaagtgtatagtcaacttcttgaatatttttgatgcttttattatcagaaaccacatagattcagaaatcttattaatggatttttacagaaggtgatacagaatctccttctaccatgtaaataggagccaatttactttatataaaaccttataaagtgcaatccatccaaagttacttggaaagtagagtgatcgatttagttgtatatttggattagcattatgtttaatgtgaaataatgaaaattagaatgaaattcacttacaataatatttt

SEQ ID NO: 714899 - DNA, 648 bp, Homo sapiens
  misc_feature 99: n = A,T,C or G
aaaaaaaaaaaaagcatgttgccacacagggtatctatcccacaatctaggctctctaaatcaggattacctgcacagtgtacactactagctccttgngtttcctctttctcttccttgggctattaggagccattgtcagagacctcttgcagtcttggttgcttgtttcaagtaaaaacattaatattgtgtgactttagactaaaagtaatatcagtgccatgaaaaaaacatatayatatatatatatatatatatatatatatatatatgttttttttcatgaaactggatctcactctctcgcccaggctgagtactgtgatgcaatcacaactcactgcagcctcaacctcgtgggctcaaatgatcttcccacctcagcttcctgcgtagctgggactataggcacatgctacgacaccaagttaattttttattttctgtagagtcagggtctcactatgttacccagcctggtcttgaactcctgggttcaagcaatcctcctacctcggcctcccaaagtgttggaataacaggcatgagccaccaaatatggccacaaaaatataattttaagcaagaaaagtgttggctgatgacactattcacttgttcaagatttattgagtcactcttata

SEQ ID NO: 714900 - DNA, 1053 bp, Homo sapiens
gctgacacttttgccgcccatggctctgaagaagggctcatatcagtgtatgatgtggctactgcatgttattacattattactggcatgttatatttgtgtttgctaagaaattcaacaaaagttaacatgaaccatgctgcttctcatgacagctacttttaaaatatagtaattccttcagttaattaaacatatgccaaacatggaattagaataactgtataattaacacacttatggaattttctcagtggtgaaattccaatcagattcccctaaatatatgtttatgcagaatccactttatactgaaattcttccaattttaaaatttattttaatgtattgtaaattcttctactccttgcactaagaacttkagagcaccttactctaaaaaaaatgatagcatattctaagcaaaatgagaggcagtcactaaaatcctctctctctctccacaaatctaaaaactcaactaaattaaatttctttagctcttttactgaggggcttattgtggagatggttatatgattgacattttgcaggttaaaatatgaattttaaaagaactgcccctacatattagcatttggtttggacaagttataggtatgaacagaaaagaaatatttctttaacctttggaaagaaagataaagaatgaattgcttgtctttctatagagaacaagtcgtattttttggcccaaaagggggaaggtctctctcaaatttattgtctcatacttctacctccaaagagacaaaaatacttgcctatgacaagtaaaatgtcattttataattccttgctaaccagtttgaacattttcaaaaaccgtataattagcatggtgattatagggtaccatgaaattacatggtcagttgttttaatattatgaaaattctgtacataattttgggctctgataaaacattatgtactaactataaatattagtaatataaagaaatattttatagtattaggagagaagaaagtattagagtttacctccaaaatttttccatttttaaatca

SEQ ID NO: 714901 - DNA, 639 bp, Homo sapiens
acagggtttcaccatgttggccaggatggtctccatctcttgacctcatgatccgcccacctcagcctcccaaagtgctgggattacaggcgtgagccaccacgcctggccctttcctacttttaaatctatttagctgtaggctttttatgtgaagagtaatttggtgaatataaaagtcttggtttacacttcctttccatgaggatcttacagtttttacttcatcacctgaagctgattttttttagagaagtttgaagccaaagtgaactgttttgtccctataggtgacttgatgtttatacctsttggtcaaaggaatctatattttttttttacagtggagtaattttattataatatatgtcttactgttgactattctggggacagtttttccctattgtggagcataccatttcaaacacgtagcttcaagttttaccgttttcctgaaaagtgtgcctgatttatacctttaaaaatgtgttcttccattactctgttttccctgggtattcaaattgttcaaatattgtgtctccttcttactgctatcattcatgatcattttctgtgtaactaattgtaagcaattctttcctaatttctattattttatttgctttttacttt

SEQ ID NO: 714902 - DNA, 639 bp, Homo sapiens
acagggtttcaccatgttggccaggatggtctccatctcttgacctcatgatccgcccacctcagcctcccaaagtgctgggattacaggcgtgagccaccacgcctggccctttcctacttttaaatctatttagctgtaggctttttatgtgaagagtaatttggtgaatataaaagtcttggtttacacttcctttccatgaggatcttacagtttttacttcatcacctgaagctgattttttttagagaagtttgaagccaaagtgaactgttttgtccctataggtgacttgatgtttatacctcttggtcaaaggaatctatattttttttttacagtgsagtaattttattataatatatgtcttactgttgactattctggggacagtttttccctattgtggagcataccatttcaaacacgtagcttcaagttttaccgttttcctgaaaagtgtgcctgatttatacctttaaaaatgtgttcttccattactctgttttccctgggtattcaaattgttcaaatattgtgtctccttcttactgctatcattcatgatcattttctgtgtaactaattgtaagcaattctttcctaatttctattattttatttgctttttacttt

SEQ ID NO: 714903 - DNA, 639 bp, Homo sapiens
acagggtttcaccatgttggccaggatggtctccatctcttgacctcatgatccgcccacctcagcctcccaaagtgctgggattacaggcgtgagccaccacgcctggccctttcctacttttaaatctatttagctgtaggctttttatgtgaagagtaatttggtgaatataaaagtcttggtttacacttcctttccatgaggatcttacagtttttacttcatcacctgaagctgattttttttagagaagtttgaagccaaagtgaactgttttgtccctataggtgacttgatgtttatacctcttggtcaaaggaatctatattttttttttacagtggagtaattttattataatatatgtcttactgttgactattctggggacagtttttccctattgtggagcataccatttcaaacaygtagcttcaagttttaccgttttcctgaaaagtgtgcctgatttatacctttaaaaatgtgttcttccattactctgttttccctgggtattcaaattgttcaaatattgtgtctccttcttactgctatcattcatgatcattttctgtgtaactaattgtaagcaattctttcctaatttctattattttatttgctttttacttt

SEQ ID NO: 714904 - DNA, 639 bp, Homo sapiens
acagggtttcaccatgttggccaggatggtctccatctcttgacctcatgatccgcccacctcagcctcccaaagtgctgggattacaggcgtgagccaccacgcctggccctttcctacttttaaatctatttagctgtaggctttttatgtgaagagtaatttggtgaatataaaagtcttggtttacacttcctttccatgaggatcttacagtttttacttcatcacctgaagctgattttttttagagaagtttgaagccaaagtgaactgttttgtccctataggtgacttgatgtttatacctcttggtcaaaggaatctatattttttttttacagtggagtaattttattataatatatgtcttactgttgactattctggggacagtttttccctattgtggagcataccatttcaaacacgtagcttcaagttttaccgttttcctgaaaagtgtgcctgatttatacctttaaaaatgtgttcttccattactctgttttccctgggtattcaaattgtkcaaatattgtgtctccttcttactgctatcattcatgatcattttctgtgtaactaattgtaagcaattctttcctaatttctattattttatttgctttttacttt

SEQ ID NO: 714905 - DNA, 720 bp, Homo sapiens
attactatgaagttccactataaaaaaccccaaatgagtattaatctggattttagctataatctataatattttgacactgacatttcactagatgtggatctcagtatattttaaaagatttagactcaaaaatggatgcaaattctttaagcatctattttgtttttttctaattttagctactacctgatcagatctaaaattattctggctagaatacagtatatacaaacatgtatttaagtgagccctaaaagaaatactcataggtggtttagaatcgcttgttagaggcacaggttcgtttacagttgctggttactagactgtacgcagctggacacttctatgttaaagggaagagaatgaatactatgtgccaggcagtcaacacatgaagacagagttgtattagcctcagtgtcttaygcttcacaattactcgtttactttcaggtaggataaaatgttccatgtttcatagtttcccagttttaattgtccctaaaagcagcagaagaaaaaagaaaaagagaagataactttaaatctaaaataaaataaataagtactataataatactgtcctaataacacaagaggactattaaggtaactttcagatttaaatgggaattttcattctaaagtgatgacaaaaagggtaaatataaaaggcaattatttaaaaaacatgaggccaggtgcagtggctca

SEQ ID NO: 714906 - DNA, 720 bp, Homo sapiens
attactatgaagttccactataaaaaaccccaaatgagtattaatctggattttagctataatctataatattttgacactgacatttcactagatgtggatctcagtatattttaaaagatttagactcaaaaatggatgcaaattctttaagcatctattttgtttttttctaattttagctactacctgatcagatctaaaattattctggctagaatacagtatatacaaacatgtatttaagtgagccctaaaagaaatactcataggtggtttagaatcgcttgttagaggcacaggttcgtttacagttgctggttactagactgtacgcagctggacacttctatgttaaagggaagagaatgaatactatgtgccaggcagtcaacacatgaagacagagttgtattagcctcagtgtcttatgcttcacaattastcgtttactttcaggtaggataaaatgttccatgtttcatagtttcccagttttaattgtccctaaaagcagcagaagaaaaaagaaaaagagaagataactttaaatctaaaataaaataaataagtactataataatactgtcctaataacacaagaggactattaaggtaactttcagatttaaatgggaattttcattctaaagtgatgacaaaaagggtaaatataaaaggcaattatttaaaaaacatgaggccaggtgcagtggctca

SEQ ID NO: 714907 - DNA, 633 bp, Homo sapiens
tgccacagttaaagcctgtcagatgtagtaacccgcgtcggaacgttgaatgttggtgattgtgaggtctccagttggtgacactgagcatctactgttgggctgctggggttggtttgggaaaagtaggttctgtggaagcaagcacaatctcatcaatattcattttccacttaaaaaaattatgtgaataaaagctactacaattaaggaatacagtgggaaaaagaaaatacacagattaaaatatatatggttcagaaatgtttaaatgccacacagtgggtttcactgataaaggttttccaaatcatggtggaataatatcctctaagaartcaatattttctagttgaaagaataatcatctgtgtttttaaagaatggggatctttatctcatcctgattttctgctagttacttaatatctttgaagcttttttcttcatctggaaaatgggcaaaacaattcttatctgactcaactactaaggcctcatgaagatctggccataacattgactgtgtatgggttgtataaaccgcacagctctgaagaatgcaaaatatgattgctgttgatcattttgaatacttgatggactcaactgaatttctcccaaagttgttca

SEQ ID NO: 714908 - DNA, 322 bp, Homo sapiens
gtgagccactgagcccagcccgaacttttgatttttttaaaaaagaaatcagaagttttcaaatgtttgtgaaatcatcagttttctaaatattggcaatcaattccaaaagttttataacgtgttacaagccaaataaagcacatctataggctcgatggtctatgggcaccccttgtgatctctgctttaaatcatttgatgtctgaattggtggaagggacacgggagcacacaccagcctggggagcccacyagagtacagaatgcaaactacagggacacatgcctttgagcaggtagtagatagccagggcctgtc

SEQ ID NO: 714909 - DNA, 640 bp, Homo sapiens
atgctctatttatgagaaattcacttagctctcttactggataggtatctagtaatgaactgtaagtaaatcacctgtgaatggcattattttaaaatgaaataatgtaccacaaacagtkttatttggatctcatagaagaatgaaagacatgctgtttgagaaatagttaatactatgataatgcaaatgtgtatgtctcctgcactagctcttaattcaaattttctatgtttactcatgtaaatgcctaatattgtcatcagcctacttaactagcccttgcttatattttatttgaatacaaagaaatactgaactcctaatatgtgtgttgttacaacattcagcatctctccaattatattcctttcataactcactgcactatattaactgctagtcttttaagctggaacataaactccatacgggactatgcaatgcctatcttgcccattctttcatctccaatatcattcctactgaatgacacatattagacgcttaaataatatttgtaggtgaatgaatatatcaatccaactagaatgtttgtgcaggaacatcttcctggcttttcttaaaaaatgtatatgttcttctaaattccaaatcttgataacaaacagttgacaaa

SEQ ID NO: 714910 - DNA, 640 bp, Homo sapiens
atgctctatttatgagaaattcacttagctctcttactggataggtatctagtaatgaactgtaagtaaatcacctgtgaatggcattattttaaaatgaaataatgtaccacaaacagttttatttggatctcatagaagaatgaaagacatgctgtttgagaaatagttaatactatgataatgcaaatgtgtatgtctcctgcactagctcttaattcaaattttctatgtttactcatgtaaatgcctaatattgtcatcagcctacttaactagcccttgcttatattttatttgaatacaaagaaatactgaactcctaatatgtgtgttgttacaacattcagcatctctccaattatattcctttcataactcactgcactatattaactgctagtcttttaagctggaacataarctccatacgggactatgcaatgcctatcttgcccattctttcatctccaatatcattcctactgaatgacacatattagacgcttaaataatatttgtaggtgaatgaatatatcaatccaactagaatgtttgtgcaggaacatcttcctggcttttcttaaaaaatgtatatgttcttctaaattccaaatcttgataacaaacagttgacaaa

SEQ ID NO: 714911 - DNA, 1007 bp, Homo sapiens
tttttattcttcattctgttagaaaatattgacctgactacttctaacttctattgrcttgactacttcttacgtttctatctatgaagcaaacactctacctactctaattgtaaagataatctgcttactagttctctaacaagacaggagagtacattgggccagctgcaaacatctcttgggagaactttatattaaaagtttctaatattttctaaaaaaactataactttcaagttgaaaataatgctttcaagtaagtgttattttcaacatcggcctgttccggtattcaaatttgctcatatttttctttttttcttctttttttctctctctgtttttttttccatttcttttctttttcccaccatctgtgtgccaagtagtgcttggctttattcattataggtatgaaatttacaagattttctgttaaaaagagctttcatttttagtctcaaatatccacaagggaaaaacagttttaggagtgggcttgaggaggaaaatgtgtatatttatatatacatttttagtagagatggggttacgacatgttggccaggtgggtctccaactcctgacctcaggtgatccacccgccttggcctcccaaagtgctaggattataggtatgagccaccgcgcccggccacatctttttagtttgcaatatcagatcaatcaactctaagcctccatgtacatatctggttgaccaataattcgctgttagtaatttgctgtgggagacgagccttctccacctctctaatattatacaagagtctcagtgattttagatagaccaaaacatccagattctccctactttccaatctagttaggaaagtgttgcgactgttggagactgaagagtaggtttctctttccacagccttagggctttcaccaattatctctaggtcagagctcttaatatttggtccattgactttgctgtgtcacaccttcaggcaccctttataccttagaaaagc

SEQ ID NO: 714912 - DNA, 2096 bp, Homo sapiens
tcgtaaaataacatcagttgattatcttacagttctaaagatcaaaagttctgaaatcgaagtgtcagtagggctgcatgtcttctagaaactctagggaagaatccatttccctgcctttcttcatttccaggggccatgcagattctttggtttatggctccatcttgcattgtcaaagtcagcagcagagtgtcttccgatctctctctgcttctgtacttacattatcttttgcggcactgagcctcctgcctttcccttatcaggactttgtgattacattgagtccactgagatcacttggggtaatctcccaatctcgagatcmtttacatgtgtaacaaaaaacgttttgaaataatacttcagatatgttactgatgacctttttatgaccagttcctttcatgtctcattaggtagttactacactctcttacagatagggtaatgaaacaattttatgttaaaactttgggtttcggttccaataaatgttcttgaacatgctttgagtaaggtgaataaggtgtttgagaaagaaagctttgttcttgtctttatttataaaatattcacttttaatatcaggaactaaattgaaaatactcaaaagatgaaaagtaataataataattgaagagtataaaatgtcacaagaaaaagtttttctactttttttgtgtaaatattatccaatatgttgtgggagaaaaaaggattacagaaacataataaatgtttagtctagtctttcaagaagagatataatacttaatgctctggtcggtgtatgggcttatagtcaggactcaggaagttatcaaataaaaaagctcaaaataagtaaggtgggaaaaatatgagagtagatgtaatatttggttcactgaaagactgtagcagggagtgattgcaaagaatctccaggtgtatcattatacctgaatgcctgtgcagtagtgattgactaagggagctgggtagtttggccaaagatggaattgggtctgtggtagtatctaatcaaaaacaacaacaacaaaaacaaaaggatgaaagtgcatagttcatattctggaaaaggaagatggaagagtgacttgtgtgcatgttatgtttagaaaggacattccagtgcctcatcatggatctgtgcacagtaggtttgggtacaagaataagtggagattttacacattagtaaagcccacagtgaatgagaattggaaactctggtccagacacatctttctgatgccagagctacatgtaagatcttagggtctgaatcatatctgggatagaataaggataaaaaggggcagagaggaagacttctgaattaatggagattttatagaagagaaacttgacagttgacttttgatgacaaatattaaaaccattgagtaaaatgagaactgagagcttagcatttctacaaaattatacagaaatttatttattttttgccaaacagttttattttctatccctgtaacattttatttaatacactaagaaatgctttaaggtagatataatttttatttcaattgtgatttccattgaaacttagagaacaaacaactggtaaatgatgttggggaacaaaatatcttctgcatttctgcacatcttgtgtagagacattgataatttttgctccagactgtctattcaaggatattggtatcacaaacagccttggaaaataaaaaaaaaaaaaatcatcttctttcaaggcagagagcagatttattttcaggctacagtaataaagataatgtctctctacagggcaaaggttgggcaggtttatcaacaacccttcaaaaatagggggctatctaagctcagggttcctcgactgtaccacaaacccgctgtgcacgcagcatccactgagcctttctgcctggcacccatgcaacttgaggtcaagaggaactgatacaaacatgaagctcatgatgccttctatgctatgcttaataatcctctgtttctgactcacaagtttttagtaatgtctatgacactgtgataggctaacttgttagcttgcatacagggtaaaatttcatatc

SEQ ID NO: 714913 - DNA, 2096 bp, Homo sapiens
tcgtaaaataacatcagttgattatcttacagttctaaagatcaaaagttctgaaatcgaagtgtcagtagggctgcatgtcttctagaaactctagggaagaatccatttccctgcctttcttcatttccaggggccatgcagattctttggtttatggctccatcttgcattgtcaaagtcagcagcagagtgtcttccgatctctctctgcttctgtacttacattatcttttgcggcactgagcctcctgcctttcccttatcaggactttgtgattacattgagtccactgagatcacttggggtaatctcccaatctcgagatcatttacatgtgtaacaaaaaacgttttgaaataatacttcagatatgttactgatgacctttttatgaccagttcctttcatgtctcattaggtagttactacactctcttacagatagggtaatgaaacaattttatgttaaaactttgggtttcggttccaataaatgttcttgaacatgctttgagtaaggtgaataaggtgtttgagaaagaaagctttgttcttgtctttatttataaaatattcacttttaatatcaggaactaaattgaaaatactcaaaagatgaaaagtaataataataattgaagagtataaaatgtcacaagaaaaagtttttctactttttttgtgtaaatattatccaatatgttgtgggagaaaaaaggattacagaaacataataaatgtttagtctagtctttcaagaagagatataatacttaatgctctggtcggtgtatgggcttatagtcaggactcaggaagttatcaaataaaaaagctcaaaataagtaaggtgggaaaaatatgagagtagatgtaatatttggttcactgaaagactgtagcagggagtgattgcaaagaatctccaggtgtatcattatacctgaatgcctgtgcagtagtgattgactaagggagctgggtagtttggccaaagatggaattgggtctgtggtagtatytaatcaaaaacaacaacaacaaaaacaaaaggatgaaagtgcatagttcatattctggaaaaggaagatggaagagtgacttgtgtgcatgttatgtttagaaaggacattccagtgcctcatcatggatctgtgcacagtaggtttgggtacaagaataagtggagattttacacattagtaaagcccacagtgaatgagaattggaaactctggtccagacacatctttctgatgccagagctacatgtaagatcttagggtctgaatcatatctgggatagaataaggataaaaaggggcagagaggaagacttctgaattaatggagattttatagaagagaaacttgacagttgacttttgatgacaaatattaaaaccattgagtaaaatgagaactgagagcttagcatttctacaaaattatacagaaatttatttattttttgccaaacagttttattttctatccctgtaacattttatttaatacactaagaaatgctttaaggtagatataatttttatttcaattgtgatttccattgaaacttagagaacaaacaactggtaaatgatgttggggaacaaaatatcttctgcatttctgcacatcttgtgtagagacattgataatttttgctccagactgtctattcaaggatattggtatcacaaacagccttggaaaataaaaaaaaaaaaaatcatcttctttcaaggcagagagcagatttattttcaggctacagtaataaagataatgtctctctacagggcaaaggttgggcaggtttatcaacaacccttcaaaaatagggggctatctaagctcagggttcctcgactgtaccacaaacccgctgtgcacgcagcatccactgagcctttctgcctggcacccatgcaacttgaggtcaagaggaactgatacaaacatgaagctcatgatgccttctatgctatgcttaataatcctctgtttctgactcacaagtttttagtaatgtctatgacactgtgataggctaacttgttagcttgcatacagggtaaaatttcatatc

SEQ ID NO: 714914 - DNA, 625 bp, Homo sapiens
atctttatggtctgcattatatttcttcatgaataatctatcttaaccatttattaaactatgaatacatttttataaatttggttgacatttaggtattttattaaacacaataaatgccagaggaaattgaattaagaaagcttgtaatacgctttactactagttaaaaaaaatttgtagctgtaaatggttctgctctatatcaagaataaatctgttcccagaccacagaattcttgttctttttcataccagaggccctgaycttttttgttgatagctggtttttaacagcttcaccataggttttattccttttgatttgtaagaaatttgattatcagccttgaacagaaatcataatcacagcaaaaggaggcaagtaacttggggaataatacagagtcatttgaacagcagtgtgaagtctgagtttaactgactcagatgcccactctagtagagcactcatcagacttcagaccaaatccacttcggacagagaagtctccataaggtattcagactggcttcccctgtctttaaaacaaataaataaactctacttaatataataataactgaatttaagtatttccacagattagcaatttacgtgaga

SEQ ID NO: 714915 - DNA, 625 bp, Homo sapiens
atctttatggtctgcattatatttcttcatgaataatctatcttaaccatttattaaactatgaatacatttttataaatttggttgacatttaggtattttattaaacacaataaatgccagaggaaattgaattaagaaagcttgtaatacgctttactactagttaaaaaaaatttgtagctgtaaatggttctgctctatatcaagaataaatctgttcccagaccacagaattcttgttctttttcataccagaggccctgaccttttttgttgatagctggtttttaacagcttcaccataggttttattccttttgatttgtaagaaatttgattatcagccttgaacagaaatcataatcacagcaaaaggaggcaagtaacttggggaataatacagagtcatttgaacagcagtgtgaagtctgagtttaactgactcagatgcccactctagtagagcactcatcagacttcagaccraatccacttcggacagagaagtctccataaggtattcagactggcttcccctgtctttaaaacaaataaataaactctacttaatataataataactgaatttaagtatttccacagattagcaatttacgtgaga

SEQ ID NO: 714916 - DNA, 1528 bp, Homo sapiens
catggccacacttgggcagctggtaaatgcagtctccagtctctagatgtctagatgggtggtcatgtaccctgctaaaacagagagagagagagagagaatatgagaagtaatgaataaatgtgagaataaaagaactgtggaagacaattaagagtctaccagttttattaaatatcttccatgtagaaatttttcctcttctaaccagattcaaaaaaattaatacagaatattcacatttgctgtttaaagcaaatgtgactaatttcaggcaccattcagctcctataaaccaatcacagcaccacagttagacataaacttctctaagtctcctatgttttgagtcgcaaaatattttcttttaaatttctatacaggagcaaacgttcattcacatacacattctgggcctgaaatattttgctcctccatttcaaacgcctattttggatttcaaaaatatatctcaagagcaaatatttaagagtacaggctgaagatgtattgataacatacagaatgtggctggctgtcttttccatatgaaatagtgaccagtggaccttgtcaagaaaggacaaaattgattcacttcaacacaatacagaaggggtggaggtaggtggggcggtagaggtagaagaygcttggcatcaagatgataaatgctgatgagacactgaatgatggatagatgagactgctttacactcctttacttttatgtttaaaaatttcaataatacaaagtttttgttgatttgcttgtttgcttttaagaatgaaccaaatgcatccctgccagcctcagtcttgtttgcacggaaagactacatgtgaacttctcagcaattattcaactgtttaacttaataaagcacaattgcccccaattttgcttgtaaagcttttacatttctgcaaaacaattttccattagttatatcacattttaatcaagatgattaaaatttagatttaaacagtgtggaaatgtgttagaagtatactctaaagatgtgaagttggccgggtgtggtggctcatacctgtaatcccagcactttgggaggctaaggtgggaggatcacttgagcccaggagttccagacaaggctgggagacacatttcctcaaaaaaaaaaaaaaaaaaaaaaaaaaaaaaaaaggaggaggggctcaaattaattattaattcaatcataaattagatgaatagatgaatatcagatgaattatatagcaccttttttctttcttttttttttttttttttgagacggagtctcaccccgtctccccaggctggagtgcagtggtgcgatctttgctcactgccacttttgcctcctgggttcaagcaattctcctgcctcagcctcccgagtagcaccaagcccggctaatttttgtatttttagaaaagagggggtttcactatcttggccaggctggtcttgaactcctgaccttgtgatccacccgcctcggcctcccaaagagtccttcatcttaaacttta

SEQ ID NO: 714917 - DNA, 2000 bp, Homo sapiens
tttgtattaataattttagtagaggtgggttttcaccatgttggccatgctggtctcaaactcctgtcctcaagtgatttacctgcctcagcctcccagagtaattgrattacagtcatgagccacagcggctggccagaaatgcatttttgatattcaggttcaactcttagggagcattcactggttcatagttcaaggactgtagtccttgctgtgcttaccccaacctgggcatgggcctttggcattgcctccacctctgagctcatgtgagttttgtctctagtgtgcagtgttttagcaactgtccaggaagtacaacatactgagagtccttgggggcaacgtctctgggatcagtttctggtaaagagcattgcttttatagattccagatcctagtgggtcagctgtgattgaggtgctttctcctctcagcaagcttcttatttctcaccaacaaccagatgtgggctttcatgcattatttgtgtgatgaaacataatcttaggctgatataattgtaccccaacatttttgagcatgaactgctaattcaatatagagagaaagaaaaggtggcaggaattgagagtcttgaactcctaaggtttgatgggacaggtcattttaccatcccaggcaatggtccttggtaaaaccagttaaattgcagtgtttctggtgactaaacctgtagtatgttgccatctagtggaacacatagcaaactaaagattaatgcagtctgaccataaagttcagctgagctaattaaatcagccagagaaaagaactgaaagtattttctaaaagcaagtgttttggtaacagcaaattcatatgaaaccagagttgactttttttaaagtaggcaaatggtcactctgtttctcaagagtgcttgaatatttgccacccagttactaacaagtttgcaaacatatcaccaggccaggacactgcattttcgttgtcgtctgtacaataggcagtttctcatctaaagtcctggagaaaatgcttggttatcagtaggttattttggtatgttttaaaatgtgattttcaggtgtccattccctttcttattaatacatacttatctttttttttctgttaagtttccaagaataaatctgctgatttttagaagaagccaacacatgacttcacaaagtagggatttcacattttaaattccaactagcatccccaaaatgtccagtcctgtggtttgagacctgatttttaggaagacgtgaaagattctactgtgggctgttttgtgagcactgactgcttgttttgtttgtgtctttgtcctgctcctgcttgcctagatccctccctggtgccacagcagctgagtgcgcatcaaatctgaagaaaatctacacagtacagacagtacaggtaagatcaagagagggactaactggattaacacggcacacgtcagacacctaatcacccaacttgaaatctgttgctgtgctggcagcccctgtccagggttctgctctggagttggctctcgggtccaggttggcacagctgcccttgaccaagtctgctccagggccagctgagcacacagtcaggtggcctgctcttctcttggccacctgctgaacctttatctactacctaaacctttcatagacccgcacaaaaggcagactgcagtgtggttaagagcgaaggtttttcaagatctttatctgtgttcctgttcaaactccagctctgccagtgcctctctgtgcctctgttccccatcagtgagaggcagtggcgccttccctgcagggttactaaaggtttagaggtcacatggggagagcaggatagtgtggagcgtgaaggtggagagtctctgcttggtttcctacttcacttcgcaattccatcatcctaaattaggcatggatcaacccctttcatctctgtaaaactggtctaatggtagcacctacctccatgggttactgtg

SEQ ID NO: 714918 - DNA, 2000 bp, Homo sapiens
tttgtattaataattttagtagaggtgggttttcaccatgttggccatgctggtctcaaactcctgtcctcaagtgatttacctgcctcagcctcccagagtaattggattacagtcatgagccacagcggctggccagaaatgcatttttgatattcaggttcaactcttagggagcattcactggttcatagttcaaggactgtagtccttgctgtgcttaccccarcctgggcatgggcctttggcattgcctccacctctgagctcatgtgagttttgtctctagtgtgcagtgttttagcaactgtccaggaagtacaacatactgagagtccttgggggcaacgtctctgggatcagtttctggtaaagagcattgcttttatagattccagatcctagtgggtcagctgtgattgaggtgctttctcctctcagcaagcttcttatttctcaccaacaaccagatgtgggctttcatgcattatttgtgtgatgaaacataatcttaggctgatataattgtaccccaacatttttgagcatgaactgctaattcaatatagagagaaagaaaaggtggcaggaattgagagtcttgaactcctaaggtttgatgggacaggtcattttaccatcccaggcaatggtccttggtaaaaccagttaaattgcagtgtttctggtgactaaacctgtagtatgttgccatctagtggaacacatagcaaactaaagattaatgcagtctgaccataaagttcagctgagctaattaaatcagccagagaaaagaactgaaagtattttctaaaagcaagtgttttggtaacagcaaattcatatgaaaccagagttgactttttttaaagtaggcaaatggtcactctgtttctcaagagtgcttgaatatttgccacccagttactaacaagtttgcaaacatatcaccaggccaggacactgcattttcgttgtcgtctgtacaataggcagtttctcatctaaagtcctggagaaaatgcttggttatcagtaggttattttggtatgttttaaaatgtgattttcaggtgtccattccctttcttattaatacatacttatctttttttttctgttaagtttccaagaataaatctgctgatttttagaagaagccaacacatgacttcacaaagtagggatttcacattttaaattccaactagcatccccaaaatgtccagtcctgtggtttgagacctgatttttaggaagacgtgaaagattctactgtgggctgttttgtgagcactgactgcttgttttgtttgtgtctttgtcctgctcctgcttgcctagatccctccctggtgccacagcagctgagtgcgcatcaaatctgaagaaaatctacacagtacagacagtacaggtaagatcaagagagggactaactggattaacacggcacacgtcagacacctaatcacccaacttgaaatctgttgctgtgctggcagcccctgtccagggttctgctctggagttggctctcgggtccaggttggcacagctgcccttgaccaagtctgctccagggccagctgagcacacagtcaggtggcctgctcttctcttggccacctgctgaacctttatctactacctaaacctttcatagacccgcacaaaaggcagactgcagtgtggttaagagcgaaggtttttcaagatctttatctgtgttcctgttcaaactccagctctgccagtgcctctctgtgcctctgttccccatcagtgagaggcagtggcgccttccctgcagggttactaaaggtttagaggtcacatggggagagcaggatagtgtggagcgtgaaggtggagagtctctgcttggtttcctacttcacttcgcaattccatcatcctaaattaggcatggatcaacccctttcatctctgtaaaactggtctaatggtagcacctacctccatgggttactgtg

SEQ ID NO: 714919 - DNA, 2000 bp, Homo sapiens
tttgtattaataattttagtagaggtgggttttcaccatgttggccatgctggtctcaaactcctgtcctcaagtgatttacctgcctcagcctcccagagtaattggattacagtcatgagccacagcggctggccagaaatgcatttttgatattcaggttcaactcttagggagcattcactggttcatagttcaaggactgtagtccttgctgtgcttaccccaacctgggcatgggcctttggcattgcctccacctctgagctcatgtgagttttgtctctagtgtgcagtgttttagcaactgtccaggaagtacaacatactgagagtccttgggggcaacgtctctgggatcagtttctggtaaagagcattgcttttatagattccagatcctagtgggtcagctgtgattgaggtgctttctcctctcagcaagcttcttatttctcacyaacaaccagatgtgggctttcatgcattatttgtgtgatgaaacataatcttaggctgatataattgtaccccaacatttttgagcatgaactgctaattcaatatagagagaaagaaaaggtggcaggaattgagagtcttgaactcctaaggtttgatgggacaggtcattttaccatcccaggcaatggtccttggtaaaaccagttaaattgcagtgtttctggtgactaaacctgtagtatgttgccatctagtggaacacatagcaaactaaagattaatgcagtctgaccataaagttcagctgagctaattaaatcagccagagaaaagaactgaaagtattttctaaaagcaagtgttttggtaacagcaaattcatatgaaaccagagttgactttttttaaagtaggcaaatggtcactctgtttctcaagagtgcttgaatatttgccacccagttactaacaagtttgcaaacatatcaccaggccaggacactgcattttcgttgtcgtctgtacaataggcagtttctcatctaaagtcctggagaaaatgcttggttatcagtaggttattttggtatgttttaaaatgtgattttcaggtgtccattccctttcttattaatacatacttatctttttttttctgttaagtttccaagaataaatctgctgatttttagaagaagccaacacatgacttcacaaagtagggatttcacattttaaattccaactagcatccccaaaatgtccagtcctgtggtttgagacctgatttttaggaagacgtgaaagattctactgtgggctgttttgtgagcactgactgcttgttttgtttgtgtctttgtcctgctcctgcttgcctagatccctccctggtgccacagcagctgagtgcgcatcaaatctgaagaaaatctacacagtacagacagtacaggtaagatcaagagagggactaactggattaacacggcacacgtcagacacctaatcacccaacttgaaatctgttgctgtgctggcagcccctgtccagggttctgctctggagttggctctcgggtccaggttggcacagctgcccttgaccaagtctgctccagggccagctgagcacacagtcaggtggcctgctcttctcttggccacctgctgaacctttatctactacctaaacctttcatagacccgcacaaaaggcagactgcagtgtggttaagagcgaaggtttttcaagatctttatctgtgttcctgttcaaactccagctctgccagtgcctctctgtgcctctgttccccatcagtgagaggcagtggcgccttccctgcagggttactaaaggtttagaggtcacatggggagagcaggatagtgtggagcgtgaaggtggagagtctctgcttggtttcctacttcacttcgcaattccatcatcctaaattaggcatggatcaacccctttcatctctgtaaaactggtctaatggtagcacctacctccatgggttactgtg

SEQ ID NO: 714920 - DNA, 648 bp, Homo sapiens
aaaaccaaacaccacatgttctcactcataagtgggagctgaacaatgagaacacatggacacggagggyaacatcacacaccagggcctgtcagggggataacattaggagaaatacttaatgtagataatggtttgatggggtgcagcaaaccaccatggcacatgtacacctatgtaacaaacctgcacattctgcacatgtacactagaacttaaaagtataataataataaaaaaatttccaattgagaaagtaagcagattatagatgaccaggtatctctcaccaccatacaaaatctaagtagttgggacatgtatgtgataaacttcaaagttttggcattatagaagctatttctaaacttttcttgaattttatgcttgtccctcatagcttacatgcttttctcattagtgaaacatatctgtcatttatgacacacatatgttattcatcacacagtactgtgatataagcaggtaatatcaaaaagtatgtattactgggttaaaaggtgattcctatgaggattctcgttaaaattgtctagaaacattgtaataactaagaaaaaatatttcatgtgacttcatacaataatatatgttaaaaagtcatgatgcctcactttttgggtaaaa

SEQ ID NO: 714921 - DNA, 1264 bp, Homo sapiens
tggacctctatcaacctcacctgcatttagatgctcatgtcctcagtgttccctcacatatatgaggtgagtgtagcgggtaactgtgggtgtattatttctttgatccttcctatgatcaattatgcttaagtccagaacctaaatatttcaaaaggcatggaatcatgaatgtcagcaccacaaatgtatgtcttgcaaagcattttcttttctttccattatttttcatgaatgcttttcctcattcagttataaataacaacgactatttagttttctgtaagttagatatttattaagggagacattcttaggggatatagatgccttatcccaattagtgcatacatttagtgagccatttacatgtagcaaattatggtttggctttctaatacaccaaagagtgatgtaagatttgaatccatattcttacaaaattatcttatatcgagttagagaacatcaaggcaatgagggaatattatccaagaaaatatgctatccaaacaccaataaactatatacagtatttaaacaaaatatattttatatgagagaatgcatataccaaacacttcaacaatttaaagattacatctttttgttgatcatattgaattatgaaaggttcagttcctcatttcctatgaggcttagagcattcagcaagaagagggatggcacttcacctcagaaatgtgtttgggccatggtagctgaaaatgctcaccatctggaatgtatcacgtgggtagtatttatgttctccagagtagagagacagatgtccacattaaaaaatacttgccatgctgtcatgcttgtttcctaagtgcagaaaacatgctttctgttcaaagagactcacatatgagtttgtccctagaataattttctttacattccaattaaaaatagattaaatgaatttcaggaaattttatamcaagttaaaattaatttaaaaacttttgtggcatattgccatcatttttcactgtttaacaaatagtttgaaacttgaattgatcatgcctgcctgtgttcaataagtgaaacttgcttctcagcagcattaaaaaggaaaataatttgcagatttctaataatttttttcttattctatcttcttagtcattggataaagcttaatttcacttatatacaatagctttctattgtatattttacacatagcagaatattactttgtgtgttttatgaatgctttgcttcacattaaaaagaatgaacctca

SEQ ID NO: 714922 - DNA, 1103 bp, Homo sapiens
gaacaaggctaggaaaatgtggtaattaggtgttatatttaaagaagaatttgcctaaattttagagggctttattcattctcaaactgttttatacctatgagacattggttaaaaggatatgttgagaattgccatagaaggctacactggattttattattttgataaatattttctgcttattgattcttgtttctatattccaatttttaatatttgccttgtaaaagtttaatgttctcattttctctgaccttccaaattaaccttgttcatatcactgcagtttgtatcctgaattctctattatgttcagtttggactatattattttcttttttaaagaaggccatttttttcaacttctcataactccttgaatagcatatattgcatcagtcaaccaatttatatattctgcatattacttctgggtttctcattatcgattacaaacagtgaattactttgttcatggaaagcatgtgagggttgtgttcttctattttttaaaccttcattctcaagagaatatctttatttgtaaaatatgtctgtccagaaaaccactctactctctattaaatgctctgtatgtggcctgtgatataatacaataagcttattttagcaaattggttctgcaactaacacataaataggatatttttaaacactttaaattgatattctaatcttaattatgaattttttctttcaaagtrtattgcaaaaaattaataattacatttataaatgcatgaatacctactatattataaactttgatttaaaataaatgtacattttagggtaaacatttattgagtgcttaatatatgtcaaacacagtataaaacatttttggttgtatattaactaattaattttcacagaaactttataaggtgatatggtttggttgtgtccccacccaaatctcatcttgaattgtagctcccacaattcccacgtgttcttggaggaacccactaggaagtgattgaatcgtgggagcgggtcttccctgtgctgttctttagatagtgaatgagtcttgtgagatccgatggttttaaaaatgggagtttccctgcata

SEQ ID NO: 714923 - DNA, 1103 bp, Homo sapiens
gaacaaggctaggaaaatgtggtaattaggtgttatatttaaagaagaatttgcctaaattttagagggctttattcattctcaaactgttttatacctatgagacattggttaaaaggatatgttgagaattgccatagaaggctacactggattttattattttgataaatattttctgcttattgattcttgtttctatattccaatttttaatatttgccttgtaaaagtttaatgttctcattttctctgaccttccaaattaaccttgttcatatcactgcagtttgtatcctgaattctctattatgttcagtttggactatattattttcttttttaaagaaggccatttttttcaacttctcataactccttgaatagcatatattgcatcagtcaaccaatttatatattctgcatattacttctgggtttctcattatcgattacaaacagtgaattactttgttcatggaaagcatgtgagggttgtgttcttctattttttaaaccttcattctcaagagaatatctttatttgtaaaatatgtctgtccagaaaaccactctactctctattaaatgctctgtatgtggcctgtgatataatacaataagcttattttagcaaattggttctgcaactaacacataaataggatatttttaaacactttaaattgatattctaatcttaattatgaattttttctttcaaagtgtattgcaaaaaattaataattacatttataaatgcatgaatacctactatattataaactttgatttaaaataaatgtacattttagggtaaacatttattgagtgcttaatatatgtcaaacacagtatraaacatttttggttgtatattaactaattaattttcacagaaactttataaggtgatatggtttggttgtgtccccacccaaatctcatcttgaattgtagctcccacaattcccacgtgttcttggaggaacccactaggaagtgattgaatcgtgggagcgggtcttccctgtgctgttctttagatagtgaatgagtcttgtgagatccgatggttttaaaaatgggagtttccctgcata

SEQ ID NO: 714924 - DNA, 600 bp, Homo sapiens
aaattcagtaaagtaacaaaatcaacatgtaagaatcagaagcctttctatatgccaacagcaaataatctgaaaaagaaatcaagaaagtaatcccatttacaatagataaaataaaatatgcatgaatgaacttaatcaaagaagtgaaagactctactttgaggaaaaaatttacaatttctgacaaacactatatgaccttgtaatcgtacttcaragtgtaaaaaaataaaaattcatgtttacacaaaagcctgtatgccaatatttacagatgcttcattcataaattcctagaattggacacatctattttgtttttccttttataataaattctggaaaatataaatgtattgggataaaacaatagttgggtgtaatagttaagtacaggagtgtcatgcaaggaatattttcaggggaagtaatgatcatgggtggggatggtagatgcatggctctaactctagatttcaatttagatttgtcaaaaatcatggaactgtgcaccacaaagaatgaactttcctgcatgaaaattaaaatcaaatcaatgagcattagggtatttcacaggaagaaatgcatactgtg

SEQ ID NO: 714925 - DNA, 600 bp, Homo sapiens
aaattcagtaaagtaacaaaatcaacatgtaagaatcagaagcctttctatatgccaacagcaaataatctgaaaaagaaatcaagaaagtaatcccatttacaatagataaaataaaatatgcatgaatgaacttaatcaaagaagtgaaagactctactttgaggaaaaaatttacaatttctgacaaacactatatgaccttgtaatcgtacttcaaagtgtaaaaaaataaaaattcatgtttacacaaaagcctgtatgccaatatttacagatgcttcattcataaattcctagaattggacacatctattttgtttttccttttataataaattctggaaaatataaatgtattgrgataaaacaatagttgggtgtaatagttaagtacaggagtgtcatgcaaggaatattttcaggggaagtaatgatcatgggtggggatggtagatgcatggctctaactctagatttcaatttagatttgtcaaaaatcatggaactgtgcaccacaaagaatgaactttcctgcatgaaaattaaaatcaaatcaatgagcattagggtatttcacaggaagaaatgcatactgtg

SEQ ID NO: 714926 - DNA, 547 bp, Homo sapiens
aacaatattactatatctaccttattgttgaaatgtttgcagatttaattactgagagtcttacagttggctcttatgtgagtgttatgtttattttagaactttttcactttctggcaccagaaggtactccaggctcatcttatatatttctaccccagtcccctaatcagtcatttctcctaggagcctaggtttctttaattagagaatactgttataaatcgagatctgggaactagttgtgcacatcgttactggggtgccattgcttctagaccctttcagatgaagtctatgtatatacactaacctatgtgtatgcacatatctctaaagtttttatacataaccayctacagttgacccttgaataatgtgggggttaggaattctgaaaaaacccatgcagttgaaaatccacattcaacttttgactcccccaaatcttaactactgataacctactgttttggaagccttatggatagcagtggattaacacatattttgtatgctatatccattacatacattactcttacaa

SEQ ID NO: 714927 - DNA, 547 bp, Homo sapiens
aacaatattactatatctaccttattgttgaaatgtttgcagatttaattactgagagtcttacagttggctcttatgtgagtgttatgtttattttagaactttttcactttctggcaccagaaggtactccaggctcatcttatatatttctaccccagtcccctaatcagtcatttctcctaggagcctaggtttctttaattagagaatactgttataaatcgagatctgggaactagttgtgcacatcgttactggggtgccattgcttctagaccctttcagatgaagtctatgtatatacactaacctatgtgtatgcacatatctctaaagtttttatacataaccatctacagttgaccyttgaataatgtgggggttaggaattctgaaaaaacccatgcagttgaaaatccacattcaacttttgactcccccaaatcttaactactgataacctactgttttggaagccttatggatagcagtggattaacacatattttgtatgctatatccattacatacattactcttacaa

SEQ ID NO: 714928 - DNA, 2160 bp, Homo sapiens
cactatggggaagtcacccccataattctattatctccacctggccccattcttgacatgtgggaattattacaattcaaggtgagatttgggtggggacacagccaaatcatgtcagaaccatcttctgaaatctggttaacagcctctttcctttgcttgttcagactacagctcatcctgcgacttctgaattctcactgtttgagtggagtgattattttatgcatatggtacttgcttaagttactataatatgctactgcacaccagctggtaaaaattgggatacggtctgtaaccagggtagagaggagtacttgcacttccaactcccccactcagatacatcctccaatttggcacttttagcctggcaaacagctctgaatctcacccatcctccatccaatctgcagctaaggatgttcatcaaacaacttactatatctcatccttagccagagtggctctttgcaggccggctgtctgttgccaagaactttactaattcaccgcgttgttgtacacacaatagtgagaagctgaagaatttacatttgatggagggacatagttagcttagagatacttgacaaggtatctccttcttatctgtttctaaactatcacctgacaggtgcaaccctgctccagatctgtaatgagggcaagggctttcctaaggagatttcagtttggctgtatctatagttggcagaagaatgtttcaatgaccttcactccaacccatttctgaggctatcatggtgaaatgtccacataaaatatctattttatgggatagaaaatttaaaactttactttttatatgtgatttaaaatatttgttacattggttttctgtttaacacagcctctactttaggtaagtgtccatgtatagtcaattttcggagttattttgctagacaatttgggagaaattcaaattttctcatttagctgaggtttagttcctgatttaggatctttcctacagagacttgtttgtgctatgagaggaaaaaaatattcagggacaatccctgtcacttgcaggtgctattgctttttctgaacataatttttcttctatttttctaaaaaaaaaattgcttcttaaggataaagtatctcctagagtaggattgcttgtattttctgtattacaaattacacgttaaacctcactgtgctaggttagaatactccaactttgatttagaatagcacttatggattcctgaattatttcaaacccctattgagaagccagagtaaagaccagctactcatagttatgactcatttgttgtaacttccatttcctgcagtatcagaatgatgatctttcattgaagcaaaagtggcttctattggaggatgcagagttaccataaaataccttcaccactaacctacataccatcaaaatgtttgccaacaaattttagaggttttaaagggattttctattaatatktcacataacactgaaatgcttttacaaagatgagaagtatgtgtttgcaattgaaaaattatttcaatatgacaccatttgtatgtctggaagaaattcttgtatgaaacattgagtttcaccatgttgtaattttgattctagagaagtttgctattttttcccctttggaatattcagtgagtccttgagatggtgattttggtgctatttttctcctgtcatcttttctgaatgttcttgagcttgattggagacataagaagagattaggaaagagaagagaagtcagataatcttctagacaaacagtagtaacaaacacatacaaagaccccaaaagtaaatgttcatgttagataacatgtgctttggtgtgttcacagaaacataatgaaatatttcaataacaactgtatatagaatttaagaaactgatagtaattaactagtttactattcatgtaaaagcaatttgcagtattatagaatgctatacacattttttctagattatttataaagttatacaattaaaactttactagctttaacatttatacatgtaggtagaaaaacaatcccttcaatctcagttgtacttttctaaaattgtaaatgtttgtttttataataataagactttgcagaatatgctagccaaagtaatgaaa

SEQ ID NO: 714929 - DNA, 2160 bp, Homo sapiens
cactatggggaagtcacccccataattctattatctccacctggccccattcttgacatgtgggaattattacaattcaaggtgagatttgggtggggacacagccaaatcatgtcagaaccatcttctgaaatctggttaacagcctctttcctttgcttgttcagactacagctcatcctgcgacttctgaattctcactgtttgagtggagtgattattttatgcatatggtacttgcttaagttactataatatgctactgcacaccagctggtaaaaattgggatacggtctgtaaccagggtagagaggagtacttgcacttccaactcccccactcagatacatcctccaatttggcacttttagcctggcaaacagctctgaatctcacccatcctccatccaatctgcagctaaggatgttcatcaaacaacttactatatctcatccttagccagagtggctctttgcaggccggctgtctgttgccaagaactttactaattcaccgcgttgttgtacacacaatagtgagaagctgaagaatttacatttgatggagggacatagttagcttagagatacttgacaaggtatctccttcttatctgtttctaaactatcacctgacaggtgcaaccctgctccagatctgtaatgagggcaagggctttcctaaggagatttcagtttggctgtatctatagttggcagaagaatgtttcaatgaccttcactccaacccatttctgaggctatcatggtgaaatgtccacataaaatatctattttatgggatagaaaatttaaaactttactttttatatgtgatttaaaatatttgttacattggttttctgtttaacacagcctctactttaggtaagtgtccatgtatagtcaattttcggagttattttgctagacaatttgggagaaattcaaattttctcatttagctgaggtttagttcctgatttaggatctttcctacagagacttgtttgtgctatgagaggaaaaaaatattcagggacaatccctgtcacttgcaggtgctattgctttttctgaacataatttttcttctatttttctaaaaaaaaaattgcttcttaaggataaagtatctcctagagtaggattgcttgtattttctgtattacaaattacacgttaaacctcactgtgctaggttagaatactccaactttgatttagaatagcacttatggattcctgaattatttcaaacccctattgagaagccagagtaaagaccagctactcatagttatgactcatttgttgtaacttccatttcctgcagtatcagaatgatgatctttcattgaagcaaaagtggcttctattggaggatgcagagttaccataaaataccttcaccactaacctacataccatcaaaatgtttgccaacaaattttagaggttttaaagggattttctattaatatttcacataacactgaaatgcttttacaaagatgagaagtrtgtgtttgcaattgaaaaattatttcaatatgacaccatttgtatgtctggaagaaattcttgtatgaaacattgagtttcaccatgttgtaattttgattctagagaagtttgctattttttcccctttggaatattcagtgagtccttgagatggtgattttggtgctatttttctcctgtcatcttttctgaatgttcttgagcttgattggagacataagaagagattaggaaagagaagagaagtcagataatcttctagacaaacagtagtaacaaacacatacaaagaccccaaaagtaaatgttcatgttagataacatgtgctttggtgtgttcacagaaacataatgaaatatttcaataacaactgtatatagaatttaagaaactgatagtaattaactagtttactattcatgtaaaagcaatttgcagtattatagaatgctatacacattttttctagattatttataaagttatacaattaaaactttactagctttaacatttatacatgtaggtagaaaaacaatcccttcaatctcagttgtacttttctaaaattgtaaatgtttgtttttataataataagactttgcagaatatgctagccaaagtaatgaaa

SEQ ID NO: 714930 - DNA, 2160 bp, Homo sapiens
cactatggggaagtcacccccataattctattatctccacctggccccattcttgacatgtgggaattattacaattcaaggtgagatttgggtggggacacagccaaatcatgtcagaaccatcttctgaaatctggttaacagcctctttcctttgcttgttcagactacagctcatcctgcgacttctgaattctcactgtttgagtggagtgattattttatgcatatggtacttgcttaagttactataatatgctactgcacaccagctggtaaaaattgggatacggtctgtaaccagggtagagaggagtacttgcacttccaactcccccactcagatacatcctccaatttggcacttttagcctggcaaacagctctgaatctcacccatcctccatccaatctgcagctaaggatgttcatcaaacaacttactatatctcatccttagccagagtggctctttgcaggccggctgtctgttgccaagaactttactaattcaccgcgttgttgtacacacaatagtgagaagctgaagaatttacatttgatggagggacatagttagcttagagatacttgacaaggtatctccttcttatctgtttctaaactatcacctgacaggtgcaaccctgctccagatctgtaatgagggcaagggctttcctaaggagatttcagtttggctgtatctatagttggcagaagaatgtttcaatgaccttcactccaacccatttctgaggctatcatggtgaaatgtccacataaaatatctattttatgggatagaaaatttaaaactttactttttatatgtgatttaaaatatttgttacattggttttctgtttaacacagcctctactttaggtaagtgtccatgtatagtcaattttcggagttattttgctagacaatttgggagaaattcaaattttctcatttagctgaggtttagttcctgatttaggatctttcctacagagacttgtttgtgctatgagaggaaaaaaatattcagggacaatccctgtcacttgcaggtgctattgctttttctgaacataatttttcttctatttttctaaaaaaaaaattgcttcttaaggataaagtatctcctagagtaggattgcttgtattttctgtattacaaattacacgttaaacctcactgtgctaggttagaatactccaactttgatttagaatagcacttatggattcctgaattatttcaaacccctattgagaagccagagtaaagaccagctactcatagttatgactcatttgttgtaacttccatttcctgcagtatcagaatgatgatctttcattgaagcaaaagtggcttctattggaggatgcagagttaccataaaataccttcaccactaacctacataccatcaaaatgtttgccaacaaattttagaggttttaaagggattttctattaatatttcacataacactgaaatgcttttacaaagatgagaagtatgtgtttgcaattgaaaaattatttcaatatgacaccatttgtatgtctggaagaaattcttgtatgaaacattgagtttcaccatgttgtaattttgattctagagaagtttgctattttttcccctttggaatattcagtgagtccytgagatggtgattttggtgctatttttctcctgtcatcttttctgaatgttcttgagcttgattggagacataagaagagattaggaaagagaagagaagtcagataatcttctagacaaacagtagtaacaaacacatacaaagaccccaaaagtaaatgttcatgttagataacatgtgctttggtgtgttcacagaaacataatgaaatatttcaataacaactgtatatagaatttaagaaactgatagtaattaactagtttactattcatgtaaaagcaatttgcagtattatagaatgctatacacattttttctagattatttataaagttatacaattaaaactttactagctttaacatttatacatgtaggtagaaaaacaatcccttcaatctcagttgtacttttctaaaattgtaaatgtttgtttttataataataagactttgcagaatatgctagccaaagtaatgaaa

SEQ ID NO: 714931 - DNA, 810 bp, Homo sapiens
gtctcttccattatatttgcaaattaacagataaagcagcctattcaaatacaaagaaatgtttacttctgacctttaacaattgaattcaattttgtgtacctctactaagttgaaaaataaaaggattagatttttttaaatggggccaattttttaaatcaattaaaaactacttttaatctgcattcataagaaaaatatttcttagctaaggtttaagttaaattctcacctcaataatgcgtattgagaaatatttcttaaaatattttaataagatgcttgaaagtcatcttaaataacaatatatttaaaagacttaattttcataatgaaaaattactgccttatataatttaatgaaatggtgaaatggttctttttttttttttgagacagagtctygctctgtcaccaggctggagtgcagtggtacgatctcggctcactgcaacctctgactccctgattcaagcgattctcctgcctcagcatctggagtggctgggatttcaggcacgcagcaccacacctggctaatttttgtatttttggtagaacctgggtttcaccatgtttgccaagatgatctcgacctcctgacctcgtgatctgcctgcctcggcctcccaaagtgctgggattacagacttgagccaccagactcagccaatgaaatggttcttatgtaaacctctctctcaattatctttgctaaggtagttttgttttataatttttaaatattttacataaattatttcctcatcctgaatgccactaaaagtgtaatatttattttattat

SEQ ID NO: 714932 - DNA, 810 bp, Homo sapiens
gtctcttccattatatttgcaaattaacagataaagcagcctattcaaatacaaagaaatgtttacttctgacctttaacaattgaattcaattttgtgtacctctactaagttgaaaaataaaaggattagatttttttaaatggggccaattttttaaatcaattaaaaactacttttaatctgcattcataagaaaaatatttcttagctaaggtttaagttaaattctcacctcaataatgcgtattgagaaatatttcttaaaatattttaataagatgcttgaaagtcatcttaaataacaatatatttaaaagacttaattttcataatgaaaaattactgccttatataatttaatgaaatggtgaaatggttctttttttttttttgagacagagtctcsctctgtcaccaggctggagtgcagtggtacgatctcggctcactgcaacctctgactccctgattcaagcgattctcctgcctcagcatctggagtggctgggatttcaggcacgcagcaccacacctggctaatttttgtatttttggtagaacctgggtttcaccatgtttgccaagatgatctcgacctcctgacctcgtgatctgcctgcctcggcctcccaaagtgctgggattacagacttgagccaccagactcagccaatgaaatggttcttatgtaaacctctctctcaattatctttgctaaggtagttttgttttataatttttaaatattttacataaattatttcctcatcctgaatgccactaaaagtgtaatatttattttattat

SEQ ID NO: 714933 - DNA, 1418 bp, Homo sapiens
acttgagatttcagaatcaaagtcaaaagattttgaaaaagccaaaattataggatatataaatattaggttggtgcgaagtgattgcagtttttgccattacctttaatggaaaaaaatgcaattacttttacacctatctaccattatggtttgctaagtttttataagtattaatagttacagcatgcttaatttgttgtctatgtgtcttctttagcggttagtatattctgaatattttttcttttgtaaatagtgaatacttgaggggacacgctttgaggctatgcaaatttctggttctccttaaacttttgtcctctaacattagcattcatcaatggactgcacctacagtagctattactgcggtgtcctcatggtcactgtctacttccctcatttctcctgcgcatattaactgcgcctcccctgtaatgaagagttacaccctttccctcatttgtttgtctattaaatcatttatgtaatatagactcacagatgtttatcttatatattagttatttcttttagctcattgctcaaattgttccagttttgtccattataaactctttagattaggttttgtgtcgttttaatatactttccttttttctttctttccttctttttttttttttttttttttgaatagtacttatttactttctcttgccacaagatgctccaggctcatcctggattgttcgattgttcctgtcacagccttggtgaattagtcagctgggctgccataacaaaatgctataatatatgagtggcttaaacaatagcagtgtatttctcatagttctggtggcaagaagttcaagatcaagctgcctacaaggaagacttccttctgaggcctctctcttggcttgtaggagactgccatcttggtgtgtgctcacatggtgaagagagagagcactctctggtgtctcttcttatatgagacttcatctaacacyaattacctccaaaaagccacatcacaaaataccgttaaattagaggttagggcttcaacataggactttgaggcaggggacacaaaaacacttagtccatcacacttagaatcaagcatttcttccaggagccctggtttactttattagaaaatgtttgtatttaggagccaagacctggacattaggattgcttgttgctactggggtgttcctgcttctaagtaacattaggaagaactaggaaatatctgtatatatactaatttatgtatatacacaatttttattgatttattaatagactttattttctagagcacttttaggagtacagcaaaattgagtgaaaacgacagatttctcacatagccctgtccccacacatgcacaactttccccacgatttacatctcacaccagagcggtacattt

SEQ ID NO: 714934 - DNA, 1117 bp, Homo sapiens
gctctccccacccacatgttccctgggcagaacctcaactaagctggagacacctacagcagcagatgtgtgtccctttcgtcccgcttgacttcatttctctctcccgtccttcaggagaagacagacctcccagggtccccctcgaccccatttctccctcccatccttcaggagaagacagacctccctgggtccccctcgaccccatttctccctcccacccttcaggagaagacagacctccctgggtccccctcgaccccatttctccctctagtcctccagaagaagacagacctccctgggagggcctacctgacacagccgtggaggggttgctgggctccccgtagcccgcctcattcacagccaccacccggaactcgtaagtcactccttgccggagcttatccaggctgagggtgtaggatgtggcgctccgcgggatgtccttcacaaacatgtcccataagccttcatctgcaagagggatggggaggcgagagcagaggttagaagtgcgaagtcccagatgcgagccccatgcacctgcctggtgggtcggcttgcagcagccctggatgaggcatcaggggcactggatgcggagtgagtgctgaatggggacggagtctcagtttcgcaagtcgaagagcgttctggagatgaatggtgtgatgattgtagaacaacgtgctcaatgctactgaactggacacttgaaatggtcatagtgggaaacgttaggttatgcatatctccccacagtaaatatatgtatgtatgatttattataaacctcacatataagaaaacatgaataaactcaaaattaaagccattaataaatttaaaattaaaatcagacatagagaggawgttagaggcacatgacttgggttctgaggcatctctccagccacagagcaaaagaaatgtgatcagtgagatttgttgtaaagaatcacgatgagccaggcatggtggctcatgcctgttatcccagtactttgagaggctgcggttacaggactgcttgagcccagagctggagaccagcctgggcaacacagggaaacatatatatgcacaattttaaaaattagccaggcat

SEQ ID NO: 714935 - DNA, 1474 bp, Homo sapiens
aacttccaccccagtggaattaacactaattatatttaattccacacaaacttttgtcccagttgtagaccatttacctacttcctgacagcaaacactacaccgctgtgaaattttattttaacacatttgtgcccattttcagcattaataatcgtgtgtggaagtggcagcaaaatgaagatatcgcctgagcatggaaccacaaatgcctgaacgtgtgatggcatttgtgaaacaaaagcatgacatactttttctttccaaatgaggcagtgccacaactaaaaaagccagttcgcctttcgctttctaaaatcatcttgctggagagaacggttatcaaatcccatccactgcccatgtaaaataaataccattcagaaaagcgtggcatggatggccatacttctgatgggtttataactgtagattgcatacgatcccaacgtgaagcctgaaatacgacattcaacgtcaggcttattccaggctactgctgtggctacttttgtaattcaaccagtggggcgttttaggctaacgtatattgcctctaagctgataagcattttcctgatcccaggccccttctaaaattgaacacacacgttcagctggggacacctagatggaaggaagggaaagaggagaacccgaagtgaaggaaaagtcaccaagaacagtttcgtggaaaaaaaaaaaaaactctcaagaattaagaatgttgagttgcttgaatggagcttgggcaggaaaaagaccataactctcacacacgtgaaggttactgatacccaggaggtaaaagaagtatttaacatgctctaaagaagggtaaccagagtaatggggcgaaaccaagggaggacgtcctggaatgtaatattagaaataaacttccaaacagggaagtgtccatccgagtgtgaaatgggtttatcagaaacaagctgcatgccagtttcattgacattgcaaagaaggttagaataaaaagctaatgaacagaaagaagaaagaggcaaacagggtgtgtgttgagagtggtggaatatgaaggatggtgcatttgtccaggctggggctgctggcctgaggaatggtggtggagtttttttacagagcatcttctgagcaccaggagagtcccggaagctgagtttgacactagcaagacctgccctgaattggggactgctggatgcctggaagctcccctacacttacgttcctgaagttgggctttttatcaccttaggactatggcttcccaaacttggcagtcagcgtcccggcaaaagcctctctattactgcgaggtagtgtttatggagtcacagctaagaattacagaraaaatcataataggtgaatcttttttttttaaaaaaaacaacattttttgactttgcaaataaattgcagaattatcaccattgttgaaatattttccattaaaactagagtttat

SEQ ID NO: 714936 - DNA, 604 bp, Homo sapiens
ttcttccgcctcaggcttccaaagtgttgggatttctggtgtgagccaccacgcctggccaatgccttgcttttaaagggctcacctgactgggtcaggcctactcatctattctccttattttgtggtcagttaacttggactttattatacttacaaaatcctctcgcagtattacctattattagtgtttgactgaaaaagcagagacaggaatcttggggaagtatctttagaattctgcccactgccctgaggttcagagaagttaggtgatttatccgaggtcatacaaccagcagtggaaaccagattcaaatcaaggcattctggcccccagagtctatgaccttgaataataccctgcagtgtgacgagaatccagtgctgcattggaaattctggctgggcagattttctgacaatctgatgtagccatgcaggtgagatgcactgggctactttgttcataaggaccggaactatccatggtgccttgtctcctcactcccatcacctccgatgtaactgaagacagacatgaccaaagaagtcaggactctgcttttcartggattgaacccacggatgctgcaccattttc

SEQ ID NO: 714937 - DNA, 1675 bp, Homo sapiens
ttctctctggggcttagggcatttttctctcttccctttaatccaatgtgggtaggcagggatggatgtagggaaattgctagagaggaaaagaaggacttctcgcaagccagtacaaaaccaagacctggattttctctttccactgcttgggtcacattctatataagcaagagttgctgatgatttcgtccaccttcttcacacaaaagtagcaytggcttacatgggagctcaggactgcacagacagctctggggacggactaggggagatagccgtgtgcacacagcctgccgtgctgcagcctgagcctgccaggtggccttgtagcatgggccagaatgtgaccaacaggcagggcttctgccaacttactagtcaaatggttggcacagaaatgagctgctcatgtgaaagcagtcaatagccagaaactcactgtaatccaccctctaccctatccgtcctctgccccatccccgtctcacacagtctcagccactttctctcctagacccctggctggactgttctcaggcctgtgctaagtaaaggtggaagacctagagagaagttcgaggtcagatactggcctggacattgacccaaagctgagcagtggcatcctgtgcagggctgcttctcaagggcatgttccattcctgtccacacattgtcaatttgcatcgagacatttttctggcaaagaacaggaaggtgtcttaggatatgaatgccttttttcaatttgcacaaaggccccacaagggctaacagcagtgctgactttaaccaccacagccgggtagcttctgcccaaaatagcagtgaagaaacacaccaccctctgggactaggtggggcttcaggagaaaggaaaatgtaaacagatgtgttcctgttgtcatctctgatataaacaatttggcagatctattcattaggaattaagtttggtctatggtaagagggatcacaaacaaagggggaagagcaacttaaaaagaggatggtttattctctccataaaagacagaaagtgagtaacccaggactgatacagtaggtccacaagctcatcagggattgagctccttccatctttctgttgcaccatcctcagcaagtgacctcctcattcaagatcatctgtggttctgccatcatatccacattccagaaagagagaaagaggggaggtaaaaagggagttgcaccaccaactaaatcagcctttcttaggcaacattcccagactccccagactatactctcaattaggtctcactgatggcattcacctgcaaaggcagctgggaaatgtagtccttaaactgtgcgtggccacatcctggattctcttgccaccctggtgcctgccaagcaggagtcttttccatttccctagtgcgtgaaattatctcctccttttcagcactcacacagaccacagccaaatgataagaagcagattcaatatacagagcacagctagggaatctgtcccacttggaaaggttgggactcctttcttccattagccaagcaaacttttgacctaggaaactagataaggtagaaacaaacaaaaaaagtaattgatctgagtgcttccacattcgttatttcttgagctcctcaacacagatctgagagagaagcaattatactc

SEQ ID NO: 714938 - DNA, 1675 bp, Homo sapiens
ttctctctggggcttagggcatttttctctcttccctttaatccaatgtgggtaggcagggatggatgtagggaaattgctagagaggaaaagaaggacttctcgcaagccagtacaaaaccaagacctggattttctctttccactgcttgggtcacattctatataagcaagagttgctgatgatttcgtccaccttcttcacacaaaagtagcactggcttacatgggagctcaggactgcacagacagctctggggacrgactaggggagatagccgtgtgcacacagcctgccgtgctgcagcctgagcctgccaggtggccttgtagcatgggccagaatgtgaccaacaggcagggcttctgccaacttactagtcaaatggttggcacagaaatgagctgctcatgtgaaagcagtcaatagccagaaactcactgtaatccaccctctaccctatccgtcctctgccccatccccgtctcacacagtctcagccactttctctcctagacccctggctggactgttctcaggcctgtgctaagtaaaggtggaagacctagagagaagttcgaggtcagatactggcctggacattgacccaaagctgagcagtggcatcctgtgcagggctgcttctcaagggcatgttccattcctgtccacacattgtcaatttgcatcgagacatttttctggcaaagaacaggaaggtgtcttaggatatgaatgccttttttcaatttgcacaaaggccccacaagggctaacagcagtgctgactttaaccaccacagccgggtagcttctgcccaaaatagcagtgaagaaacacaccaccctctgggactaggtggggcttcaggagaaaggaaaatgtaaacagatgtgttcctgttgtcatctctgatataaacaatttggcagatctattcattaggaattaagtttggtctatggtaagagggatcacaaacaaagggggaagagcaacttaaaaagaggatggtttattctctccataaaagacagaaagtgagtaacccaggactgatacagtaggtccacaagctcatcagggattgagctccttccatctttctgttgcaccatcctcagcaagtgacctcctcattcaagatcatctgtggttctgccatcatatccacattccagaaagagagaaagaggggaggtaaaaagggagttgcaccaccaactaaatcagcctttcttaggcaacattcccagactccccagactatactctcaattaggtctcactgatggcattcacctgcaaaggcagctgggaaatgtagtccttaaactgtgcgtggccacatcctggattctcttgccaccctggtgcctgccaagcaggagtcttttccatttccctagtgcgtgaaattatctcctccttttcagcactcacacagaccacagccaaatgataagaagcagattcaatatacagagcacagctagggaatctgtcccacttggaaaggttgggactcctttcttccattagccaagcaaacttttgacctaggaaactagataaggtagaaacaaacaaaaaaagtaattgatctgagtgcttccacattcgttatttcttgagctcctcaacacagatctgagagagaagcaattatactc

SEQ ID NO: 714939 - DNA, 1675 bp, Homo sapiens
ttctctctggggcttagggcatttttctctcttccctttaatccaatgtgggtaggcagggatggatgtagggaaattgctagagaggaaaagaaggacttctcgcaagccagtacaaaaccaagacctggattttctctttccactgcttgggtcacattctatataagcaagagttgctgatgatttcgtccaccttcttcacacaaaagtagcactggcttacatgggagctcaggactgcacagacagctctggggacggactaggggagatagccgtgtgcacacagcctgccgtgctgcagcctgagcctgccaggtggccttgtagcatgggccagaatgtgaccaacaggcagggcttctgccaacttactagtcaaatggttggcacagaaatgagctgctcatgtgaaagcagtcaatagccagaaactcactgtaatccaccctctaccctatccgtcctctgccccatccccgtctcacacagtctcagccactttctctcctagacccctggctggactgttctsaggcctgtgctaagtaaaggtggaagacctagagagaagttcgaggtcagatactggcctggacattgacccaaagctgagcagtggcatcctgtgcagggctgcttctcaagggcatgttccattcctgtccacacattgtcaatttgcatcgagacatttttctggcaaagaacaggaaggtgtcttaggatatgaatgccttttttcaatttgcacaaaggccccacaagggctaacagcagtgctgactttaaccaccacagccgggtagcttctgcccaaaatagcagtgaagaaacacaccaccctctgggactaggtggggcttcaggagaaaggaaaatgtaaacagatgtgttcctgttgtcatctctgatataaacaatttggcagatctattcattaggaattaagtttggtctatggtaagagggatcacaaacaaagggggaagagcaacttaaaaagaggatggtttattctctccataaaagacagaaagtgagtaacccaggactgatacagtaggtccacaagctcatcagggattgagctccttccatctttctgttgcaccatcctcagcaagtgacctcctcattcaagatcatctgtggttctgccatcatatccacattccagaaagagagaaagaggggaggtaaaaagggagttgcaccaccaactaaatcagcctttcttaggcaacattcccagactccccagactatactctcaattaggtctcactgatggcattcacctgcaaaggcagctgggaaatgtagtccttaaactgtgcgtggccacatcctggattctcttgccaccctggtgcctgccaagcaggagtcttttccatttccctagtgcgtgaaattatctcctccttttcagcactcacacagaccacagccaaatgataagaagcagattcaatatacagagcacagctagggaatctgtcccacttggaaaggttgggactcctttcttccattagccaagcaaacttttgacctaggaaactagataaggtagaaacaaacaaaaaaagtaattgatctgagtgcttccacattcgttatttcttgagctcctcaacacagatctgagagagaagcaattatactc

SEQ ID NO: 714940 - DNA, 1124 bp, Homo sapiens
aaaaaatgcaacgtgactaagcaccgtttaaaatagcctttcttattctcttgtaaaattgcagggatttccatgacagatgtcgttttagtcattttaaaacttcagcgcgctgagcctcatcagcatatttttatttttgacatttcatattttagagtggattgaaaactaatttgatccrtttcaatttggaacatccctcaaggtcattttaccagcatttaggccagtgttgatcttgctttcattttaaacatagttattttctctctgtgaagtgattactccttgcttggtgtgtggtctggtgacttgttaatttcaaaattctacgatgcaagcgggtttggacgtggagcctggcccggtgtggccaggctgtggctttgcccatcgcaacggctgcctttgcctcaaatggctcgaggctggcacctggtcaatatttgcttttgtccaaaagaaggaaacagtagaggacttgggtggtgtaattttagaactttactgttgggttgttggcttgaaagatccattctcttctgtaaatacagatacatatttactcctccaacctttccctccacacaattaagaaaccctacaattaattatgccaaatcaagatttgcttttctacatgattttttcccttttccctaggaagtctgtaatgaattttcttctttattgtaatattttatgtttttatatacacttgtatattcttatagcacatatatgtatatatgcaaactttctgaggcttctaaaaaagagaaataatattggttgattaacctcaatttcttttcaatatcaaatgtgtaacaataaccccaaaaggagaggtttcagaaattaaaacaagttgacatttgcccacttctgaattaaaatgcagcatttgacttttgtactgttttggctgtcaagccttagttttttcacactatcaggtattttcagatcaaaggtaaatatgatttagaattatatttcaaattagaactgtcatatgcccacacatacattttgctgatatacttacaaactggtaaacaatgctctttaatcaacaattcataatctgggtcagcgatttttatctccatatttgc

SEQ ID NO: 714941 - DNA, 1124 bp, Homo sapiens
aaaaaatgcaacgtgactaagcaccgtttaaaatagcctttcttattctcttgtaaaattgcagggatttccatgacagatgtcgttttagtcattttaaaacttcagcgcgctgagcctcatcagcatatttttatttttgacatttcatattttagagtggattgaaaactaatttgatccgtttcaatttggaacatccctcaaggtcattttaccagcatttaggccagtgttgatcttgctttcattttaaacatagttattttctctctgtgaagtgattactccttgcttggtgtgtggtctggtgacttgttaatttcaaaattctacgatgcaagcgggtttggacgtggagcctggcccggtgtggccaggctgtggctttgcccatcgcaacggctgcctttgcctcaaatggctcgaggctggcacctggtcaatatttgcttttgtccaaaagaaggaaacagtagrggacttgggtggtgtaattttagaactttactgttgggttgttggcttgaaagatccattctcttctgtaaatacagatacatatttactcctccaacctttccctccacacaattaagaaaccctacaattaattatgccaaatcaagatttgcttttctacatgattttttcccttttccctaggaagtctgtaatgaattttcttctttattgtaatattttatgtttttatatacacttgtatattcttatagcacatatatgtatatatgcaaactttctgaggcttctaaaaaagagaaataatattggttgattaacctcaatttcttttcaatatcaaatgtgtaacaataaccccaaaaggagaggtttcagaaattaaaacaagttgacatttgcccacttctgaattaaaatgcagcatttgacttttgtactgttttggctgtcaagccttagttttttcacactatcaggtattttcagatcaaaggtaaatatgatttagaattatatttcaaattagaactgtcatatgcccacacatacattttgctgatatacttacaaactggtaaacaatgctctttaatcaacaattcataatctgggtcagcgatttttatctccatatttgc

SEQ ID NO: 714942 - DNA, 678 bp, Homo sapiens
cagataaatgtactctcattatacgacaatctgcctgattaattgattttctcattctcaagatccttaaccatgatctatcaaggaatctttctctgaaactaagaatgcatcccccccttcaaaatgaaactttaagtttgacactactttatttattgatttgttttactcaacatattcacacaagtgacagaccttatatttgtctttataaaaaccatacatataaaaccatatatatatggttttatatatatatggcctttctctctctcttacaaaccacatatatatartatataatatagagagattttatatatatgtatatatgtagccttcctctctctcttacaaacaccaccacattcatcaagtcatttggtagctctccctttgatagtaacaatgtcttctcaacttatacatataaacctggtcaggaatatttcatcaccagagccactcattcttaatgttgaagaggaaaacctacatttttgagtatcgtttccttggtctgcattcagtggtcctccctggttccagcttcagcgcattcctgacatttagttatgccaacagccagttaaattgcaatcttactatttggaatttggcatttaaaaccattcctctgattatgtatgaaagctccacattcaatttggctta

SEQ ID NO: 714943 - DNA, 627 bp, Homo sapiens
ttgccatgactgtaagtttcctgaggcctcctcagccatgcttcctgtacagcctgcagaattatgagtcaattaaacctcttttcttaatagagtgccagatctcaggtagttctttakagcaatgtgagagctgactaatgcagcctataaaaaaattactagtctggagccagtttaccactgagatagatgtgaaaaataaaggataaaacaagaaagttgatgtgttatgctcatttataaatataatcagatattataaatgttttgtttttaacttaataattttcaagacacttttcatgttacctcatttggttcccatatttaagaaaattgatataactttcatattctggaaagaaaattgttcagaggaccaaggttacatgacaagtgtgaagccaattagcagtaaaaataaatgacaatatgcagaaaaggccttcagtaaaattcaacatcgcttcatgttaaaaaattctcaataaactagttagttacagaacatatctcaaaataataagagctgtttatgacaaacccacagccaataccatactgaataagcaaaagctggaagctttccctttgaaaaccggcacaagacaaagatggcctctc

SEQ ID NO: 714944 - DNA, 966 bp, Homo sapiens
ggtaagaatcaaaattggaaatttcatattgcttttaagattcttattctgccgcactgacacatattttttcttgttttaattaatggaaacataaatagcttacaatgatcttttaattaaattttattaaggctgtaacaggtgatatcacttcaacrggcagtttactgggggagctttttataaaaatcctgaagccagatattggtaagagattaacatttcaacatataaaatcaacagatttattaagttttactgggtagtattacaacctaaagttaaaccaaagagaatccgccctttctttcttcactgtgttctggttacccatgaatatgtcacttcctttgccctggagagtacaactgaacaatgatgttgataaagcgggctttgttatttgtgaaacaatcctgtgagggaggcttatgccagatccatcactgtttaacccgacttgataggtggaaagccattcatggattgaattgctttcaatccctgctatttcagaaacttgcacatgttaagattggttggaagcttttaaaccctctaaaatgtcagacgatttgggcaaagagttcttccattcggttgcgctgcttcaaaaataaggacactctgctatcaactaccacctgctatgactcctcccaagctgaatgctcagggatgaaagtgaggacccagctcctttgctctggttataagtgtaagttgtgcatccaagcacaaatttgcataaagctgtcttcagggaaaatcgggatggaagttaatatatttaaaacatttacagaagtagtattcatttgactaatagaaaaaaatgaaaatctaacaaatgaggtgaatacacatttatagcataaaaactgtaaaatccaatgtgatgtagtatggatgatctagttcataacagattatgaaagggatttattttagcagagactagcg

SEQ ID NO: 714945 - DNA, 966 bp, Homo sapiens
ggtaagaatcaaaattggaaatttcatattgcttttaagattcttattctgccgcactgacacatattttttcttgttttaattaatggaaacataaatagcttacaatgatcttttaattaaattttattaaggctgtaacaggtgatatcacttcaacaggcagtttactgggggagctttttataaaaatcctgaagccagatattggtaagagattaacatttcaacatataaaatcaacagatttattaagttttactgggtagtattacaacctaaagttaaaccaaagagaatccgccctttctttcttcactgtgttctggttacccatgaatatgtcacttcctttgccctggagagtacaactgaacaatgatgttgataaagcrggctttgttatttgtgaaacaatcctgtgagggaggcttatgccagatccatcactgtttaacccgacttgataggtggaaagccattcatggattgaattgctttcaatccctgctatttcagaaacttgcacatgttaagattggttggaagcttttaaaccctctaaaatgtcagacgatttgggcaaagagttcttccattcggttgcgctgcttcaaaaataaggacactctgctatcaactaccacctgctatgactcctcccaagctgaatgctcagggatgaaagtgaggacccagctcctttgctctggttataagtgtaagttgtgcatccaagcacaaatttgcataaagctgtcttcagggaaaatcgggatggaagttaatatatttaaaacatttacagaagtagtattcatttgactaatagaaaaaaatgaaaatctaacaaatgaggtgaatacacatttatagcataaaaactgtaaaatccaatgtgatgtagtatggatgatctagttcataacagattatgaaagggatttattttagcagagactagcg

SEQ ID NO: 714946 - DNA, 656 bp, Homo sapiens
catttagcaaatgccataggaataattgttacatccaagaaccatcagaggatcctaaaattcatgacaaagagcactttaaccaagggatcacagttctcttcacacgcaataagatattgacatcatgtacctcctaatataacacactgagtctggcacaggatcacttctgtaggatttctgcaaaaattcctaacctcagtttaaccatgagaaaacactggacaaactctccctgaggtatattctactaaayaaatggccagtactcttccaagttatcacggtcaaaaagatggaggaattgtcctagattggcagaggttaaggaaacatgacaaccaaatgtagcgtgagatcctggattggatcctagaccagaaaaagaacagtagtgggacagctggccaaatgtgaataagatctgcaaattcattaggagtattgtatcaatattaatttttggctttgataacttatataagatgttaacattgggagaagctgcatgaagggtatacaggttctctgtgtactatttttgcaatttttttggtaagtctaaaatgttttgaaaaaagactcctcttcccctagttaatttataagtttctctttcagagctagtgtgtttgatatgatcaaaccaaaga

SEQ ID NO: 714947 - DNA, 1138 bp, Homo sapiens
aatgttgtatgatatattttgtttaactttaagtaatcaaatatgagtgaatcagatcaatgacttaagtgcattaacatggaaagattaaggtaggagtacttgaaatattcttaaagcatggcactatgcatatctacaaggtactttgattaaataatcttttctcctttttaactctttgacagttaagagccaattattctgaacacacattcgactcagtcagttttcctaaaatgaaaatgtatggcagaatagaatcactatctggcctgtgtaccctgagatctaagcacgtattttcagtctgcagtaaccctaactatcattactgccatttcgatccaattttttttcccataatttggctgacaaaaagaaaaacatagtatcctaatttaaaatctttcaggtaaatgcagccttatattttatacctcttccacacaaagcagataataaagcattttccattgttaatttagttctcaatgtggtattgaaattaagaactgagacttctgcatccaccttatctatcaggaccaaaaataaaggcagcctacattcacattattttactgtttgttctaggaagttcttgtttatgaacttaacgttgtaaatcagaacgaaaaacttttttttttttttttttttcagaaaatggctgaaaattagtttctagaaacattmaactcctaaaactgggtaaatggctcaattatcaaacaactcacttcaagattcctgcctttctgtgttcaccaatcctaaactattacgtcttgaaatgtgcctaaccaaaccagatcctcacattgaaagttcagtcttatctactcaaacctagatttccaaccctattcatatttcgccttaatcctctccttctggacactccgactcttgtaaaatgttgtcttttctgactattataggtaataaactcagctttgcttaacgggttatgctgtgagtcttctgagaagttgaaatccgacaaaattcatcttccatatgtaacaataaaaagtcaccatattggtttctgttggtcttgctaacggctaatttaagtatgcatttaattttgacgtgataatctagtttcagtgttttaaaattaaatcaa

SEQ ID NO: 714948 - DNA, 1294 bp, Homo sapiens
actacaattctctgcatgtttttctgcatttggagtttggacctgacaacctcatgtaagtatggaaagaatttcatggcacacatcagtgttgtcatgatctttctatccccaggtgataaccatgttattttgagatatgaacagcatattatgttttcagaatgggtttgaaggctctggaggtttttaagatttgagttatttggaaatattttttcctaaaagtcatgtctcccatatactacgttgaccacgtatttcaatttatgcctgtcatcctggggtaactatgggtactgctttcttcgctctcaaaaagttatctaacttcaataataaattatatggtcattctgccttagtactatattcttcaaggaagttacctaaataactatgcagggatctgattagaataggcaaatgtccatgatcatagagaaagtacctggtaaaagacgatattactaatcttgtaccccatatggggaaatgaacatactaaaaagtcatgcttttaagttaatggacagaagagtgtgactctctagacagtccaaagcatcaacacaaccagaactgttagtagagatttgtaagaattatagtttctccataaaatatgacaaattttccattgatggtgctttgcaggcttgatttctagccataacatttgacctttgttttgccctgttctcccagatgaccatgtaagattttctaatctgaaaagaatgatgaactaatgttataccaatcttactccacacttgcagtgaggaaactagaagatgacagctacaagtttctgaatctggacaatcttatctcttgaaactaacacattcactgtactctcataacagatcattcttttgagcataaataatgtgtgggcgtgtgtgyaaaaagtgtagaaagatcacgtggaaagtcagactagtgttcagcacacagtgagtgattagatgacagatttgagcctggcccagcgctctgttcggggagaaagacttggcttttaaggtgtaccactcattctgctgaaaaacagctggtgtatattgcaacgaacagcagtgagcaatgccaatcagtatagcagccatggcaaaacattccaacatactacgtatgaaatgagatactactttattttgagggcaaaacaaaattcacagaataaatcttttgtctcagtttgtatttattaagaatatgattaccacaattaggttcatttcaatatccttcccaaattttttaaatcactcgttcatctactcaa

SEQ ID NO: 714949 - DNA, 1241 bp, Homo sapiens
tggtaggctctgaaattagagtaaaatatcataaatgtttaacttacatgagcttaactgtacctattagattttttttaaaaaagtaagaaaaatcttaaaacagagtaagcaattctgcctgccttttcactcaaagagaaaatgcccaatgatgagaaagtgatcctgatactttaacacttggacttagtttttgcatgcctcttgcagtgcaaccacctttcatgacatttaattgtagtttttaaaggtatgaatttaatatacatcagggtcataaatgcaagatgctaactaaagaaacagtcatctatcccaatgctggaaaaagcgtaggctgtgttgggattatcgagaaatgggaatatcatggcatcttccaaagattctaccatctacttattacctacaactttgaacaaattttaacaactaagacttctctctgtctcagttcttcatttgtgaaatagagaaaataacagtatctacctcaaagagtttctgtaagaattaatgcagctagtgcatagcaagtacatatgagactttaaagggtatttttgaccatttcctttataatctgatcttcttcacttgaygatgcagcaccatgctacagggcacttgattgtgccaggccagtgacaagctgcaccaaatccagagcaatttgagaagagctacatgtttgatattcatgatagaggcaggggatatggagatatggaaagtggaatgaaaagatagaactctatcaataattcgtgatagtagaattagtctgctggactctgtgaacatagatatttcttcctcttatagtttagtttatccagtattttatttgagcaactgataaagtcagtaaataaaagtatgcaagcttaaatcccaaactgaaagacttgagtgtttgaataatacatttgtaccccaaactaaaacttagtgggacttagtaataaggcacattttgtttttattattaacattatttgtattaattctttgaatttcaactatttttattcctaggaaatataataataacattaatgtatattgtttaaagatttctaaaagttgtagactcccataatagtgaatgggaatagaaataatgactacaaagcacattggggaatgtttaagcttatactgttcttgatatcacaaatgacctacatttcagagagcacattttgctgttcagcagaaagaacacaagtctcttg

SEQ ID NO: 714950 - DNA, 643 bp, Homo sapiens
ccaatcttaaagagctcccaatggctaaaattgaacaatctgagcaagaaaataaataacacagtactgggttataacccaaagtacaaattagagtccagaatgatataaataaatgacttaataaataaatgggggagaagaaacaaatcttccttacaaaagaattccaaataataaatgtaaatactcccccctcctgaaggtggaacttaatctcttcctcccacttgagtgtgggctggatttatggccttgcttccaaagaatatagagtatggaaagagaacaaaaataataactttagagtggagaaatctggtggccatttctgaaaaagccattaagttgactgtcgtcagtggtttcktcaatgtcctagcttccatcactggaaaccatctttcttgttgccacgagaattctaccttgaatcccatagagccaagtgattagttactccgccttaggtggttttaggacattttccaatgtttaatacaatgttcttctctctttaccatcaccatgagactgtgacacaaacttaatcagtttctaaacctttatcaaagtaatacatgtatatatgtcaaattaaatagtgccataagatttaaaatgccacagttgttcccagatg

SEQ ID NO: 714951 - DNA, 2855 bp, Homo sapiens
ttttgtcacccttcatctccatagtttttgtaattacaagcatgatagttttgtttttaaaacacaattattctcttattttccagcatataaagatcactcaatccccgttcctatttttcatcaatcctattcactttgatttttcagcttcttgtgatcaaaagcaggagataatttccatgttagagagatctcctcgattcccatgaggccatccggagctaatcctggggaatgaacttttatgtcagccacctctctcctctttgcctccagacttcaggaatgaactttagggccgctcacaagcaataccaggtgcatacttattaataatcagttgcctacatttgctcacttaccaaaacattcaccaagggtttcacactctgtactcaattccatgagtgttagacttcatattttcgactagtgggcattctacgacccttttatttgcgtcttttccgttatgcaatcaatratgtttgcttacttatcttgttttcactctcttacacttttcttatgtcttacaggtaattctttgagaaaattaaggtgaatggggatagatatatgaccagcattttctacgtaaaagtcatttgtgtatttcaaagagctgaaaaaattcaatataatgttaatgggaaaaggagaactgactctcccagatataaagagttgcgtagagttgttcaaagtttcacacctattgggccactgctttttatgtaattggttgccttttaaatgtcttgggaatgaggcaaactctagcccaatgagttccctaaactccagggaatagatattaagccttctgggaggttctatttcattttccatgcccagaattaaggcaagaagtgagcctattcctcacaacctctccctatgtaccagataggagtaaagcccaaagacttgaaaataacatttcactaatttttactcctaactctcttattttctcaacatatgggatgagctaagaatcacaaggctgatttttgcaactactgtatgaagatcttataactttcattttataatggaggagtacttgtgttattttttcttgagatctcagcagaagccaagactagattagttctattttaacatcatctttcaagaaggacattttatgctatgattttgagcaagtaaatgtgttcgtaaagagagattgtgtctaatttataattaacagaatactgtggtcatcattgtcaagtctggactattcttttttgaatatttgagaacgagcaattgattttgcaattgaatattgtcaattgggaaagaaaagtaactaatttaatcaaagtgtgttttatattcttcaacacctattgcttaacttgctataatattttcttatatggaaaatgtattttactggtaaggatgcaagtcaaaataggtaaaaaagtcaaattatatcatcataaaagtagtttcagcataggatacaggcagatcacaaaagcaagacaacactaaactaactaagctaagatttttagacatagtagtttttataatggttatttgatcgattatctgtttcaaacttatacctatattttcagtattgtttacattatcaaaatttgaaggtgaaataaattactatacatgctcaagggaagggagtgtgttctgatttttttaattgattagccaaaaatataagtggtgctcaaagatgcaagtcagccgattgatacatgttgtaagaatgtgaaatacttttatgcttcagagagctgagaaatgcaacacagcaggaagggaggtgaagtgaaacctctcagaggtctcaatagccattccctatagttaagggggctcaatgggctaagatctgacttatacctaagacatctgaacagcagatgacaagattcttagctaagaaagcaaaggatatatggactatcttaagctcatagagagtccatgatgcagtctttcctgtggatcctacaaaagagaaatctaacctgaagacagctcataccttgcagatgattgaaaaggtaatataatctagcaagaagaggttctatggagaaaggagatacaagtgtaatatttccaggcatcaaaggcagaagagaaacggggaatgctaccatccccaaagaacctgtgtgagtgttgcataaaaaaacaaaacacctttagacacctacccagccaacagcatatgctgtacacgaaacagcagttttgagtattacagtagtctgatattttaaaataaaatcaaattgtcttttataattagaaggaaaccacagaattcttatttgtttttcatgtgttctgggagtcaacagaatagttgaatcacggaaccaagtcagggaaagctttctagcccaaagaattggattcaattgaatgccaacattttcctttactacatttaggattcttgttcaatgtaacagcgacaatatcaagttgttaacagacattatagaactaaaaccaaacttcttcgtgttttctgtttgagcatatcatacacagtataattagactagtcaaattttatgtaattacaaacattagaaattgttttgaaattgaacattaaattactttaatttccaatattttatgtagacactaattaatttttgaaatttaagtagaaaatgtaatctggaaaataaaccctaccattgtgtttaaaaatataaacaaaagtataaatattatttttattatttaaaatacaatctattataattattacctagtagttttgacaattatatgttttcatcaatatcacacttttaaaagttaaggtaatacaatcttaa

SEQ ID NO: 714952 - DNA, 2855 bp, Homo sapiens
ttttgtcacccttcatctccatagtttttgtaattacaagcatgatagttttgtttttaaaacacaattattctcttattttccagcatataaagatcactcaatccccgttcctatttttcatcaatcctattcactttgatttttcagcttcttgtgatcaaaagcaggagataatttccatgttagagagatctcctcgattcccatgaggccatccggagctaatcctggggaatgaacttttatgtcagccacctctctcctctttgcctccagacttcaggaatgaactttagggccgctcacaagcaataccaggtgcatacttattaataatcagttgcctacatttgctcacttaccaaaacattcaccaagggtttcacactctgtactcaattccatgagtgttagacttcatattttcgactagtgggcattctacgacccttttatttgcgtcttttccgttatgcaatcaataatgtttgcttacttatcttgttttcactctcttacacttttcttatgtcttacaggtaattctttgagaaaattaaggtgaatggggatagatatatgaccagcattttctacgtaaaagtcatttgtgtatttcaaagagctgaaaaaattcaatataatgttaatgggaaaaggagaactgactctcccagatataaagagttgcrtagagttgttcaaagtttcacacctattgggccactgctttttatgtaattggttgccttttaaatgtcttgggaatgaggcaaactctagcccaatgagttccctaaactccagggaatagatattaagccttctgggaggttctatttcattttccatgcccagaattaaggcaagaagtgagcctattcctcacaacctctccctatgtaccagataggagtaaagcccaaagacttgaaaataacatttcactaatttttactcctaactctcttattttctcaacatatgggatgagctaagaatcacaaggctgatttttgcaactactgtatgaagatcttataactttcattttataatggaggagtacttgtgttattttttcttgagatctcagcagaagccaagactagattagttctattttaacatcatctttcaagaaggacattttatgctatgattttgagcaagtaaatgtgttcgtaaagagagattgtgtctaatttataattaacagaatactgtggtcatcattgtcaagtctggactattcttttttgaatatttgagaacgagcaattgattttgcaattgaatattgtcaattgggaaagaaaagtaactaatttaatcaaagtgtgttttatattcttcaacacctattgcttaacttgctataatattttcttatatggaaaatgtattttactggtaaggatgcaagtcaaaataggtaaaaaagtcaaattatatcatcataaaagtagtttcagcataggatacaggcagatcacaaaagcaagacaacactaaactaactaagctaagatttttagacatagtagtttttataatggttatttgatcgattatctgtttcaaacttatacctatattttcagtattgtttacattatcaaaatttgaaggtgaaataaattactatacatgctcaagggaagggagtgtgttctgatttttttaattgattagccaaaaatataagtggtgctcaaagatgcaagtcagccgattgatacatgttgtaagaatgtgaaatacttttatgcttcagagagctgagaaatgcaacacagcaggaagggaggtgaagtgaaacctctcagaggtctcaatagccattccctatagttaagggggctcaatgggctaagatctgacttatacctaagacatctgaacagcagatgacaagattcttagctaagaaagcaaaggatatatggactatcttaagctcatagagagtccatgatgcagtctttcctgtggatcctacaaaagagaaatctaacctgaagacagctcataccttgcagatgattgaaaaggtaatataatctagcaagaagaggttctatggagaaaggagatacaagtgtaatatttccaggcatcaaaggcagaagagaaacggggaatgctaccatccccaaagaacctgtgtgagtgttgcataaaaaaacaaaacacctttagacacctacccagccaacagcatatgctgtacacgaaacagcagttttgagtattacagtagtctgatattttaaaataaaatcaaattgtcttttataattagaaggaaaccacagaattcttatttgtttttcatgtgttctgggagtcaacagaatagttgaatcacggaaccaagtcagggaaagctttctagcccaaagaattggattcaattgaatgccaacattttcctttactacatttaggattcttgttcaatgtaacagcgacaatatcaagttgttaacagacattatagaactaaaaccaaacttcttcgtgttttctgtttgagcatatcatacacagtataattagactagtcaaattttatgtaattacaaacattagaaattgttttgaaattgaacattaaattactttaatttccaatattttatgtagacactaattaatttttgaaatttaagtagaaaatgtaatctggaaaataaaccctaccattgtgtttaaaaatataaacaaaagtataaatattatttttattatttaaaatacaatctattataattattacctagtagttttgacaattatatgttttcatcaatatcacacttttaaaagttaaggtaatacaatcttaa

SEQ ID NO: 714953 - DNA, 1394 bp, Homo sapiens
caacatatcacattaggattttgtaatctgtcactgtttaaaacagcctctgggaagygcgcctctctctggattgcctccatcacacgtgtgttctctcccattcagaaatacataaggctgctcatgatgctctttgatttcaacttcaaggaagcagtttagttttttgtatgtcgtttgctaaccatggacaaaatttagcacctggtctaatagtcttctgtgtgtctgtgatggcctagattctgaaaagagcttacgaaggactgcagtcctaccttaaaaataattatgtcctgagatcatttgggcagccatttatctccttttctggtattttctatttgcaaatatgagtcagtttttctttctctttttcaaattatttctctaacagttaaagaactaggaaagaaagtgatgttaggccctgactaaatattcttccttcattctgcttactactgacggcttgttttctttgccttttaccacatgagacacaagatatgagacggagcagagaaaaaggttctgatgttagctctccaaattccagagtgttttgcataagggaatttatgctcaagttcaggaatcaagaggaacatattaattttcattctgctatgaagtgacagttcaattttatgagtaatttgtgtctgggacaatttaaataatacttaaaagcctgcagtagctttcaagttaaaaatctattgtgttcaattatgaagtaaacctccccaaggcagatccatttaatgcatcaaagtatgtttttaactcttattcaaaactccaagagattggcttaaatatggtaactgatggcacacagctgtgttaatggagggctaactagtgtccacaccgacttcacagtcccttctcaagtcttcagtgatgaaaggaaagaaaagagtgaagcctcaatcttttcatctagagaatcgatcttcaaaaacaggagtaaaggagccacaccagaagcatgcaatggtctcctcataagaaaacgtgctgttacaaagcagtaaggtattggtgataccagggcagaccctagaaccactttgcttgtttccaatccagttctgctgtctattactgtgtggccctggacaagttatataacctctctgtgattagttttttcatctgtagaatgagactgatgctagtccccccctcctagttttgttgaaaagtttaaagagttaattcatatgaaatgcttaaaacagaccctgagtgcttcttaaaacaaactcctggaagactgacatatccatcacctagcacagtgcctggcacatagtaggtcaatcaatatttgttggatgaatattggatgttatttcattgagtgccctagttggttcagg

SEQ ID NO: 714954 - DNA, 1394 bp, Homo sapiens
caacatatcacattaggattttgtaatctgtcactgtttaaaacagcctctgggaagcgcgcctctctctggattgcctccatcacacgtgtgttctctcccattcagaaatacrtaaggctgctcatgatgctctttgatttcaacttcaaggaagcagtttagttttttgtatgtcgtttgctaaccatggacaaaatttagcacctggtctaatagtcttctgtgtgtctgtgatggcctagattctgaaaagagcttacgaaggactgcagtcctaccttaaaaataattatgtcctgagatcatttgggcagccatttatctccttttctggtattttctatttgcaaatatgagtcagtttttctttctctttttcaaattatttctctaacagttaaagaactaggaaagaaagtgatgttaggccctgactaaatattcttccttcattctgcttactactgacggcttgttttctttgccttttaccacatgagacacaagatatgagacggagcagagaaaaaggttctgatgttagctctccaaattccagagtgttttgcataagggaatttatgctcaagttcaggaatcaagaggaacatattaattttcattctgctatgaagtgacagttcaattttatgagtaatttgtgtctgggacaatttaaataatacttaaaagcctgcagtagctttcaagttaaaaatctattgtgttcaattatgaagtaaacctccccaaggcagatccatttaatgcatcaaagtatgtttttaactcttattcaaaactccaagagattggcttaaatatggtaactgatggcacacagctgtgttaatggagggctaactagtgtccacaccgacttcacagtcccttctcaagtcttcagtgatgaaaggaaagaaaagagtgaagcctcaatcttttcatctagagaatcgatcttcaaaaacaggagtaaaggagccacaccagaagcatgcaatggtctcctcataagaaaacgtgctgttacaaagcagtaaggtattggtgataccagggcagaccctagaaccactttgcttgtttccaatccagttctgctgtctattactgtgtggccctggacaagttatataacctctctgtgattagttttttcatctgtagaatgagactgatgctagtccccccctcctagttttgttgaaaagtttaaagagttaattcatatgaaatgcttaaaacagaccctgagtgcttcttaaaacaaactcctggaagactgacatatccatcacctagcacagtgcctggcacatagtaggtcaatcaatatttgttggatgaatattggatgttatttcattgagtgccctagttggttcagg

SEQ ID NO: 714955 - DNA, 1394 bp, Homo sapiens
caacatatcacattaggattttgtaatctgtcactgtttaaaacagcctctgggaagcgcgcctctctctggattgcctccatcacacgtgtgttctctcccattcagaaatacataaggctgctcatgatgctctttgatttcaacttcaaggaagcagtttagttttttgtatgtcgtttgctaaccatggacaaaatttagcacctggtctaatagtcttctgtgtgtctgtgatggcctagattctgaaaagagcttacgaaggactgcagtcctaccttaaaaataattatgtcctgagatcatttgggcagccatttatctccttttctggtattttctatttgcaaatatgagtcagtttttctttctctttttcaaattatttctctaacagttaaagaactaggaaagaaagtgatgttaggccctgactaaatattcttccttcattctgcttactactgacggcttgttttctttgccttttaccacatgagacacaagatatgagacggagcagagaaaaaggttctgatgttagctctccaaattccagagtgttttgcataagggaatttatgctcaagttcaggaatcaagaggaacatattaattttcattctgctatgaagtgacagttcaattttatgagtaatttgtgtctgggacaatttaaataatacttaaaagcctgcagtagctttcaagttaaaaatctattgtgttcaattatgaagtaaacctccccaaggcagatccatttaatgcatcaaagtatgtttttaactcttattcaaaactccaagagattggcttaaatatggtaactgatggcacacagctgtgttaatggagggctaactagtgtccacaccgacttcacagtcccttctcaagtcttcagtgatgaaaggaaagaaaagagtgaagcctcaatcttttcatctagagaatcgatcttcaaaaacaggagtaaaggagccacaccagargcatgcaatggtctcctcataagaaaacgtgctgttacaaagcagtaaggtattggtgataccagggcagaccctagaaccactttgcttgtttccaatccagttctgctgtctattactgtgtggccctggacaagttatataacctctctgtgattagttttttcatctgtagaatgagactgatgctagtccccccctcctagttttgttgaaaagtttaaagagttaattcatatgaaatgcttaaaacagaccctgagtgcttcttaaaacaaactcctggaagactgacatatccatcacctagcacagtgcctggcacatagtaggtcaatcaatatttgttggatgaatattggatgttatttcattgagtgccctagttggttcagg

SEQ ID NO: 714956 - DNA, 1262 bp, Homo sapiens
tcctcccttggctctgccaagccaccctctagtggactgaggggggaatttcctttcctggctgcctcactcggctattcatttgataaatragctcccctccccctctctcaggagatggtagatattattaaccttcaagcacgatacagcgagatgaatgttaatcatgaagggatttctcatcaagtttaatggtgtaagacatagagaagttgtgttagcagtttcaatcctgctaaaaatgctaattgttatgtttcatatgataggtgaggataataggaaaatggcaacagcttcagcgtttccatttggaagttgttgcccataattttgaggcaaatatagaggaaaagattacggtccttagtatgaatgacttgtgaagaggctaatttagggctgcttctttggagacattggagatttgaggcttgacatctactgagctcaagaaaagagaattttctgctgggaagaactaaagccaaaagaagaaattttggacctagaaagaacatgagtctatggtaagggatacaaggttatagtgttgagtactgatcttttgagcactttctgtcttctacatttttctctgtgtttcactggcacttttgccaacatgtagaggtaatcttttttttaaagcagttatttcatcctgacctaggaatcatagtaagtgcacttaggagtcctagatgaaccccaagagaaatgccatttttgtttttctcaacatgtccctttccttgccccatgagttgttacccatgctctggcataaggacaccctactgtccccagcttcaatgaccccagtcttgcagagttggcttctcatgtagctctgttgtttgtcctggtccctaactgtttgagctggggttctttcggggcacatacacacacaagtggggatcctggaatgttatatgagcaatgtcttcagtgtatacttttacttgactttgattaccctaaattctattgctcaaccctaaacttctatagtagctcatggtgttacctgtgaatgaactggaaagcattttgctgcaaggaagcttatcagttgaatgtgggccttgaaaaatttccttgtaatttcatagtttatgtgttcagtttgactttagaaagcatctaaatgataaatgcaaattcaaaaataatccattaaggatatgagcctatgtggatatggacctttttaactgtattgtcccagttttcatatgtagcttttgtcatca

SEQ ID NO: 714957 - DNA, 733 bp, Homo sapiens
ttcaaaagtagagtccagcctcaggcatggttaatcgggctccagctcctttgctctgaggttctctttattctctttattcttcgctcttccacatatcagcctcattttcaggctgactcttctcatggtcacaagaaagctgctgtaaactctggggctgcagcttccccattcacctacaggatagaaactgctggttcccacaatcagagaacaagttcctgaggtttgctctgaccggactgatgcaaactgcaaaccaagcacagcggcaggtgggataagacgatgaagattgccttagactagcagggccctcctctgaaactgatgacggggtcagtctcacctaaaccccatgactgctgtacaacaaaggaaaatctggaattaataatagggtggagggagaatggatcctgggagaacaaccaagaaatgtccacagtcttttgggctctgggtaaggcttcctgactgggaagtccctgggaaggtagaatgcttyttaacgatggagacagaagattcccatcagaccggtcaggtgtcaggggctgggtgtcagacaatttgattaaagaaaataaataaatgggtagttcttgtgaaaaaaatgttgtgtgtattctgactgctccactgattggcccgttctccagtccctctccctctactggagcctccctattccctgagatacaacaatattcaaattaggctaattaat

SEQ ID NO: 714958 - DNA, 592 bp, Homo sapiens
ccagccaaagcacttcatcagggtggtggcagtggcatccatgctcactcacatgtgcccacagccatggcagcatggcagggtgcatgtgcattgccagggatggggaaccagcagaagcaggaccgtggtrttcctgcatgtgcttgcaccagtgactgggcacaggtggaagtgattgctggtgtccatacttgcacttgcaatagcagtggtggcagtctaggcaaggcattagtgggtgcaggctgctggcctctgtgcgcatgttcacagaggcagcagtggcagtgttggtggggaacagactgccagcatccatgagcacatttcagccagtgatagtgttggtgtaggagagcagggctgctagcacctgtgtgtgcatttacactattggtggtgtcattgcaaaggcagtggacagggacactggtgtctgtgcactcatttacaccaacagcagtggtgtggagttgctggtggagccgtggagttgctgacatccatgagtgcccatgtgtcagtggaatgtaagcaggttgcattcatgccagcagcagtggtgcaacagaacgcatgtgcacatgca

SEQ ID NO: 714959 - DNA, 592 bp, Homo sapiens
ccagccaaagcacttcatcagggtggtggcagtggcatccatgctcactcacatgtgcccacagccatggcagcatggcagggtgcatgtgcattgccagggatggggaaccagcagaagcaggaccgtggtgttcctgcatgtgcttgcaccagtgactgggcacaggtggaagtgattgctggtgtccatacttgcacttgcaatagcagtggtggcagtctaggcaaggcaytagtgggtgcaggctgctggcctctgtgcgcatgttcacagaggcagcagtggcagtgttggtggggaacagactgccagcatccatgagcacatttcagccagtgatagtgttggtgtaggagagcagggctgctagcacctgtgtgtgcatttacactattggtggtgtcattgcaaaggcagtggacagggacactggtgtctgtgcactcatttacaccaacagcagtggtgtggagttgctggtggagccgtggagttgctgacatccatgagtgcccatgtgtcagtggaatgtaagcaggttgcattcatgccagcagcagtggtgcaacagaacgcatgtgcacatgca

SEQ ID NO: 714960 - DNA, 592 bp, Homo sapiens
ccagccaaagcacttcatcagggtggtggcagtggcatccatgctcactcacatgtgcccacagccatggcagcatggcagggtgcatgtgcattgccagggatggggaaccagcagaagcaggaccgtggtgttcctgcatgtgcttgcaccagtgactgggcacaggtggaagtgattgctggtgtccatacttgcacttgcaatagcagtggtggcagtctaggcaaggcattagtgggtgcaggctgctggcctctgtgcgcatgttcacagaggcagcagtggcagtgttggtggggaacagactgccagcatccatgagcacatttcagccagtgatagtgttggtgtaggagagcagggctgctagcacctgtgtgtgcatttacactattggtggtgtcattgcaaaggcagtggacagggacacyggtgtctgtgcactcatttacaccaacagcagtggtgtggagttgctggtggagccgtggagttgctgacatccatgagtgcccatgtgtcagtggaatgtaagcaggttgcattcatgccagcagcagtggtgcaacagaacgcatgtgcacatgca

SEQ ID NO: 714961 - DNA, 592 bp, Homo sapiens
ccagccaaagcacttcatcagggtggtggcagtggcatccatgctcactcacatgtgcccacagccatggcagcatggcagggtgcatgtgcattgccagggatggggaaccagcagaagcaggaccgtggtgttcctgcatgtgcttgcaccagtgactgggcacaggtggaagtgattgctggtgtccatacttgcacttgcaatagcagtggtggcagtctaggcaaggcattagtgggtgcaggctgctggcctctgtgcgcatgttcacagaggcagcagtggcagtgttggtggggaacagactgccagcatccatgagcacatttcagccagtgatagtgttggtgtaggagagcagggctgctagcacctgtgtgtgcatttacactattggtggtgtcattgcaaaggcagtggacagggacactggtgtctgtgcactcatttacaccaacagcagtggtgtggagttgctggtggagccrtggagttgctgacatccatgagtgcccatgtgtcagtggaatgtaagcaggttgcattcatgccagcagcagtggtgcaacagaacgcatgtgcacatgca

SEQ ID NO: 714962 - DNA, 1763 bp, Homo sapiens
  misc_feature 939, 940: n = A,T,C or G
acttcagtctagcccctcaaactttgaattgctttaggggaagtgaatactaagaaataagattcctgcctttttagttcaattctcaawctcatttgctacacaaagttgaaagtcaactgctctgcatttaaaaagctttattttgctgataaatttagaaatcctgaatattgtcttatttgaaataatcaccttctaaattcactcctgtagctaaatgggagaatcatcacagattctattcaaggtcatctaccgtctaggtcagtcacgcccttggatggcaccttccaaaggatgctacattttttttaaggaagaggagcaatgcttagcttagccagaatgttctatctcaaaatatgacttagagcaaattttctgaacatttttctattatgtatctccatggtggtttggtgtgaaacttatgaacccttgtcagaatgatattttcaattgcataaagtaatgtacaagattagaaaggaaacaattacactgaaatatggtagtcaaatcatttctaaactattacagaataatgcattttttatttattaacatattaataagaaaattcagcaaagaaccagaccatcataactttaaagtatgattaacaggaaagatatttcgagatgctgcaagaaatgtaatatgtcatgtaaatgtctatgatttctgttgatgttaaaagcactggtactaataatacttccacggtgtattgtctacattcacaaccaaaggaaatgatggatatcaattagaataagtggaattcttccacttaaagctgctggacccctgtttctaatccatgaacactcaagggattcatggacgaggttaagaactcctagttagaggaatttaacagcttaaagaaagggggctgtgtgtggtgctttgggaagccacagtcaggaagannttgcctgaccccaggagtttgaggctgcagtgagttatgatcatatcactgcacggcagcctgggcaacagagcaagaccctgtacctaaaaatagaaaaataaaaagagcttaaagaaaaaaatgcaatattagctcatcattagggtacatttcctagtacttaaataactgtagtgactttggtgctgatatgtataattgctgcttttaatacaagtatagaattatcccttacattcaagcctctgaattctccatatgttcattactttagtgatttgtagattctgttataatgaaactataaagtaaattctattctttttttcacccaggctggagtgcagtggtgcaatcttggatcactgcagcctccacctcctgggctcaagtgatcctcccacctcagcctcccaaagtgctgggattacaggtgtgagccaccgcacctagcccgaagagaattctatatgtagcatgttcatcttgaattagttccaaggattcttccaaggatattccaaggtagatctagaacatgatactgatgaaaatatgacaaggaggcttccatgttgctgctccactaagccaaatcttctaattgcataatgtgtaatgcttagactttcccagattagtggttgatttcctggaaaaactttgtaaacaccaaatagtcaataaattgccatctacagagcaggaaatttcaaatccacaccaaatacaatttcattctcataaacaccagagttttttctgaaaggagctcagttttcaaatataacatgtagttcacaatagtttatgcacataa

SEQ ID NO: 714963 - DNA, 984 bp, Homo sapiens
  misc_feature 338: n = A,T,C or G
atttcctgaggcctacgcagccatgctgaactgtgagtcaattaaacctctttcctttaaaaattactcagtctygggtatgtctttattagcagtgtgagaacagactaacacagggatgaaattaactattttgatattctgtcaatgggcataaggttatttgatttaaaaaggtgaaataatttttgtaattaaaatttccaacttttcaaaattagattaaaaaatagattgtagttttgttaagtctctgggtgtaataaataggtttttcatggtactactttaaaggatttgtgtatccatttgatgtattagtttttctaaaagttatnttcccaatagcttaaaaaatttgctaaggacaactaatatattaggatttaattcaggaggataaaatgcttcccattttaattctaaagtttctaatatggtacctcaggaaaatgtatcagtaaatggaaaaagataatattagtgacagactgatggaatttcattgtattcagtgatgtataaatcatcatttctaagctcttcacctaatatttctattttagcattgtgataaaatctgtattacatcgagaaaaataattttgttttaaaagttttttatgcatgtgtgttatgagtctaaattttttttcatcttgtaaagttttcttctttacccttaaaaaacttctggatatttgatatgcttaaggtcatcctaagagaaagcaagctaatggttatttaaaaattgctctatgctagtttactaattcacactctggaaaaccatgggtaaattagtgtcattttatattttgagtcagcataaatctttactgtatcaaactagattcaggatactcaacacatatatatgtctattcaaatttttaaaacttcacaggaatctaatgaggcagatgctgccactatccccctatgttattttatgtgtactaatatacaggcatatcattc

SEQ ID NO: 714964 - DNA, 984 bp, Homo sapiens
  misc_feature 338: n = A,T,C or G
atttcctgaggcctacgcagccatgctgaactgtgagtcaattaaacctctttcctttaaaaattactcagtcttgggtatgtctttattagcagtgtgagaacagactaacacagggatgaaattaactattttgatattctgtcaatgggcataaggttatttgatttaaaaaggtgaaataatttttgtaattaaaatttccaacttttcaaaattagattaaaaaatagattgtagttttgttaagtctctgggtgtaataaataggtttttcatggtactactttaaaggatttgtgtatccatttgatgtattagtttttctaaaagttatnttcccaatagcttaaaaaatttgctaaggacaactaatatattaggatttaattcaggaggataaaatgcttcccattttaattctaaagtttctaatatggtacctcaggaaaatgtatcagtaaatggaaaaagataatattagtgacagactgatggaatytcattgtattcagtgatgtataaatcatcatttctaagctcttcacctaatatttctattttagcattgtgataaaatctgtattacatcgagaaaaataattttgttttaaaagttttttatgcatgtgtgttatgagtctaaattttttttcatcttgtaaagttttcttctttacccttaaaaaacttctggatatttgatatgcttaaggtcatcctaagagaaagcaagctaatggttatttaaaaattgctctatgctagtttactaattcacactctggaaaaccatgggtaaattagtgtcattttatattttgagtcagcataaatctttactgtatcaaactagattcaggatactcaacacatatatatgtctattcaaatttttaaaacttcacaggaatctaatgaggcagatgctgccactatccccctatgttattttatgtgtactaatatacaggcatatcattc

SEQ ID NO: 714965 - DNA, 984 bp, Homo sapiens
  misc_feature 338: n = A,T,C or G
atttcctgaggcctacgcagccatgctgaactgtgagtcaattaaacctctttcctttaaaaattactcagtcttgggtatgtctttattagcagtgtgagaacagactaacacagggatgaaattaactattttgatattctgtcaatgggcataaggttatttgatttaaaaaggtgaaataatttttgtaattaaaatttccaacttttcaaaattagattaaaaaatagattgtagttttgttaagtctctgggtgtaataaataggtttttcatggtactactttaaaggatttgtgtatccatttgatgtattagtttttctaaaagttatnttcccaatagcttaaaaaatttgctaaggacaactaatatattaggatttaattcaggaggataaaatgcttcccattttaattctaaagtttctaatatggtacctcaggaaaatgtatcagtaaatggaaaaagataatattagtgacagactgatggaatttcattgtattcagtgatgtataaatcatcatttctaagctcttcacctaatatttctattttagcattgtgataaaatctgtattacatcgagaaaaataattttgttttaaaagttttttatgcatgtgtgttatgagtctaaattttttttcatcttgtaaagttttcttctttacccttaaaaaacttctggatatttgatatgcttaaggtcatcctaagagaaagcaagctaatggttatttaaaaattgctctatgctagtttactaattcacactctggaaaaccatgggtaaattagtgtcattttatattttgagtcagcataaatctttactgtatcaaactagattcaggatactcaacacatatatatgtctaytcaaatttttaaaacttcacaggaatctaatgaggcagatgctgccactatccccctatgttattttatgtgtactaatatacaggcatatcattc

SEQ ID NO: 714966 - DNA, 659 bp, Homo sapiens
acattgtgatgttccctcagccatatgtgctcatctagaacttgaattcagacccaattccaaagctcatgcttcttctatctttctgcactcaaatacatggaaggtagtcatgaaggcattgaaatcctcggcttttctgcttcccaatgactcgatcaaataaaagagttaaattttgacatgaaggagaattatataaagtgtgaaggtgaactgtgtacttgtagaaatggttgtattctgtaatgggatgctgcacgttatttttaccctggtagtttgtaagagtaagataaatatctgcctgtggttgttttaaacgaggagaataagaaaaatctaatctcctacattgggcgagatgggtgtaatagaagattgtatcagattgatatgtttaatagctgatggctataattttccagcacaataagctgaagtagcccagattttaatatacatgtttatatatatatatatakagagagagagagagagagagagaaatattttgaatgtagagaaacagacaatgttttctattgctgtagagggaaaatttattaattccccaaagcataataatactttttttttttgagatggagtcttgatgtgttggccaggctggagtgcggtggcgcgatctcggctca

SEQ ID NO: 714967 - DNA, 1529 bp, Homo sapiens
catgctagactgtcagagaacacaggatcagagctgtttttagaaaacgaattccatttttttgctctagttttcaatgcagagactgaagccttccagcctatatgtctcctggcacrtggccaagagtcaggctctctctggggctctggggtgtggccagtgctgtgctcagactcaaggggctgtgggtcgccatgctccaggagccaggcgtgtcttgcacttgtgattccccacacccaaagctcctctaccaagtctgcaatgaaaatttcatgcctccaggtgctgcatggattattcatgaaggcttcagagctgtcgccatgggagccaattgacttcagcgttgttagcatattaatgacctaccctgatttagagctgggtgggcggggacaccacctggattgtcagtcactgggcctggatcagcttttccatttgcagaatatgttgtttgttatttctttccagacaggcccaggagtaatatttacctaattgactaatccaagtaagcaggaggcccccttgcagcctcaaagggggttggtctcaggtcatagcctcctcccttcctctctccaccccacaggctgggctgctgggccaggcgccccaactggggagacattacatcagaacgactatgtaaccaagaccagatcccgcatcaggcctgggctgccgaagcacgctctggcatggcaggcagaggctggtagatgctgtgcagatgtcaggtctagagctgacagagatccctgaaaagcttttagctacaccccctacatgggtcatggaaaagtagtactaatgtatatcaatgatcattaagaaatgcatgagaacttgcagaacccagcacagacagtgcccagctcagtgggggaagggtatctgggaagggcccagctaatccctgtgcaaaagccatggcatgacaaccaggagccagcagagcacccaggagggagtcatgtctacctggagaggccaagaaggctgatacagcatttgtaggagaaggatttagataattccagaaagaagaaagtgagcattctcagccaaagaaaaagcagtgaagagccctctaattggctcgggggagtggggaggtgtggccatgtcacagtacaaagtgagaaggagcagtggagggtggagaaaaacaggtttgagcctttccttttctttttttgaaacagagtctctctttgaagcccaggctggagcgcagtggtgcaaccatagctcactgcagcctcaaactcctggtctcaagtgatcctccttcgtcagcctcctgagtaactgggactacaggcatgagccgccatacctggctaacatttcaaaacagttttgtagagacagggttttgttatgttgctcaggctggtcttgaactcctgacctcaagtgatcctcccaccttggcctcccaaagtgctgggattacaggtgtgagccactgtgccaggccaagattggggccttttataaggctttgagtaaca

SEQ ID NO: 714968 - DNA, 1529 bp, Homo sapiens
catgctagactgtcagagaacacaggatcagagctgtttttagaaaacgaattccatttttttgctctagttttcaatgcagagactgaagccttccagcctatatgtctcctggcacatggccaagagtcaggctctctctggggctctggggtgtggccagtgctgtgctcagactcaaggggctgtgggtcgccatgctccaggagccaggcgtgtcttgcacttgtgattccccacacccaaagctcctctaccaagtctgcaatgaaaatttcatgcctccaggtgctscatggattattcatgaaggcttcagagctgtcgccatgggagccaattgacttcagcgttgttagcatattaatgacctaccctgatttagagctgggtgggcggggacaccacctggattgtcagtcactgggcctggatcagcttttccatttgcagaatatgttgtttgttatttctttccagacaggcccaggagtaatatttacctaattgactaatccaagtaagcaggaggcccccttgcagcctcaaagggggttggtctcaggtcatagcctcctcccttcctctctccaccccacaggctgggctgctgggccaggcgccccaactggggagacattacatcagaacgactatgtaaccaagaccagatcccgcatcaggcctgggctgccgaagcacgctctggcatggcaggcagaggctggtagatgctgtgcagatgtcaggtctagagctgacagagatccctgaaaagcttttagctacaccccctacatgggtcatggaaaagtagtactaatgtatatcaatgatcattaagaaatgcatgagaacttgcagaacccagcacagacagtgcccagctcagtgggggaagggtatctgggaagggcccagctaatccctgtgcaaaagccatggcatgacaaccaggagccagcagagcacccaggagggagtcatgtctacctggagaggccaagaaggctgatacagcatttgtaggagaaggatttagataattccagaaagaagaaagtgagcattctcagccaaagaaaaagcagtgaagagccctctaattggctcgggggagtggggaggtgtggccatgtcacagtacaaagtgagaaggagcagtggagggtggagaaaaacaggtttgagcctttccttttctttttttgaaacagagtctctctttgaagcccaggctggagcgcagtggtgcaaccatagctcactgcagcctcaaactcctggtctcaagtgatcctccttcgtcagcctcctgagtaactgggactacaggcatgagccgccatacctggctaacatttcaaaacagttttgtagagacagggttttgttatgttgctcaggctggtcttgaactcctgacctcaagtgatcctcccaccttggcctcccaaagtgctgggattacaggtgtgagccactgtgccaggccaagattggggccttttataaggctttgagtaaca

SEQ ID NO: 714969 - DNA, 2421 bp, Homo sapiens
accagcggctgcttcaaagaataaagttaaaggtgagctcctgtttattctgcatgagtcatcatcattcatttttctgctcaatcttctaagttctcttaaatgatagaaccaattcggttggtgataatactatttcagtgtatagatattgttcataaattcctacaaatacaaatatcaattatttcagttatccaatttctgagacatgtttgcatgaatgtttgtgagtttgttttcttgtttcacttctcactttattcctaagtatttcaaagtgcaataaagtgctttttttgcactaacattttgcatgcgtaccttagtttccttgataaaattgagaattgggcaaaatacagcataaaataaaactgatggaaagtctcaaaaatgagtatgcttttatagaattatgtgaaaataaaatttaatcttctaaaaactgaatattataagctatcgatttctatttatgattattttttcatttttagttgcattgtttgactttgctagaaacctaaaaatgtgttttcatgataaaagatgcacatgtccaacgctgaaaataaagaaaaagtattttggctccatgtgtcccagtttttatgggtttgaaaaattcaaatacatgtatgatactgtatcatagacctatcatttatgtatttcaatttcattctgtttagagcagtctacatatttaaaaatcttttttgcttttgcttcttaaatagcaaaagaaatttttttctctttcagttccaggttctagttttacagctagttttaatactatgacatacgctcatctttgaagtgttaactattccctatttataaagtcaagcctttatcatacaactaatattgtcatagcaatgtatttgcttatagaatatgaaatatttaaaggaggagatggcaaatttattgtcacctttcttatagctcacctagccttgtttcctgttccagtaagtgttgtggaaaatcagccaatccttgccacagtaattttctgtctggctgtgaacaaaataaatacattcacagcaattcagaaattatttgataatgaatacatgtctataaatgtataagcacaatatgtttatataatgaaaggatgagaagtgtagttttaggaatgaggaattacaaactatacacactgcaccasctccagggtacagcatatgagtgtaaagggaaccagggggagatgcatatcagcactggaatcatcagagaccactttatgtaggaggtggagctggaagtggctcttgaaggatggataggatgtacatagaaaacaagtagtgtatttaaaaaaataattagaaaggctaactaaaggtctggaaacaggagtgaatacagtctagtgtggtgagaaaatcttttgaatgaaacctggtacttttataagaaagtgtagaaaaataaattctaagatgatgcaatagacaatggagtgattatgagtcattacagtatttgatcacataaaacctctagtaatcaattactctccaaaacaatggaaaataatttgaattataatacgcaggctgctaagtattaaatatggaaaagccatttcatcattggagaattatagtcataaattatattacaggtatctgtcaagtcatttcaggactcaagctgactagaattttataatgcaagcatatttctgtatccaatttagtgccttccacacttccatccccagtgttccacacttagccattttatttgactctcctctttttacttgtatactagcctgtaggggccttaacacatagctttccgcatgcttatatttttgcatctacaaggcaagcaatgacacgttcaaaaattaattgtgcctcaagtggaaactgaaattttatttctaaccattgctgaagaaagatatatattatgtagagataatagaaagaattactcagtgattttttggtccaatttctatatgaaggcaaatggtcttcaaacagaaaaaaaaaagtggataagaggaaaataaaacccaagataatataagagcagatggttgcttcagaatagttcatttctcctggcccagaaaaagtacttaccagggaaccgagagaaattttaaagaagattatatctcatttatctatccttatggaatcacgcaaatgtggaaagtttctggaatattggagagaggaatgtgttctgattttttgtaaggagtaatgatttcatttccagaaaccataaactggtcattttgacatcaatttcccagtaagatttttaaacactcttaaaacaacagttggtgggtatttaggttaaaacagagttcattgagaatcagtcagaaattattagtaatagcataggaaattacaccttcttttt

SEQ ID NO: 714970 - DNA, 2421 bp, Homo sapiens
accagcggctgcttcaaagaataaagttaaaggtgagctcctgtttattctgcatgagtcatcatcattcatttttctgctcaatcttctaagttctcttaaatgatagaaccaattcggttggtgataatactatttcagtgtatagatattgttcataaattcctacaaatacaaatatcaattatttcagttatccaatttctgagacatgtttgcatgaatgtttgtgagtttgttttcttgtttcacttctcactttattcctaagtatttcaaagtgcaataaagtgctttttttgcactaacattttgcatgcgtaccttagtttccttgataaaattgagaattgggcaaaatacagcataaaataaaactgatggaaagtctcaaaaatgagtatgcttttatagaattatgtgaaaataaaatttaatcttctaaaaactgaatattataagctatcgatttctatttatgattattttttcatttttagttgcattgtttgactttgctagaaacctaaaaatgtgttttcatgataaaagatgcacatgtccaacgctgaaaataaagaaaaagtattttggctccatgtgtcccagtttttatgggtttgaaaaattcaaatacatgtatgatactgtatcatagacctatcatttatgtatttcaatttcattctgtttagagcagtctacatatttaaaaatcttttttgcttttgcttcttaaatagcaaaagaaatttttttctctttcagttccaggttctagttttacagctagttttaatactatgacatacgctcatctttgaagtgttaactattccctatttataaagtcaagcctttatcatacaactaatattgtcatagcaatgtatttgcttatagaatatgaaatatttaaaggaggagatggcaaatttattgtcacctttcttatagctcacctagccttgtttcctgttccagtaagtgttgtggaaaatcagccaatccttgccacagtaattttctgtctggctgtgaacaaaataaatacattcacagcaattcagaaattatttgataatgaatacatgtctataaatgtataagcacaatatgtttatataatgaaaggatgagaagtgtagttttaggaatgaggaattacaaactatacacactgcaccagctccagggtacagcatatgagtgtaaagggaaccagggggagatgcatatcagcactggaatcrtcagagaccactttatgtaggaggtggagctggaagtggctcttgaaggatggataggatgtacatagaaaacaagtagtgtatttaaaaaaataattagaaaggctaactaaaggtctggaaacaggagtgaatacagtctagtgtggtgagaaaatcttttgaatgaaacctggtacttttataagaaagtgtagaaaaataaattctaagatgatgcaatagacaatggagtgattatgagtcattacagtatttgatcacataaaacctctagtaatcaattactctccaaaacaatggaaaataatttgaattataatacgcaggctgctaagtattaaatatggaaaagccatttcatcattggagaattatagtcataaattatattacaggtatctgtcaagtcatttcaggactcaagctgactagaattttataatgcaagcatatttctgtatccaatttagtgccttccacacttccatccccagtgttccacacttagccattttatttgactctcctctttttacttgtatactagcctgtaggggccttaacacatagctttccgcatgcttatatttttgcatctacaaggcaagcaatgacacgttcaaaaattaattgtgcctcaagtggaaactgaaattttatttctaaccattgctgaagaaagatatatattatgtagagataatagaaagaattactcagtgattttttggtccaatttctatatgaaggcaaatggtcttcaaacagaaaaaaaaaagtggataagaggaaaataaaacccaagataatataagagcagatggttgcttcagaatagttcatttctcctggcccagaaaaagtacttaccagggaaccgagagaaattttaaagaagattatatctcatttatctatccttatggaatcacgcaaatgtggaaagtttctggaatattggagagaggaatgtgttctgattttttgtaaggagtaatgatttcatttccagaaaccataaactggtcattttgacatcaatttcccagtaagatttttaaacactcttaaaacaacagttggtgggtatttaggttaaaacagagttcattgagaatcagtcagaaattattagtaatagcataggaaattacaccttcttttt

SEQ ID NO: 714971 - DNA, 2421 bp, Homo sapiens
accagcggctgcttcaaagaataaagttaaaggtgagctcctgtttattctgcatgagtcatcatcattcatttttctgctcaatcttctaagttctcttaaatgatagaaccaattcggttggtgataatactatttcagtgtatagatattgttcataaattcctacaaatacaaatatcaattatttcagttatccaatttctgagacatgtttgcatgaatgtttgtgagtttgttttcttgtttcacttctcactttattcctaagtatttcaaagtgcaataaagtgctttttttgcactaacattttgcatgcgtaccttagtttccttgataaaattgagaattgggcaaaatacagcataaaataaaactgatggaaagtctcaaaaatgagtatgcttttatagaattatgtgaaaataaaatttaatcttctaaaaactgaatattataagctatcgatttctatttatgattattttttcatttttagttgcattgtttgactttgctagaaacctaaaaatgtgttttcatgataaaagatgcacatgtccaacgctgaaaataaagaaaaagtattttggctccatgtgtcccagtttttatgggtttgaaaaattcaaatacatgtatgatactgtatcatagacctatcatttatgtatttcaatttcattctgtttagagcagtctacatatttaaaaatcttttttgcttttgcttcttaaatagcaaaagaaatttttttctctttcagttccaggttctagttttacagctagttttaatactatgacatacgctcatctttgaagtgttaactattccctatttataaagtcaagcctttatcatacaactaatattgtcatagcaatgtatttgcttatagaatatgaaatatttaaaggaggagatggcaaatttattgtcacctttcttatagctcacctagccttgtttcctgttccagtaagtgttgtggaaaatcagccaatccttgccacagtaattttctgtctggctgtgaacaaaataaatacattcacagcaattcagaaattatttgataatgaatacatgtctataaatgtataagcacaatatgtttatataatgaaaggatgagaagtgtagttttaggaatgaggaattacaaactatacacactgcaccagctccagggtacagcatatgagtgtaaagggaaccagggggagatgcatatcagcactggaatcatcagagaccactttatgtaggaggtggagctggaagtggctcttgaaggatggataggatgtacatagaaaacaagtagtgtatttaaaaaaataattagaaaggctaactaaaggtctggaaacaggagtgaatacagtctagtgtggtgagaaaatcttttgaatgaaacctggtacttttataagaaagtgtagaaaaataaattctaagatgatgcaatagacaatggagtgattatgagtcattacagtatttgatcacataaaacctctagtaatcaattactctccaaaacaatggaaaataatttgaattataatacgcaggctgctaagtattaaatatggaaaagccatttcwtcattggagaattatagtcataaattatattacaggtatctgtcaagtcatttcaggactcaagctgactagaattttataatgcaagcatatttctgtatccaatttagtgccttccacacttccatccccagtgttccacacttagccattttatttgactctcctctttttacttgtatactagcctgtaggggccttaacacatagctttccgcatgcttatatttttgcatctacaaggcaagcaatgacacgttcaaaaattaattgtgcctcaagtggaaactgaaattttatttctaaccattgctgaagaaagatatatattatgtagagataatagaaagaattactcagtgattttttggtccaatttctatatgaaggcaaatggtcttcaaacagaaaaaaaaaagtggataagaggaaaataaaacccaagataatataagagcagatggttgcttcagaatagttcatttctcctggcccagaaaaagtacttaccagggaaccgagagaaattttaaagaagattatatctcatttatctatccttatggaatcacgcaaatgtggaaagtttctggaatattggagagaggaatgtgttctgattttttgtaaggagtaatgatttcatttccagaaaccataaactggtcattttgacatcaatttcccagtaagatttttaaacactcttaaaacaacagttggtgggtatttaggttaaaacagagttcattgagaatcagtcagaaattattagtaatagcataggaaattacaccttcttttt

SEQ ID NO: 714972 - DNA, 1010 bp, Homo sapiens
aaaactctccccaaatggatgaactttacccttcacctagaagccaaccccatcttctctctgcacagcttcccttttacattggaagcctattttcatggacatcttacctttcttcttgctctgttatccttctctgcttgcagccagagaagtgaagacttaaatgtggtctaggattgtgatttggactgccttatccatgattagaagtaagtggaaaggaggaaaaaacataaggtcttagggaggaatgtttctttttctttttatttttttgagactgagtcttgctctgttgcccaggctggagtgcagtggcacgatcttggctcactgcaacctctgcctctcaggttcaagtgattcttctgcctcagcctccgaagtagctgggactacaggcacgagccaccacacccagctaatttctgtatttttactagagacggggtttcaccatattagccaagctgatctcaaactcctgaccttatgatctgcccacctcagcctcccaaagtgctgggattacaggtgtgagccaccacgccagcaaggaatakttcttaaactttgtggttattttgtcatcaataaattgggaataatgaattgtggtgatgactaagtcatataacacggggatagcccacagcaaagtgcttggcctatagctgtctcttattaaatgctagctgtggtcaatatcatgaatattagcagtactgctactatttcttcttgaagaagaagataagtaaggataggcatattggaacactaggcataaatggggaagcaatcaaggtgttcaatctttgcaatacttttctcttcttgctctatggattctcattgactttctctctctcatatgtttgctgtggccgcactggccctccagtcctgttacacttctttcatagccccacctcaacctaagaaatgaaatattgaagagaacttctattattttttaattaaaaaaattttttttgaaataaagt

SEQ ID NO: 714973 - DNA, 656 bp, Homo sapiens
tcagcactttggaaggccaacgcaggcggatctcttaaggtcaggagtttgagaccagcctggccaacatggtgaaaccctgtctctactacaaatacagaaaattagccgagtatagtggtgtacgcctgtagtcccagctactcagggatctgaggcaggagaattccttgaacctgggagtgagccaagattgggccgctgcactctagcctgggtgacagaatgagactctgtctcaaaaaaaaaaaaaaaaaaaaaattaaattaaaatatggcactaagatatctgaaatgttccacgaagcctcccagtggagtaagaacaaataattctaaagtttttggaatcttcctccttattactacagcatttaggtcaagtgaatgagagtatccaagctaccaaaaattcccagggaaaaaaataatcatgaaagcatatgtcaagaaatattctaggtgcattctcttcatccaataagcttatagaatctaaagggagcttgtaaatcctgaaagggtcaaagtttgaggccaattatgtagccgtaaggccctgtactgtcagaaattagaacttttataaatgcaagaakagtagaaatttgccacacatcaaacaacccataggttatgatttcagtgaaaagttc

SEQ ID NO: 714974 - DNA, 623 bp, Homo sapiens
  misc_feature 117: n = A,T,C or G
aaatgtaggggcaatttattccctctgttgcttctcagaggcagaacagggcatatggaaaggggatgtgaaaggggatgttttttccatgtgtataggtacacaattcaatatacnctattatgtcatctttattagactgagctcaaaacagatactgccataggattgataagacattaagatcccaagagctcaatctaaaagaccaaatataccaaaatatataaatcaagagaagttcagtaagagctcaaaaaagtataagggggttcatataatgatggtaagctgctgtacacttggggaagaacaagacacaatacctaggagaagtggcatttcaaatgagtagaatttcagagtaaagatcagggcaaagagaaatcaagagawaggagataaaagactccaaggagcgaaactcaccaagaatctttgaatcagaaattctggtaatcatggcttcacaactatggaagtccagcacagaaaactagttgcatgtagtttgatataaaagtagctatttgtaaagcctctgataggagcatacccaaaaacaaggaagaaaaagatgttagatagactcagcttcctgctgagtttctccagtggcttcc

SEQ ID NO: 714975 - DNA, 1000 bp, Homo sapiens
gtaagacagactcaattcccttctcttctttttttgcaacaaccacagccattaccccagcctcaaattcatatccattggttcagaagccctaaggaagggcattgatttcagagaggaagcccaacatgtgcaggattttttgccctggatccagtgatatctttgagaatcagaaacacttattctaatgtattttaatttacttttcaaatggagcatttaaacaaaaactgtttattgggttcaaattcagagccaagttgtgtgtcgagagagtcttaatttttcataacaggacatgtttggctctaatgtgtgggttatgagtcaatatatcaaatttgactaaagtatttgctctaagtagggagcaagccatttagcattacaaatcctgaactttttgcaggaaggagggaaataactttgatttctaagctctcttattaagatgaatcaaagttgatgaataaactttctggattgcttaataccttccagatatcagtatcaaggccttggcaaggcaggtgaaaatatttccatgagcaagaagcaattgagaaggacttcctctgtgggataaattcttggtaattcctgtgggaaattttcctttatcctaacatctttttttttttttttgccttgcccaattctcagtgtttttaaatacacaaaatacggctttytactaaaaactggtaaatgaagttggaaaaatacaaacacacacacacacacacacacacacacacacacacacacacggtagcccttttattgcagccatgtacgtagcttcgctgaagagttgacaagatatattgtgcagccacagagagacaccacatcttccttcctcccagcacaacttgtacagtgattaaatgtgattaaagtctcaggaacttggacacagtcatatctattttggtaccactgtcttgatccatccctacagccagaagggaatcaccctctttgtgtaaatgtt

SEQ ID NO: 714976 - DNA, 1309 bp, Homo sapiens
cactcactgatactgaattctaccaaagaagacaagccatccaatcaacaactctcatagtaaagcacatggcaaacattataactgtattactgtattataaaactgtattattaaagtctactcttacagaatactcgaggaaattaaaaaatgacaaattctcatttatgtacacaccacttatatcaggttcttstggagaatatattctgtttgacggaagaggaaggaagagaggataaattatgtttattggagaactacctaacccagactttgtactaggtgctttttgaaaattatctctttaatttctgcaaccacaataagccacagataaccctgtctttgcttcagagatgattgtgcccagtctcataggagttaagcaatttttcccaagtcctatagctggtaaataatcagtttaagattcaagtaaatcattttatcaaagcaacattgaggcaagaaagaagagtatgatatacaatttttaaaagcccagacacccacacatttcctgtaaggaaaaaaatgtattgatgtgtatgataaaaattaggccctcagctccttgaaaaagaattgtttgagcccctgtaaatctttacccagttagtgttcaaataaatattcctgtaaagatatcttcagggtgagaaaagccataaacaaactccattgtcatttccagcatttaaatcaggactaatcacaaggagccagtgttagcccaatccccctcacctagttcccctcactctttgccaatacgcagtttttaatctgtttcaggaaggagtccgaggcggtttggaaatacaaattaacctgaaactacttcctaaggcattaccagaaatcacgttttagatgtcaagatgacttgcattgttctaaacttccaggctgtgccaatggccacaaaggtaaatggggcattgggacaaccatgtgaaggactaagttgcaacatgaagcaagcacactcttccgcatgagtcacctgaaaatgaaaagagaagaatagctggaaaagatgatactgtctgacaacagcatttcaaataagacacaaaaaacttgtctgcatttgctttcaggtcatgaaataccacatgaactgaatgtttgagaacccattagctatggatcaccctgattcaacaacccaattaatcatattctcaggtctatggcataatcagtgtttctcaacctacactgcgtaataaaattacctgaggaaatttttggctttttgagtgtttttatttaaaaagaaaaaaaaaatcaatgcctg

SEQ ID NO: 714977 - DNA, 1309 bp, Homo sapiens
cactcactgatactgaattctaccaaagaagacaagccatccaatcaacaactctcatagtaaagcacatggcaaacattataactgtattactgtattataaaactgtattattaaagtctactcttacagaatactcgaggaaattaaaaaatgacaaattctcatttatgtacacaccacttatatcaggttcttctggagaatatattctgtttgacggaagaggaaggaagagaggataaattatgtttattggagaactacctaacccagactttgtactaggtgctttttgaaaattatctctttaatttctgcaaccacaataagccacagataaccctgtctttscttcagagatgattgtgcccagtctcataggagttaagcaatttttcccaagtcctatagctggtaaataatcagtttaagattcaagtaaatcattttatcaaagcaacattgaggcaagaaagaagagtatgatatacaatttttaaaagcccagacacccacacatttcctgtaaggaaaaaaatgtattgatgtgtatgataaaaattaggccctcagctccttgaaaaagaattgtttgagcccctgtaaatctttacccagttagtgttcaaataaatattcctgtaaagatatcttcagggtgagaaaagccataaacaaactccattgtcatttccagcatttaaatcaggactaatcacaaggagccagtgttagcccaatccccctcacctagttcccctcactctttgccaatacgcagtttttaatctgtttcaggaaggagtccgaggcggtttggaaatacaaattaacctgaaactacttcctaaggcattaccagaaatcacgttttagatgtcaagatgacttgcattgttctaaacttccaggctgtgccaatggccacaaaggtaaatggggcattgggacaaccatgtgaaggactaagttgcaacatgaagcaagcacactcttccgcatgagtcacctgaaaatgaaaagagaagaatagctggaaaagatgatactgtctgacaacagcatttcaaataagacacaaaaaacttgtctgcatttgctttcaggtcatgaaataccacatgaactgaatgtttgagaacccattagctatggatcaccctgattcaacaacccaattaatcatattctcaggtctatggcataatcagtgtttctcaacctacactgcgtaataaaattacctgaggaaatttttggctttttgagtgtttttatttaaaaagaaaaaaaaaatcaatgcctg

SEQ ID NO: 714978 - DNA, 1309 bp, Homo sapiens
cactcactgatactgaattctaccaaagaagacaagccatccaatcaacaactctcatagtaaagcacatggcaaacattataactgtattactgtattataaaactgtattattaaagtctactcttacagaatactcgaggaaattaaaaaatgacaaattctcatttatgtacacaccacttatatcaggttcttctggagaatatattctgtttgacggaagaggaaggaagagaggataaattatgtttattggagaactacctaacccagactttgtactaggtgctttttgaaaattatctctttaatttctgcaaccacaataagccacagataaccctgtctttgcttcagagatgattgtgcccagtctcawaggagttaagcaatttttcccaagtcctatagctggtaaataatcagtttaagattcaagtaaatcattttatcaaagcaacattgaggcaagaaagaagagtatgatatacaatttttaaaagcccagacacccacacatttcctgtaaggaaaaaaatgtattgatgtgtatgataaaaattaggccctcagctccttgaaaaagaattgtttgagcccctgtaaatctttacccagttagtgttcaaataaatattcctgtaaagatatcttcagggtgagaaaagccataaacaaactccattgtcatttccagcatttaaatcaggactaatcacaaggagccagtgttagcccaatccccctcacctagttcccctcactctttgccaatacgcagtttttaatctgtttcaggaaggagtccgaggcggtttggaaatacaaattaacctgaaactacttcctaaggcattaccagaaatcacgttttagatgtcaagatgacttgcattgttctaaacttccaggctgtgccaatggccacaaaggtaaatggggcattgggacaaccatgtgaaggactaagttgcaacatgaagcaagcacactcttccgcatgagtcacctgaaaatgaaaagagaagaatagctggaaaagatgatactgtctgacaacagcatttcaaataagacacaaaaaacttgtctgcatttgctttcaggtcatgaaataccacatgaactgaatgtttgagaacccattagctatggatcaccctgattcaacaacccaattaatcatattctcaggtctatggcataatcagtgtttctcaacctacactgcgtaataaaattacctgaggaaatttttggctttttgagtgtttttatttaaaaagaaaaaaaaaatcaatgcctg

SEQ ID NO: 714979 - DNA, 1309 bp, Homo sapiens
cactcactgatactgaattctaccaaagaagacaagccatccaatcaacaactctcatagtaaagcacatggcaaacattataactgtattactgtattataaaactgtattattaaagtctactcttacagaatactcgaggaaattaaaaaatgacaaattctcatttatgtacacaccacttatatcaggttcttctggagaatatattctgtttgacggaagaggaaggaagagaggataaattatgtttattggagaactacctaacccagactttgtactaggtgctttttgaaaattatctctttaatttctgcaaccacaataagccacagataaccctgtctttgcttcagagatgattgtgcccagtctcataggagttaagcaatttttcccaagtcctatagctggtaaataatcagtttaagattcaagtaaatcattttatcaaagcaacattgaggcaagaaagaagagtatgatatacaatttttaaaagcccakacacccacacatttcctgtaaggaaaaaaatgtattgatgtgtatgataaaaattaggccctcagctccttgaaaaagaattgtttgagcccctgtaaatctttacccagttagtgttcaaataaatattcctgtaaagatatcttcagggtgagaaaagccataaacaaactccattgtcatttccagcatttaaatcaggactaatcacaaggagccagtgttagcccaatccccctcacctagttcccctcactctttgccaatacgcagtttttaatctgtttcaggaaggagtccgaggcggtttggaaatacaaattaacctgaaactacttcctaaggcattaccagaaatcacgttttagatgtcaagatgacttgcattgttctaaacttccaggctgtgccaatggccacaaaggtaaatggggcattgggacaaccatgtgaaggactaagttgcaacatgaagcaagcacactcttccgcatgagtcacctgaaaatgaaaagagaagaatagctggaaaagatgatactgtctgacaacagcatttcaaataagacacaaaaaacttgtctgcatttgctttcaggtcatgaaataccacatgaactgaatgtttgagaacccattagctatggatcaccctgattcaacaacccaattaatcatattctcaggtctatggcataatcagtgtttctcaacctacactgcgtaataaaattacctgaggaaatttttggctttttgagtgtttttatttaaaaagaaaaaaaaaatcaatgcctg

SEQ ID NO: 714980 - DNA, 738 bp, Homo sapiens
attattcagttaaagcatgttattggattaatataaatacagatctaaagatgaaactgaaaaccaagtcttatacctgactaccacttttcaaatacatagaaattactttgtagcatttctccttttcctaacagttactgtcatatataaattttcagtgttcattttttattttactgctttttttaaatctgtaagcaggatttttgttttttttagagacggagtcttgctctgttgcccagactggagtgcagtggcacgatctcgactcactgcaagctccacctcccgggttcacgccgttctcctgcctcagcctcccgagcgggattttttttagtctcgctctgttgcccaggctggagtgcagtggcgggatctcggctcactgcaagctccgcctcccgggttaacgccatcttcctgcctcagcctcccgagcgggatttttttttagttgcactatttccctcatattttctcccaacttgagaaagaaccacagtcccacttttatgtagccactatacagaaaaaccttgaacattttaaatggcaacgctatttaaattaagaattaattttttcagagaatttcataataattaawgaatttgaatttaagtgatagactttgcctacagtggtgggggaatcagcatatgtgatttgctctgaaagccacatcactcctcggagggaccccaaatgtggcctgtcactgttaagaaa

SEQ ID NO: 714981 - DNA, 625 bp, Homo sapiens
ccctacctttttgaagtccttaataaaaacctgctggttttgcagctcaggtgggcatcacagtcctaccgatatgtgatgtcacccctggaggcccagctgcaaaattgctctctttgtactctttatttatcagccagccaacacttagggaaaatagaaagaacgtacattgaaatattgggggcaggttcccccaataagtgagaagtcaccaatgttggttgagtactgctctggggttctttattatctgtgagtattggtaaccctcaaagaagtttgaagtggatgaggattagctgttccccctactcttgtcactaggttatattaaaagcatgttttagaccaaaatctatcacaagatgggatatcatgaaataaccattcactgggaaagatgacacaaatagtttatacaaccttctctgacagcctgagaaaaagcsaggctttttcttccagggaccacaaacatttcttgaaagctcaaaaggggcaaacatcaaaattccaggtgcagggttctatttatatgcaacttagaatccatcattcacagtggaacatgagatgcttagggggttagcccaaggtacccctaaaagtgaagggaacaggc

SEQ ID NO: 714982 - DNA, 2461 bp, Homo sapiens
tcgaaatgataattacatttggcaagcattgacagaaataaccacctaggtaaatagacatttttcactaattcttaaaatgtgtcaatgatacttggattgaatgcttgttttatacaaaataaaatgctcctttctaaatatatttttggactcaaattcctttcactgttaggatatagcttgtagctttttaggtcaaattaaatataaaattaagtaacggaaagttctttaggaaatgatttagcccatttcctatgaccaaagaaagctaggacatcagggaggctacatggctctttgaactcatgttgtgtaacctcaagttaccttggttgaatgccaacttacattgtaagaagttttgtatgtgtttttaaatttatacctcactttgagatgttgtttttcacattttaaggggcctggaaagattaaacatccacatccacaagacagtgattctcaaagtgtgctcttatgagtggcctcagcagcaccacattgggacttgttagaaatgcacatgtccagtccctgccccaggcataaggaatcagaaattctggggcagccctgcaatccacggcttgagcagtcctccaggtgatcctcctcacactgaatctggacagccacttctctaaagctcccacagaaagatttgggcaaatgttggtctcttgcttccaacccagcgcttcttaaacaaagcccttggagactcagagttatctgggttgggaatttcagcttagcaagtagtttctgtctttccttctttcacttcttgcaatggcactgttccttgtctgggcgaccatcctgatattttctgttttccattttccaaatatgagaagatgaaacagaagaaaaaatagctacagaagtatgtctatatttttgtgtttatatagtgggtatatttttatccaattcgaagtatctaaatttttactcaattacttaaaaaaaacaaccaagaagtattttataccctacactctttttaacagaaagtttagagttagttaaaagttaaaaatgactctgtagcaacagctgcaactttctggctatatttacaaattgcctttgacaaaaatgttcccagacactgtttgttaatgttctaaaacgtaagtttatataaggtatttggacatagattagagcaggtttatccacaaaagcaaatgacacaaaaacaaatgacattgggaaatgtattcaactcactttgacattctaggcataagaggaatgtaaaatggagaggacttctgctgtagacaggagttcctcttacacttcccaccatatgcttttggagatgagaaaaaagtgaacagaaccatgcagagatgtccatgcccatcctttgcatatgttactcaatgacttccttcagtggataaaatgcaagttcttggtgtgacataggargcttcccatggaggcaggaactcccttcctgccttgccagtagaaaagactccctctcccctgtaagcctgagatcaataatctgactgctttctcctattcccaaataatcagggctaggcacatctaatcacctcatcagcagtctagcatggcactgcaatacaaactgaaactgtcctcctacctactactttcttacttaatatgaatattttgggcaaagaggcatgtctgaatcatcattgaatcctcagaccttcctgaagacatgccgcatggcaacacgcccagaatttgtttgttgactgtagaaggagattcttgagtatggaatgtggggaatatagtcagtagttgtactgaataattgattactattctcaagatgatctctttaactgttttgttcctgagggcctatagcacatcatcaatagaatgggaagtgatgccaaaagttattcaatcaaaatatttattattttctattttttcccattaactgatccaatccatttggaagctctttacagagaaaaattagaaaacacaattcctattagtgtattatctcagtttgttcagttaggtacttggttgaggcttttcctggtggaaagcgaaactctaagagggacactggcagcgaagaactgcttttgagatggctcaggacacaattcatgaaaaagacttggaataagatgggaacagggaatatttaattttcattcaattcaaataagttagcaaagatgtatagagttttaaaagtttaacacaaagattataagcacatacacaggttgataaagttgataagcacacacacacacacacagacatacattctacacaaatatgaaccatcacacctaactggataaaccaacaatgcagagtgcacatggtttttgcataaattacatgacaaataaaccaccgatatatactgcccaccacagacatgtcccacatgactcattatccagagcacacctcccca

SEQ ID NO: 714983 - DNA, 2968 bp, Homo sapiens
gtaagtatttagtatggtgtgttatctcctcatgctaacctttggacatgacaaattatacattcaaatgtatgtgtgcatgtatgtatacatctatgtttacaaacaaatacatatttatgtatttagctttgtgtatttaaatacacagatacacatacgcatatatgaataaatacacatatatatgtataaatgtgtacacatacacacattcatgtatgtgtgtataaaatttatgttcaaatatctgtgtgcattcctttgtatacttgacacataccagtatagaactgtcattgtattattttgccaaagaaagacatatataaaataaaacaaaatgaaaacaactgtaatctaatttcaatgttaatccatagatacaaagattatttttaatctcagaagagaaacatatactttcaaaatcaaacatacatgcaaacactctagtactatatttagatttctgagatgatccgcactatgcttatctttgtgttgcccatttgcctaaagtctgatacaaatgtcaccacaaattggccatgttcaaggagcctcagctctgtggaaggaaacttgagcagcctctacctccgcaagtttaatagcttcttcctctttcaggtgcttcccatttctacagccggtttactgcggtctcctcatgaacatgttgtcatcacgcccagtgtaactgctccctccctgcaggagtttactctgctacatggataagctaacaaaggctcatctggaactacagggttacatctctagtgtcattgtatgacacaggtatccttttctcactcaatgggaattctttgagtacaaggactttgagtttctatctttgtattctgcactgtgcttaacataaaatttagaacagagtgggtatttcattggcatgttaataaatgagtgagtagaagaggtaaacctaaaaagcacacgctaagctagttttacttagttaagcctttaataatttatccatatctaatttatcattttcttgtcaaatgtggtcatgttttgttttaattaacctttttagcttaattatgaacaaacttgaaagtaatttaatgaacttcgttagtatctaccactcaatttgctaatgctgatgtctctggtttttctaatatatgatatttacagtcagaagcaatacttagtccacaggaattagtttctcatgaaaacacctgcgatagaaaggaaggttgatcaaaataaacacaaacttagaatttgtattgaggcttaaactaaatgtgaacttctcaatgtcctttccctacggtttatagttgctcagattttgacttaggcaaatatatttgtttcaaatgatcaaatttcagttaaattgacttagtgaaatttccaggctgttttggttagagaggaggtagtgcaactttacttgggatttatttttcataatataagagcatattggttggtattcattagcattaatgagtcaacagagatgagtgaaagaaattggctgattctgaaggctttaggagaggagctccttgggaacaaggcacccgtctcagaagtaatgaatgatgaatggattcacagatactggttttctgtctacttcctgttctccctttaaaataaatttaaaaatatatagacagacaggcagacataaagaactactcraacaagttaggaactttacagtgtttgttattaaagcccgtatggtcttgtgtgtgtagaactgagcaataagggaatcccagctagcaatgggattagagcatttggatgggcatctatttctaaggaacattcagggctaaaaatctgtaaaagtcagtgaaagcatgtacatttgataccactttcttttctttaaattgaaaaactggtgttgtgttaagtcctcagagcttaactctgtgctccttggatggtttgcttttacgcaaatggggtgaatctccttccaaggagctagcaccaaggcacaatgtcctggaatggggtggagaaatgcacagctgttttcctttgtagctggaaactagcatggaagcagggaaataattcaaggcaggacaaagggagaaggaaagccttaggtttctgcaggtctgtggaaggtaggaaacaggagacaaagacaaatcataaagatcagagtgtaagaagaaatgacttatgcagtcagcaaggaaggtcctttttactggagatagtggcttgaatagggagctacttagccttataaaaaggccaactcctatccctggtcatcatttgccgtaatgtgcccttagcaaatatttgctgaattgaattgaacctcaagagtcactgagaaaaacgatagctcaatttgcaaactagatatattatactcatagcattttggtttcataattatttttcctattgaaagacagaggaaaatgagaccaagttcattttgcttaaagtctcacagtgaaccagtctctcagtcatgctcagaatctgctttttgcttactctaaaacctgcgcctgcttccctgtgccgtgtctccttcatagattaggaaggaaggaagcatgagtctaagactacataaaatgaatggaaatgaaagggaaaggaaagcaggaaaagattaagaaaattatattgtccattagcagagaagagtgactttagcaacaaggtagaggacttaaactgttctcaacacatgataaattctgaaaccccgacttgatcattgcacattctatgcatgtaaaaaaatctcacataccctataaatatgtaaaatattatgtatcaattaaaaataagattcaagttaaggaaacctaaatgtgttgggggtgagtcggggctgaacagagctttccattccagtttctgggaaatggtagcttggccatgagtcttcaaattctgtaatttgaatgtagaaggg

SEQ ID NO: 714984 - DNA, 1290 bp, Homo sapiens
gcctcatgtgaaaggagtaacttcctaaaccaggaagatgttggatccctgaagagaccaataaaaagttttgaaattgaggcagtaattaatagcctaccaaccaaaaaaagcccaggaccagacaggttcacagccgaattctaccagaggtacaaagaggagctggtaccattccttctgaaactattctaaacaatacaaaagagggaatcctccctactcattttatgaggccagcatcgtcctgataccaaaacctggcagagacacaacaaaaaaagaaaattttagaccaatatccctgatgaacatcgatgcgaaaatcctcaataaartactggcaaaccgaatccagcagcacatcaaaaagcttacaatgggttcagaaccatgagacctgtaggtctaaccatgtgtcttattattcagaagtaggcagtctggaggaatcatggcttaaagcttaaaggctcgctaagacaccttccaacctaacaatagtgagtttaaacactgactttcagaacatctcactaaaccaagagtcagcaaactacaaactacatggcaagtaaggcctaaagtctatttttgtaaataaaagtatattggaacacagctatgtccatttgtttacatattatcaatggctactttaccactaaatgggcagagttctgtagctccaacagagatggtatggttcatgaagctcaaactatctagtatcagtatcatgccctttacagaaaaaatatatatatttatttctgcatccatttaatggctgttacatgatgctatgtcctcaataactagaataaattagaataaatgggtataggaaccatgggtgtcctttgacactcttggctactataagcatcaattgaagtagttataacctgctcaaagactaggaattaggggattaaacttctctgggatgaacatctgggtcactaggcaagcaatccagaacagacaaggggctgtccaaggataaggaaaatcttgaaagggtcatagaagagagagatgatgaatatcaactatggctccaagatcagctgttaggacatgagcttacaggggctagtgtcctaaacctggggagtaggtacagtccctgggtttgctaatcctaattaagtattttgaggagattgctagggctaccacctcgaagaatgaaagaaataaatgcatgttgttctagtatcacagagtgagatgcacatagcataagatagtgagggcctagaaagtagatttgcatgtacttcc

SEQ ID NO: 714985 - DNA, 1290 bp, Homo sapiens
gcctcatgtgaaaggagtaacttcctaaaccaggaagatgttggatccctgaagagaccaataaaaagttttgaaattgaggcagtaattaatagcctaccaaccaaaaaaagcccaggaccagacaggttcacagccgaattctaccagaggtacaaagaggagctggtaccattccttctgaaactattctaaacaatacaaaagagggaatcctccctactcattttatgaggccagcatcgtcctgataccaaaacctggcagagacacaacaaaaaaagaaaattttagaccaatatccctgatgaacatcgatgcgaaaatcctcaataaaatactggcaaaccgaatccagcagcacatcaaaaagcttacaatgggttcagaaccatgagacctgtaggtctaaccatgtgtcttattattcagaagtaggcagtctggaggaatcatggcttaaagcttaaaggctcrctaagacaccttccaacctaacaatagtgagtttaaacactgactttcagaacatctcactaaaccaagagtcagcaaactacaaactacatggcaagtaaggcctaaagtctatttttgtaaataaaagtatattggaacacagctatgtccatttgtttacatattatcaatggctactttaccactaaatgggcagagttctgtagctccaacagagatggtatggttcatgaagctcaaactatctagtatcagtatcatgccctttacagaaaaaatatatatatttatttctgcatccatttaatggctgttacatgatgctatgtcctcaataactagaataaattagaataaatgggtataggaaccatgggtgtcctttgacactcttggctactataagcatcaattgaagtagttataacctgctcaaagactaggaattaggggattaaacttctctgggatgaacatctgggtcactaggcaagcaatccagaacagacaaggggctgtccaaggataaggaaaatcttgaaagggtcatagaagagagagatgatgaatatcaactatggctccaagatcagctgttaggacatgagcttacaggggctagtgtcctaaacctggggagtaggtacagtccctgggtttgctaatcctaattaagtattttgaggagattgctagggctaccacctcgaagaatgaaagaaataaatgcatgttgttctagtatcacagagtgagatgcacatagcataagatagtgagggcctagaaagtagatttgcatgtacttcc

SEQ ID NO: 714986 - DNA, 1995 bp, Homo sapiens
atcaaaggattagaatctttaatatatgacgagtacattccagtggatgaaataacatcaaaggcgatggacagacaatttgggaatgagggaaaagtgaaagcctccgagtaacaaggaggggtactgggcaggttcagactcactcaacatccaaaaaaggtatgatattcatctagtcaactagcaaaataatacaatcataaaaacataaaaatcaaaatgaaaaagtcgaaataataaaattttcaacctaagaaatttaaaccgaaattgatattcccagccactgcaaggcagagtgggaaaattttccattttggcgaaatctatttggtaaaatctgccactaccacctgctgggcaccaaggaaggtcagaaaagaagacacacacttcccagagacacttctgggaagacagaaaacaaggtgattgttaaaatgggggacatttactgcaggttagagggatgtaatctagccttaaaaaaagaagttcagatactttcacatagcaattatactcatagggatttattaatggtaaacctgcaaacaaagttttatgcattaagggcttttattgcacaaatgtgttaattattcacagagtcaaaaattatgaacagatgaaacattcaacatttggaataactgcaaactatgctgcagtacaagtctacagaacagtaagatataaccattagaaacaatatatatgaaaaagcagcaaaatggagtaatccacatgctagaaggtaaataataacaaaatttcaagcataaggttagctaatcacttaaaatattcataaactgaacaaaataactgaactaatatgaagagtggtgaaataatgtttttatatatttgcatgtataagattcttttttacaacaaaattcaaataaaatttaaaatataaatacaattataggcaactacttctttttatatttatgatttagttaaattttcctatttttaaaaatagaaacatttgagacgatgcctaatttaaaagatacaagccagtgtaaagaaacctcccttccctacagcatccagccacttcgttgyttttgctttggagagaaacacactcccctgcttcatcagttgcttgtgtaacctttgagagataatttttgcatatttaagcatatatctgtaatatatgctaatattatgtacatattggttagatatttgagcctgcagatctcttgtaagaggactcagtgaagtgccaagagggatagacgtggactgagaatacggagttgttttagttctaccacttaggacagtcatcagaattgcaggttccttcaggtttcagattccttccgtgcagatgagggtactagcctcttacctgctagtctcacagtactgatagatcaaatgagatgtggacagtggttcagagaaggtgctctggagctgtcctgcttggatttgctgccctctacacatttccatatgctgaatagttaatgagaattaatgttgtttaatttccaaatgttgaaggatttttttctgtcatgctgaaaaaatcctatattgaccttttttgtccccccagcactgggaacatgttgctccgtctttttctggcttaatttttttctgatgaagcaactactattatttaaaaatctttcttccttttcatctatgatttcaagattttgtctttatatctgtattcccagcaattttttacataatctttgatgtggttttacttgtgtttatactcaatgacattccatggacttcttggacctgtagctttataccattatcaaatgtgtaaatatttctatatatcttaaatattttttctaatttgtatattcttctatgctaattctcaagtatttttatctctttctggaacttcagttatcgtaagttgctaatattaaactacaggtcatttaggttttgcacatttttgttcagtatttttgtctctctgtg

SEQ ID NO: 714987 - DNA, 1846 bp, Homo sapiens
gggttttttttaaaatatgaatataggtcatagctatatggcttagcagaaattgtttaccatataggcaaactttatttctaaactatataaacacacctgtgtacatacgcacacacacacaaataaatttaccacttgaaaaaatgtattggacactcagtatggcaagttgctctcaggtaggaggaaagagctgtttgcaggattgcgcagacattatggtattatatatgaaattttaggttgttaatctttctgtgatttcaggtcaacaaatataatttttatgctttgtatagttcttgatagaaagtaacctttagtatcatttttcttaaacctaccaaattatttctgcagtaaaattatgaattaagactctcatctaaaacgaatagtctaagaaacactcttttccattggattttgattcttttgagccaactatgtcttttgcctgtgtattcagtcacaataatagcttcatagaagctttaaagttatgtaaattaaatagttacaacagctctgttttaaaaacagaagaaagcatgaaatttgtgttgagaaatatatttgatagtgacatatctatatcttatttatacagacatacagacaggatatagaaacagattagaatttgcttgaaacaatcccactggtctgtctctgtcatgagggcctccagcagcacycaggagctgctatgctgtgtatgttcttaggtctgttctgcctctagagttgactgaaactaatatgatttattgctgagtgctattgtactctcaagtcagaattcctccacaaaccacccatccatagagtgttgctgtcgactcagccaacaccaggcacatttcaaaatcattaattagctcctggaaatttggtgcctcactgtaatacactttaaagttttacttttaaatccaaaccttaaaaatataacttaaagactagttgaaaataaatgtatttataattagaggataagtatagttacctttacagtatgtcataagtaaagttctatacacactactaattgtatatgataaaagcaatacagctagcatagcctggatacccgtctgtctaggatgaggatgaagtattacttggtagaagctagagaagaacttcttctcgtggccgtgattgggttagttctcctatgtcaccctgcttttatgccacaaccctttaactccactctgatttatgaatatttgagttaaacttatttccttgaatcagagcaagtgtactaactgctaacaattctaccctctgtctagagttttttaaagctcatcatttaaattacagagatgatctgtctcagataatcttaatcttcctaatttatctgtcttatcttcactcattttggtgtatcattatacagctctatactgcaggcaaggtcagtgaaaatgagcatacaaagagggcacaaaaatgtactccatttacaaatgtctatggatattgttttacactttagcgagaaaaatttaatgaaattttacagttcaaagaggagcaaaaaatatcttccagaaatgagtactaatattagatgggatcagatttcaaagagagtggtaatgtggggtataggtagggataaattgagacccataatgatgtagtgtacagcacattctctagaagcaacatatgaccctgatgggtttgtgacatgaatcatagacctcttagtgtatctatctatctacacatacacacacacacatatatgtatacacactcagaatatacatattatatgtataatatattatataatatattatacatataatatataata

SEQ ID NO: 714988 - DNA, 604 bp, Homo sapiens
tatctttatgagttctatttttcctagatactaagttttttttatatgtgtctgttttttctaaaccaccttcagtattaaacttgyctccttcaaaccttatcatattttcataaaataaaacagaattttataaaaggcagtgaaaccctaccattagtctgacctataaggtactggcctttgtcttttcctaggagacaagcctgaggatccagaaatgcactggtcattatgagatgtagatcttacttcacttctctgtcaggtccatcagcaacaagccaacatagaggatgttgttcagaactgccagattctatacatttaaacatttgtgttctttcttttgcagaatattttgttgagtgtggataatactttatgtgtaatttacaaactcaaattaccatccacttccacagtcttattttacctaatgatctataagttcatttaattctgaaatctcttgctttttacttggcttctgacattagttgtacttgatgcttattctcagaatttattttctttctctaatccccaccagaagtttacaaaagttgttttcttaaattacagggagtgcccacttgtcttt

SEQ ID NO: 714989 - DNA, 673 bp, Homo sapiens
aaagagaaccctatcattattttctggtttcctccttaattatagacaatcatcctgaaggaggtgggggcagcttctgtgacaaaagttgtctagcatttaacagaacaatttagaaccagattgaacggatcaaccttatgtcaacttgcagatgcttgacaaaaactgcttaaggggtacttggatgcaatgagaagctaattcagccttttctcttttcctttcactcagaaaatagggatgtttgttttattttattgtaattctttgctcagaaagattcacgtaggtctgtctcaaagactcttattaaagcatggtacatcccaaaattcttactttttttgcctaagtaatacaattattatcaccatcataaaagccattaakatttttaccacttacatatgccctctttctactacaatcctgtctctggaaagttaattctgaatttttttttttttttttttttttgagacagagtctcgctctgttgccaggctggagtacagtgacgcaacctcagctcactgcaacctctgcctcctgggttcaagcaattctcctgcttcgggaaggaaggaaggaaggaaggaaggaaggaaggaaggagggaaggaaaagaaagaaaagaaagaaagaaagaaagaaagaaagaaagaaagaa

SEQ ID NO: 714990 - DNA, 1967 bp, Homo sapiens
gggcctgcactttgacagactgtctgtcggtgtgactcagccatctgatcttcctgggcctgaaggaaaagacatttttgtccttccctcaggtagataactcacttccttgaaacacgtcactgttgtggaaaagtgggtttgaagaaaatcattcttgacatctctatttggcagcagtgtttctacagtgctactattcatccttgatgcaaaattgtgtgttttgatcttggccctaccctcaatgacaaaatttcgaagagatagaaaactaggctagagtttccctagttacgagatttgcaaatgtgtaatggagttgaatcttcaaggcgtgctcttccatcaagctacataaccccaaaggcaccatgtctgggaagccacccacagtgattttacacacttgtcgtaatatgaatgtgagcacacaccgtgcaccagtcacccttttgcaatgaaatacaggattacaattaaataacatacttttatgaaacacaaatgatcaccacttgctttttaaatgagaaataacaaaagttgagaccagaagtaaagaactgccgtatgtaagcaccagttaggggctacttcctttgaagcctcaagggcagccagtgagagcagacagaacagaaactttgaagccagacagactagagtttcaatcctgaagcagatcaatttctccgcgygacctcaggcaaatcactggatttctctgagctgaagtttcctcatctatttaaataatccttttctggggtcatcacaaggcaagatcacatgtcctcacacagggtgaacaattcatcaacagtgctttcccttctttcttggaattcaaatggactagggtgagggagtggtcactgttatttgcataggcatggggggaggcaagaagcttgggggaaagggagaatgtgcagtgtgctctgccccactgagggaaggtgtattagcctgttctcatgctgctataaaggactgcccaagactggatgatttataaaggaaagaggtttaattgactcacagttccgcatggctcaggaggcctcaggaaacttacaatcatggcagaaggggaagcaaacatatcctttgacggcaggaagaagtgccaagcaaaagggggaaaagccctttataaaaccatcagatcttgtgagaactcactcactatcacgagaacagcatgagggtaactgcccccatggttcaatgacctcccaccaggaccctcccacgacacatggggattatgggaagtacaattcaagatgaaatttgggtggaaacacagccaaaccacaccagaagggaaatctcagaagaacccagaatttgggctcccctggactttgtccctggtgcaatccttctacactttaaactgcagagcatcctatccaaggactcctttctgaggctcctcctgcccaggacatctgagtgtccctgaacactctcctctcagatcactgcagctctcagggtcctggctcctctttttcttcttgtgggtttaaaaaaaacaattctaaagaagaacagaggttttctgttttatcttcacacataaccagagaaagacttgctatggtttgagtatttgatgcctccaaacctcatagtgaaatctgatccccaatgttggaggtaaggcctgatgggggtgtttgggtcatggaagcagattcctcatgaatagcttggtgatgtcctatggtcataagtgagttctcgctcaattagttccggtgagagctggttgttaaaaagagcctggcccctccccaccatctctctcttgcttactctctctatgtgatctctgcatatgccagctccctcaaccttccaccatgagtggaagcaggctgaagccttaaccagatacagatgtcagcaccatgcttcctatagcctgcagaactgtgaaccaaataaacctc

SEQ ID NO: 714991 - DNA, 1967 bp, Homo sapiens
gggcctgcactttgacagactgtctgtcggtgtgactcagccatctgatcttcctgggcctgaaggaaaagacatttttgtccttccctcaggtagataactcacttccttgaaacacgtcactgttgtggaaaagtgggtttgaagaaaatcattcttgacatctctatttggcagcagtgtttctacagtgctactattcatccttgatgcaaaattgtgtgttttgatcttggccctaccctcaatgacaaaatttcgaagagatagaaaactaggctagagtttccctagttacgagatttgcaaatgtgtaatggagttgaatcttcaaggcgtgctcttccatcaagctacataaccccaaaggcaccatgtctgggaagccacccacagtgattttacacacttgtcgtaatatgaatgtgagcacacaccgtgcaccagtcacccttttgcaatgaaatacaggattacaattaaataacatacttttatgaaacacaaatgatcaccacttgctttttaaatgagaaataacaaaagttgagaccagaagtaaagaactgccgtatgtaagcaccagttaggggctacttcctttgaagcctcaagggcagccagtgagagcagacagaacagaaactttgaagccagacagactagagtttcaatcctgaagcagatcaatttctccgcgcgacctcaggcaaatcactggatttctctgagctgaagtttcctcatctatttaaataatccttttctggggtcatcacaaggcaagatcacatgtcctcacacagggtgaacaattcatcaacagtgctttcccttctttcttggaattcaaatggactagggtgagggagtgrtcactgttatttgcataggcatggggggaggcaagaagcttgggggaaagggagaatgtgcagtgtgctctgccccactgagggaaggtgtattagcctgttctcatgctgctataaaggactgcccaagactggatgatttataaaggaaagaggtttaattgactcacagttccgcatggctcaggaggcctcaggaaacttacaatcatggcagaaggggaagcaaacatatcctttgacggcaggaagaagtgccaagcaaaagggggaaaagccctttataaaaccatcagatcttgtgagaactcactcactatcacgagaacagcatgagggtaactgcccccatggttcaatgacctcccaccaggaccctcccacgacacatggggattatgggaagtacaattcaagatgaaatttgggtggaaacacagccaaaccacaccagaagggaaatctcagaagaacccagaatttgggctcccctggactttgtccctggtgcaatccttctacactttaaactgcagagcatcctatccaaggactcctttctgaggctcctcctgcccaggacatctgagtgtccctgaacactctcctctcagatcactgcagctctcagggtcctggctcctctttttcttcttgtgggtttaaaaaaaacaattctaaagaagaacagaggttttctgttttatcttcacacataaccagagaaagacttgctatggtttgagtatttgatgcctccaaacctcatagtgaaatctgatccccaatgttggaggtaaggcctgatgggggtgtttgggtcatggaagcagattcctcatgaatagcttggtgatgtcctatggtcataagtgagttctcgctcaattagttccggtgagagctggttgttaaaaagagcctggcccctccccaccatctctctcttgcttactctctctatgtgatctctgcatatgccagctccctcaaccttccaccatgagtggaagcaggctgaagccttaaccagatacagatgtcagcaccatgcttcctatagcctgcagaactgtgaaccaaataaacctc

SEQ ID NO: 714992 - DNA, 660 bp, Homo sapiens
tgatatggccacacttaactgtaagggataatggaaaatatcatctttaagctagacagtcatataaccagctaaaaatacctattggtattgaygaatggaaaaaatattaagggacaactaacggtttcaaccacagtttacctgaaaatagagaccatatctactgcgtggaatttacttgggaaggggtcagaattaaatgggaacatacatataaagcaccttgcataacgctgcatgaatgagaatctcattccttcttctcctctgtatgcacaaaaataagcttatccacatttacctcttgtctaccttgcatcttcagacctagatacaattcattaacctttccaagcagaaaaattaatatgccataatttcttcctattttgacttgcagatatcagcaaccaaacacaaaatactgctcactatctttctcagccttgcataactgttaacattgtatatttcaaagctgccccaatggcataatagcaatgaaattctgggtttacactgtctctggaatgtgagctccacaagaccatggccttgcctgattcattcacaggaaagttatagaagaatacctggcacataattgggcacattcaatattggttgaaggaactgatactgggattatcaaatata

SEQ ID NO: 714993 - DNA, 942 bp, Homo sapiens
tttgagacagggtctcactctgtcgcccaggctggggtgcaatggcgattcttgtgtctcagcctccctgaatagctggaactacaggcatgtgcactaggcccggctaatttttttgtatttttagtagagacagggttttgccatattggccaagctgatctcgaactgccggcctcaagctggtctgcctgcctctgcctcccaaagtgctgggattacaggtatgagccactgcacctggcataaatttgctgtatttttaatacagaataattagccagcccttttgacacagaatataagaatgaatgaaaagagttgggggattttttaacttcctcaggccaaaacaatccagtggttagaattgacacattatatgtcatctaaaaatattccagcctatcattttatacttggaagaccatgtcacttattttttttaattggcctgagacaaggaggttttcattaactctcaacattattccagagaagagtcagcttccgataaagccatacacttttttaattatgtrtaactacgccaagatgttcttggggaggaaaaataaaaagctccctcataacccttactaagaatcttaccatagggactttactcttatttaaattaagagtcaatcctttattaaatatattctaactagctattactattataggaaaatcacctctatgaatgaagagattagggataggagaggcagggaatgtctgaactggattgcttggttttttataattcaccaacacttttcagagaacgctttctaaaaatataaaatattgttttcacattttaagcattatcctatactgagtgaagtgtgcagttaaattttgggctaaatcttaaataagggctacatgaactcactagggaatgagacaacatctttgataaataaattgggg

SEQ ID NO: 714994 - DNA, 942 bp, Homo sapiens
tttgagacagggtctcactctgtcgcccaggctggggtgcaatggcgattcttgtgtctcagcctccctgaatagctggaactacaggcatgtgcactaggcccggctaatttttttgtatttttagtagagacagggttttgccatattggccaagctgatctcgaactgccggcctcaagctggtctgcctgcctctgcctcccaaagtgctgggattacaggtatgagccactgcacctggcataaatttgctgtatttttaatacagaataattagccagcccttttgacacagaatataagaatgaatgaaaagagttgggggattttttaacttcctcaggccaaaacaatccagtggttagaattgacacattatatgtcatctaaaaatattccagcctatcattttatacttggaagaccatgtcacttattttttttaattggcctgagacaaggaggttttcattaactctcaacattattccagagaagagtcagcttccgataaagccatacacttttttaattatgtataactacgccaagrtgttcttggggaggaaaaataaaaagctccctcataacccttactaagaatcttaccatagggactttactcttatttaaattaagagtcaatcctttattaaatatattctaactagctattactattataggaaaatcacctctatgaatgaagagattagggataggagaggcagggaatgtctgaactggattgcttggttttttataattcaccaacacttttcagagaacgctttctaaaaatataaaatattgttttcacattttaagcattatcctatactgagtgaagtgtgcagttaaattttgggctaaatcttaaataagggctacatgaactcactagggaatgagacaacatctttgataaataaattgggg

SEQ ID NO: 714995 - DNA, 1556 bp, Homo sapiens
ttcagtttccactgtgactgttctttcactttacctggacttctggccctttgactattcccacccctctatcacttaaaccatcagatcttcctattcttgcatttatttctttatgtagtttagattccatggtctaccattttgaataacatttttgcctaagacctgaacttttttatactttaataatttacgtataataaagtatacatgtatttgtgtgactctttacttaaaatttgtctctactcaaagcttcatgacgacagagaaccaggtctgcttctccttactactgcatccccaatgccagtcataatgcctagcacagagtaggtgctccacaatatttactggatggaagaaatgtaatttaaaatgagatatcagttttcatatattcaaytaacaaagatacataaaaataacaacactgagcattgaaaaaggttgggaacataggcagttactagcaacagtttttagaatggcaattctgcaacatttatcagaaaccctaaaaataaacacatcttttcacccagtagcattacttctaccactacttgtattctaaagaaattgtcaaggacattaaaaaaaacaacaaaggattcagtgtacaagactgttcatcaatacactacgtatagttgtagggaaacaattctattgtccaacatatagggattggctaaataaactaagatgtatgtacacattgaaacattattaagccattcaaaataatattgaagatgcacacttaaagacatgaaaagacacccacaatataggatgatgaggaaaaaaagcaagttataaaccatatttataatatgtttccatttctgtaaattaagtaaacagccatggaaaaactcaaggagaaacagtaatatgacaataggagttatttcttggtggttgcattacaggtaatttttgtactcttatttttgtttgtatgcattttgtgcaaaaaacacataccagtttcacaataagaaaacaggaatttaaaaaagcaaatcacactgagttgctttgatgagattctatagattcaaagaaagtctgctaattgcagctaataaaacaatgttttcagtgaccttctataatttctgtaatatttatttctgttttgtctaaaggacatatttagaaactagcaatgaatatgctgagtgaaaactgcaactacttgtttaaataccagaaatgccagaacaaaatatgtacaccccaggaaactaatatcatataaagtatagaaaataagggaaaatatactgcatgcttatcatattggttatttttaaaaactaaaataaggatttaattatattttaaataatttgaaaaaaatttacaaatattgtcttcttggattcaatatttatacaagtattattatgttatccaaagaaataattttaatacacacaaaacttttaagtgcttattaaattgtttggtttatgaggtagtatttgaagggtttcaatcatgtcctaatgacttagtttttcatctactgtcataaacta

SEQ ID NO: 714996 - DNA, 1312 bp, Homo sapiens
ttcatttcttcttctttttttaaatctgtagtaatttccaaaacctttaaaggttttatcttcaatttcttcttcttctttttttaaagggtggtagtaatttccaaaacctttaaagtaaaggtttaacagccagtgaaatgtacagagtaagagtgaataattcacttcttgaataataagaaatcaaatcaattcaaggatgtgaactaagacttcacactacgttaggccacagagtaaaaaaaaaaatgaaagacttgaaatctaatcctgtttataatatttaatatgagactttagaaaatcaccttatttgtgccttagatcagtgaaaactcaaagtagccagttgtcaaaatattcattgcaggtccacgtaaggtatggagtatgcaccagaatgtaagtcaaccattgcttccttcattgagaaagtcttgctacccagaaaaaaagacagctgaactgtacaacgtgcttaataatgtagctggttgacaatgtggctcaagccagtgcagggatcacactgtaagtggcactgctttagacttttctgcaaataatattatcctgctcttcctacttctcccattcttgatggattggtttggatcaagtataagaaaactggctgagtattttatatagtttctctaacaaggtaaaatgtttaaagggaactttttgcagaaacttcacaatcagtggtagaagaagagaagaattctaggaaagtgaaaagaacttatggaatacaaaaaaatcaaatgcttcacaaaaaagtctcttgtcccggtgttgtgttcaatttaacatttgtcttgtattttacaattttaaacaaattattattaattgctgcaagaaaacaagctgggatgggtttggcggacttttactttgtacctccagcttcaaatcttatttcactgtgcaaargtctcattttaacacatgattaaatctgaaagatcatcccaataaccttctccttcctctacccctcccacagccactgccatcatccttcttctctgatccaaggtaagtcacacctctccttgaaagacaacctagagagatcttgcagataacacaaagggtggcatgggcagctaactgtttctagttagggtggtggtgggagaaatattcagtgccgacgtccttgccagaaacttgacatactggctagtagagctgagacccactaggcagcctgcaagatacagttcgtggagtcattgtgaaatgagaggttagtaaacatcaaatctgtatagaaagtctgaccagtcctgccaca

SEQ ID NO: 714997 - DNA, 3110 bp, Homo sapiens
cacacatatacgcctgcatatgttacacatacacgtatatttgtatatgccctcactctctgtgaatcactcctcaatgtgatgcgtggctgccgggtattgggaagtagtatgcttgcatttcttatccccgagcctatctgggtgtgacatttatgtgtgttatgctccacaggctagtaggtaggagactttagttcaggccagcccttcctcagtccttaactaatgctgtgtgggtggctgccctctccacctcttggaaaggtcactgtgactttctttttgacatagcattttatggccctacctgctgggaacgtggcttccttcctcactgcacgcccctccccctccccccggaagctcaccttgattttgtaagtaggaaactgggaaatattttccttttcaaaatgtcacactctaggagaaaagacaaatacgttgtggctacaggtagtgtatttctccactatttatttattcctggagatcataggcaaaagtctgaggaggcaaaagggtagtttcttccttgaaaaaaatatagtgttgctttaatttgctgttatatgcaatatcagagaacaggattagaccttaaggctcaatgttaaatgctggaggtggttaaaatgcagatttatctttttcttttatgttttttgcaaattttttttgtccatagtatatatgataatgtcatctatgatatcaaaaaaattgaattatcataaagcccgtacaaggtaaggaaatcctcctaaatgctaaactcaggagaaaaataccaagtgggccaccttgtaatttatatactgtcagtagatggtaatacagtttctgttttgagtcaaacattatacaaatatttttccattagtatatttttcatcaaataaaatagtcatgcatttggcacaaaacatgtttattagaatcaggctcagtgatttggaaaatggtaaatctatcacttaaattattaattcctttgtattagatgctgttcatactttgacagctcagccctatggatggcatttacagttttgctgaaggcagccctgccaattgccatacatagatatgctggtctggtatgtcccatcaatttgctcatcatgaatttaccttgttattatgtagcagtatcattggaccttgagggaccagttgaagaccccagatcagcagagtggcttcctgctggtagggaaaaatgatctctagcacgggatacttattttaactcagcatgacaattgttgcatacttcaatttattattttggtttcgttattaaaagatgcacttagctatttgtaaagaatagacttagtaaattatgatttcataaagaaagctaaatctgttagaaacgatgttggccattgttttagcatgagtatgccagaattctaattccatcattattcaggaggaattataattcttaaactgttctctagcctataaaatagggttatttgtataattcttaccggtcaagtggctgggaggtttgattaattttttccctgaaaggttaaatagtgtaggcatagtgttcagttatgcagtgcttttttagtacatgttcttttttccctccacagcaaactacttatttactgctttctttgtgcaagtctttgttgaaaattcaaaaatgaataaagcaaggtttctgcactcagagagcttaccatgtaggcggagagatcagatcccgcacaagtgaccataatataaggtagaaggtgataaatgcagtaagaagagagataaaactaagaagctatgggtagttagaggaaggtgaaagcccttttgtttagatgttatctttggtgtgcttgttcccatagtaaccagtggtattgttttttgtgtgtgtgtgagtttttttttttgtttttttcaacaaccaaattttgagaagagtaatggataggacgaatccagggtcagtgtcatgctgtggtctttggtaaggggtttaccgtcttaacttatttctgaaaagacgacatttgtttttcagtagagtggtatatgttattacgtgggtaccaaattaatagaaatacagtgctctgatccaaaaaatgtctggcattttacttcattttttgggtgttctcttttggttgttttctttgagaatttgagtccctgatgcatatcttggctttattagtggtatcttcaaaaagatgaaatgcctactatgtgccaagcacgatgataagcacgttgtttgctgtgtcttgtttaatcatcataaaaccaccatagcatccatcctattgttaccagaatttcacatgtgggagattaaggtttaaagtcatgaaataatttgtttaacaccgtaaagctcacaagaagcagaggtgggtcttgaagctaggtcagtttaacatgttggtccttgttcttcttccctgaccctgtggccttgctctattcagtcctgttttgaatgcagtcagaaactcctgtrctttagggattgttacatttacctgtcttcccattaacgtttcacataaatattcttttaacaatgtttcccaacaaactcatcattaaatgttatgacaggaatattggaaaatatttttcttggaggagatgctaaagatgctgctgcaaatagaaactggcatttatcgtgttttaataatttttcaagcactgtcacatcacttgcttgatttagtttttcctttcgtcctacatttgctgctgacagatgaaacagaaagactggagatgttaagtggctttcctgcagtcacagctgtaattctccagctggctagcatctgggtcttctgacactaattcaatgttattgatgatatggtatagggagatagtatacatataggtgatagagggtcgtgtaaggtgttgcctttggcatatacaaaatccttctgctggtaaacatgctaaaggaaagaaggtttgtattcagaaaaaattggtataagggaagcaaaatagaagcatgaaaaatcattcattctgcgataatactgttttttccttgacaactgagcaagaggacattgtgagtacaaatactttcagca

SEQ ID NO: 714998 - DNA, 1897 bp, Homo sapiens
cacaaaaatcagctttattatttgataatcacacggcatgtgtttaaacactgaggaaaatgttttgagcgtttgaaatacgattacatattataccagtctgcttttaagtcttgtccttggatatatccttcatggtggagttgacattgcaccattgaagactatatttcatgaataagcacaagggtttttctacttttggcaaacttcaggtgcttggaaatttccaattagggtggctggtatctatgccaagtgattgatttcattttatttactttatttggaaccgttgaagggatgatktcttcccaaaccattgtaataatgagtggtataagttagtgttccagaggccgagaacaaatttagtttttaccaaagggacaaatgttgacttttaaatatttgtcagaatcagatagtatattagtttgctagggctgccttaacaaagaaccacaaactgggtcgcttaaacaataggagtttattttctcattgttctggcgcctagaagtctacgatgaagctgcccaaaggtttagcttctcctgaagtctctctctatggcttgtagaagaccttcttgctgttcttatgtgatctttcctctgtgcgggcacatgtctgtgtcctaatctcttcttataacgacacctgtcctgttggattagggcccaccctaatgatctcacttaactttaattacctctttgaagaccctgtccccaaatacggtcacattctgaggtactggctgttaggctttcaacatgaatctgaactgtgtgttcagcccataagaaatgagaagggaaaaggcttcatgtggtggccacttctcagggccactctgtgttaataagagttgtgtgggcagaacagcagtggggcttaagaaggggcatccctgggaagcagataaggctgagcttcagatttcccttctcttacttgagggaatcttcagatttaaaaagaaaatagattttgtaaaaaactgacctggaaacagtgtcaggtatttgtcgtctctttaaatactgtcatgcaaatcataccccttctggtacccttgcccttctgggagatgtcaccctaaaaggggctttccaagctctgctctcagctttcaggcacccactccgctcttctccagggcaggccagaggagtttcagtcctgtgagtgttagtcattggagaaccatgtaaccccaacctccaaaaacaagcagatgcattttttctttctttttgccttgagagaatctttggatttttggtttgtttagacattctgcatgaaaagtcctgtcctcatccggtctcctggcaagtgtgccctgatgtattctcgtgcatggatgtttccttctgatatacattaacaacctagcaaatgcctaggaacaatgttactttctgtgcaactatgtattttataaataatcatttgctgaagtaatttcagaaaagttgaacttgaggatttatagtggctctgcccaagggtcattcatcctagactgtaaatgcagttacttacaggccttttacctgaagtggatcaaaaggggaaatacttgctccatctcattcatcatcaaatttaattatcttgcagtaccacctgtggaaaagtcagggggattctgcttacatttctaccctggaggacactggcgttaacacttcttattaattagttcttcacagttttttcctttgatgagtgatcattttccttttaaatttgctaatctttaatataatttcccctggattcgattacacatatacattaatagtaaaattacaggaataggaaaattaaagtatgtttctatttctgtgatttcttggctaaagtttaaagaatgtattgtctg

SEQ ID NO: 714999 - DNA, 1897 bp, Homo sapiens
cacaaaaatcagctttattatttgataatcacacggcatgtgtttaaacactgaggaaaatgttttgagcgtttgaaatacgattacatattataccagtctgcttttaagtcttgtccttggatatatccttcatggtggagttgacattgcaccattgaagactatatttcatgaataagcacaagggtttttctacttttggcaaacttcaggtgcttggaaatttccaattagggtggctggtatctatgccaagtgattgatttcattttatttactttatttggaaccgttgaagggatgatgtcttcccaaaccattgtaataatgagtggtataagttagtgttccagaggccgagaacaaatttagtttttaccaaagggacaaatgttgacttttaaatatttgtcagaatcagatagtatattagtttgctagggctgccttaacaaagaaccacaaactgggtcgcttaaacaataggagtttattttctcattgttctggcgcctagaagtctacgatgaagctgcccaaaggtttagcttctcctgaagtctctctctatggcttgtagaagaccttcttgctgttcttatgtgatctttcctctgtgcgggcacatgtctgtgtcctaatctcttcttataacgacacctgtcctgttggattagggcccaccctaatgatctcacttaactttaattacctctttgaagaccctgtccccaaatacggtcacattctgaggtactggctgttaggctttcaacatgaatctgaactgtgtgttcagcccataagaaatgagaagggaaaaggcttcatgtggtggccacttctcagggccactctgtgttaataagagttgtgtgggcagaacagcagtggggcttaagaaggggcatccctgggaagcagataaggctgagcttcagatttcccttctctyacttgagggaatcttcagatttaaaaagaaaatagattttgtaaaaaactgacctggaaacagtgtcaggtatttgtcgtctctttaaatactgtcatgcaaatcataccccttctggtacccttgcccttctgggagatgtcaccctaaaaggggctttccaagctctgctctcagctttcaggcacccactccgctcttctccagggcaggccagaggagtttcagtcctgtgagtgttagtcattggagaaccatgtaaccccaacctccaaaaacaagcagatgcattttttctttctttttgccttgagagaatctttggatttttggtttgtttagacattctgcatgaaaagtcctgtcctcatccggtctcctggcaagtgtgccctgatgtattctcgtgcatggatgtttccttctgatatacattaacaacctagcaaatgcctaggaacaatgttactttctgtgcaactatgtattttataaataatcatttgctgaagtaatttcagaaaagttgaacttgaggatttatagtggctctgcccaagggtcattcatcctagactgtaaatgcagttacttacaggccttttacctgaagtggatcaaaaggggaaatacttgctccatctcattcatcatcaaatttaattatcttgcagtaccacctgtggaaaagtcagggggattctgcttacatttctaccctggaggacactggcgttaacacttcttattaattagttcttcacagttttttcctttgatgagtgatcattttccttttaaatttgctaatctttaatataatttcccctggattcgattacacatatacattaatagtaaaattacaggaataggaaaattaaagtatgtttctatttctgtgatttcttggctaaagtttaaagaatgtattgtctg

SEQ ID NO: 715000 - DNA, 1526 bp, Homo sapiens
ggaaatgaggctcagatgggccccaaaacacaccttcagaaatgggactgagagctgagtctagaatccaagtgtatctgatatcaaagccagatttttaagctatcaaactgtagacaaatatgtatagtgtgattatattacaataygtatagtgtgattatattttataagaaaaaaattcacagctagctatgaatttctagcatagaaaaaagttaagaacagacctcaaaaatattagctgggatttttaatgaatataaaatttggacgatttctatttttgactctcggtaccttaaactatctgcaataatttcaatttaatcgcctatcgtatgattttgaataaggctctgactagtttgtatatttgtttaaatttatttaaagttgtgcttttggggttttgtttctcatatgaatagtcaaaaattgtgtgttctaaaagcaattcatttaaatggtgaaaaacatgaaattattctccacttctagattctttttttgaaggaaacagatttaacacatttttgtaaggaagcatatttgttttttatttttcttccatgttctttatttttaatatcaattttgtttttagtcaaatgtatttagaatttagatcatgttattttcaaaccagtattttcctaataaaaaattgttaaatataatccttgcccctctcttctcttcttcttttctttcctcctttacagtcagtatttaaagtagcaacaaaaacctttggcataataatttatttttttctaatagacttgaatgacatggtatattttcacatcatgttgccatgactaccaaaccctttagcttatcttcacttaaatatgttcgctgttaaattagagatgtggtttcagcaatttaggatactctataatttttgtttaaaatgttagttctctgataagtcctcaagttctctctttcaatgagaataatgcaagagagttgctggctatgaaacatctattttccataattctttcaaagccagctaaaaagtccaactattgtctaagagagcttttcaggttctgtgcaggaatttgtcactcagggtcagagcacaatttatgtgtgttgtgaaataaattagagagcttctcctaaattccaagatgtctaggttgacattgagacctctgaaacacacccacggcagaatattgaaaagtattgtatgacaataaagatctcttcctggcagattaagaaatgtctctctggatgtgggtccacttcatcctctggctgtgtgaaggtgtgactgtccgcgttacaggaatcagcagagggcctgacgtgctgctcaggaatgagcacggcagagagagaaagcagtggctctacgtgaagaatagtcagtacccacaagtttaggcttggtctcctcttctcttggagccttacatattaaaaactaaagaaatatatttactctgtgtgtatgcgtgtaagtgtgcacatggacatgttggcatgagcacgaaata

SEQ ID NO: 715001 - DNA, 1526 bp, Homo sapiens
ggaaatgaggctcagatgggccccaaaacacaccttcagaaatgggactgagagctgagtctagaatccaagtgtatctgatatcaaagccagatttttaagctatcaaactgtagacaaatatgtatagtgtgattatattacaatatgtatagtgtgattatattttataagaaaaaaattcacagctagctatgaatttctagcatagaaaaaagttaagaacagacctcaaaaatattagctgggatttttaatgaatataaaatttggacgatttctatttttgactctcggtaccttaaactatctgcaataatttcaatttaatcgcctatcgtatgattttgaataaggctctgactagtttgtatatttgtttaaatttatttaaagttgtgcttttggggttttgtttctcatatgaatagtcaaaaatygtgtgttctaaaagcaattcatttaaatggtgaaaaacatgaaattattctccacttctagattctttttttgaaggaaacagatttaacacatttttgtaaggaagcatatttgttttttatttttcttccatgttctttatttttaatatcaattttgtttttagtcaaatgtatttagaatttagatcatgttattttcaaaccagtattttcctaataaaaaattgttaaatataatccttgcccctctcttctcttcttcttttctttcctcctttacagtcagtatttaaagtagcaacaaaaacctttggcataataatttatttttttctaatagacttgaatgacatggtatattttcacatcatgttgccatgactaccaaaccctttagcttatcttcacttaaatatgttcgctgttaaattagagatgtggtttcagcaatttaggatactctataatttttgtttaaaatgttagttctctgataagtcctcaagttctctctttcaatgagaataatgcaagagagttgctggctatgaaacatctattttccataattctttcaaagccagctaaaaagtccaactattgtctaagagagcttttcaggttctgtgcaggaatttgtcactcagggtcagagcacaatttatgtgtgttgtgaaataaattagagagcttctcctaaattccaagatgtctaggttgacattgagacctctgaaacacacccacggcagaatattgaaaagtattgtatgacaataaagatctcttcctggcagattaagaaatgtctctctggatgtgggtccacttcatcctctggctgtgtgaaggtgtgactgtccgcgttacaggaatcagcagagggcctgacgtgctgctcaggaatgagcacggcagagagagaaagcagtggctctacgtgaagaatagtcagtacccacaagtttaggcttggtctcctcttctcttggagccttacatattaaaaactaaagaaatatatttactctgtgtgtatgcgtgtaagtgtgcacatggacatgttggcatgagcacgaaata

SEQ ID NO: 715002 - DNA, 1526 bp, Homo sapiens
ggaaatgaggctcagatgggccccaaaacacaccttcagaaatgggactgagagctgagtctagaatccaagtgtatctgatatcaaagccagatttttaagctatcaaactgtagacaaatatgtatagtgtgattatattacaatatgtatagtgtgattatattttataagaaaaaaattcacagctagctatgaatttctagcatagaaaaaagttaagaacagacctcaaaaatattagctgggatttttaatgaatataaaatttggacgatttctatttttgactctcggtaccttaaactatctgcaataatttcaatttaatcgcctatcgtatgattttgaataaggctctgactagtttgtatatttgtttaaatttatttaaagttgtgcttttggggttttgtttctcatatgaatagtcaaaaattgtgtgttctaaaagcaattcatttaaatggtgaaaaacatgaaattattctccacttctagattctttttttgaaggaaacagatttaacacatttttgtaaggaagcatatttgttttttatttttcttccatgttctttatttttaatatcaattttgtttttagtcaaatgtatttagaatttagatcatgttattttcaaaccagtattttcctaataaaaaattgttaaatataatccttgcccctctcttctcttcttcttttctttcctcctttacagtcagtatttaaagtagcaacaaaaacctttggcataataatttatttttttctaatagacttgaatgacatggtatattttcacatcatgttgccatgactaccaaaccctttagcttatyttcacttaaatatgttcgctgttaaattagagatgtggtttcagcaatttaggatactctataatttttgtttaaaatgttagttctctgataagtcctcaagttctctctttcaatgagaataatgcaagagagttgctggctatgaaacatctattttccataattctttcaaagccagctaaaaagtccaactattgtctaagagagcttttcaggttctgtgcaggaatttgtcactcagggtcagagcacaatttatgtgtgttgtgaaataaattagagagcttctcctaaattccaagatgtctaggttgacattgagacctctgaaacacacccacggcagaatattgaaaagtattgtatgacaataaagatctcttcctggcagattaagaaatgtctctctggatgtgggtccacttcatcctctggctgtgtgaaggtgtgactgtccgcgttacaggaatcagcagagggcctgacgtgctgctcaggaatgagcacggcagagagagaaagcagtggctctacgtgaagaatagtcagtacccacaagtttaggcttggtctcctcttctcttggagccttacatattaaaaactaaagaaatatatttactctgtgtgtatgcgtgtaagtgtgcacatggacatgttggcatgagcacgaaata

SEQ ID NO: 715003 - DNA, 1526 bp, Homo sapiens
ggaaatgaggctcagatgggccccaaaacacaccttcagaaatgggactgagagctgagtctagaatccaagtgtatctgatatcaaagccagatttttaagctatcaaactgtagacaaatatgtatagtgtgattatattacaatatgtatagtgtgattatattttataagaaaaaaattcacagctagctatgaatttctagcatagaaaaaagttaagaacagacctcaaaaatattagctgggatttttaatgaatataaaatttggacgatttctatttttgactctcggtaccttaaactatctgcaataatttcaatttaatcgcctatcgtatgattttgaataaggctctgactagtttgtatatttgtttaaatttatttaaagttgtgcttttggggttttgtttctcatatgaatagtcaaaaattgtgtgttctaaaagcaattcatttaaatggtgaaaaacatgaaattattctccacttctagattctttttttgaaggaaacagatttaacacatttttgtaaggaagcatatttgttttttatttttcttccatgttctttatttttaatatcaattttgtttttagtcaaatgtatttagaatttagatcatgttattttcaaaccagtattttcctaataaaaaattgttaaatataatccttgcccctctcttctcttcttcttttctttcctcctttacagtcagtatttaaagtagcaacaaaaacctttggcataataatttatttttttctaatagacttgaatgacatggtatattttcacatcatgttgccatgactaccaaaccctttagcttatcttcacttaaatatgttcgctgttaaattagagatgtggtttcagcaatttaggatactctataatttttgtttaaaatgttagttctctgataagtcctcaagttctctctttcaatgagaataatgcaagagagttgctggctatgaaacatctattttccataattctttcaaagccagctaaaaagtccaactattgtctaagagagcttttcaggttctgtgcaggaatttgtcactcagggtcagagcacaatttatgtgtgttgtgaaataaattagagagcttctcctaaattccaagatgtctaggttgacattgagacctctgaaacacacccacggcagaatattgaaaagtattgtatgacaataaagatctcttcctggcagattaagaaatgtctctctggatgtgggtccacttcatcctctggctgtgtgaaggtgtgactgtccgcgttacaggaatcagcagagggcctgacrtgctgctcaggaatgagcacggcagagagagaaagcagtggctctacgtgaagaatagtcagtacccacaagtttaggcttggtctcctcttctcttggagccttacatattaaaaactaaagaaatatatttactctgtgtgtatgcgtgtaagtgtgcacatggacatgttggcatgagcacgaaata

SEQ ID NO: 715004 - DNA, 1526 bp, Homo sapiens
ggaaatgaggctcagatgggccccaaaacacaccttcagaaatgggactgagagctgagtctagaatccaagtgtatctgatatcaaagccagatttttaagctatcaaactgtagacaaatatgtatagtgtgattatattacaatatgtatagtgtgattatattttataagaaaaaaattcacagctagctatgaatttctagcatagaaaaaagttaagaacagacctcaaaaatattagctgggatttttaatgaatataaaatttggacgatttctatttttgactctcggtaccttaaactatctgcaataatttcaatttaatcgcctatcgtatgattttgaataaggctctgactagtttgtatatttgtttaaatttatttaaagttgtgcttttggggttttgtttctcatatgaatagtcaaaaattgtgtgttctaaaagcaattcatttaaatggtgaaaaacatgaaattattctccacttctagattctttttttgaaggaaacagatttaacacatttttgtaaggaagcatatttgttttttatttttcttccatgttctttatttttaatatcaattttgtttttagtcaaatgtatttagaatttagatcatgttattttcaaaccagtattttcctaataaaaaattgttaaatataatccttgcccctctcttctcttcttcttttctttcctcctttacagtcagtatttaaagtagcaacaaaaacctttggcataataatttatttttttctaatagacttgaatgacatggtatattttcacatcatgttgccatgactaccaaaccctttagcttatcttcacttaaatatgttcgctgttaaattagagatgtggtttcagcaatttaggatactctataatttttgtttaaaatgttagttctctgataagtcctcaagttctctctttcaatgagaataatgcaagagagttgctggctatgaaacatctattttccataattctttcaaagccagctaaaaagtccaactattgtctaagagagcttttcaggttctgtgcaggaatttgtcactcagggtcagagcacaatttatgtgtgttgtgaaataaattagagagcttctcctaaattccaagatgtctaggttgacattgagacctctgaaacacacccacggcagaatattgaaaagtattgtatgacaataaagatctcttcctggcagattaagaaatgtctctctggatgtgggtccacttcatcctctggctgtgtgaaggtgtgactgtccgcgttacaggaatcagcagagggcctgacgtgctgctcaggaatgagcacggcagagagagaaagcagtggctctacgtgaagaatagtcagtacccacaagtttasgcttggtctcctcttctcttggagccttacatattaaaaactaaagaaatatatttactctgtgtgtatgcgtgtaagtgtgcacatggacatgttggcatgagcacgaaata

SEQ ID NO: 715005 - DNA, 650 bp, Homo sapiens
taaatttgcctgagagactgcctttcggctccttcctctaaggaaaaaagtagataaaagagcagggtttgggggccattgagcacgtggctacactgctttagaattctctgatagtattccactgcagagaataaaatccaaactcttcaccttggtccacaaagccttataagacctggcccctgctctctytctgactcatattctacctcttgggcatcactctctattctctaccttcagcctgtttccatcctttaaatatgtcaggctcctttgtgcctcagggcctctgcatctgcttgggattctcttcctcagattcagagctctcaactccaatcacaggcctttcctgagcttctttgctaaaggccttctcagaagcgctgaaaacaattttaatactttgtttgttttcctatgtgcttgttttctatttactctaactagaataatggatagctaggcactgtggcatgtaccaataatcccagctcctcaggaggctgaggttgggggatcactgaggtcaggagttcaaaaccagcctgggcaacattgcaagaccccatctctttaaaaaaagaataatggataacattcttttagaaccatgccaagtgctgtgtttgacacttatgtgc

SEQ ID NO: 715006 - DNA, 2463 bp, Homo sapiens
gggacggcttggctttgagaatttgcatttttaaaaagctcttcaggttattctcacacatattcaagtttgagaatctgctgcagtaataggtcattgaagacttttaagcaagagagggggataataggttaaaccttttagaaggaatgctctgttagctgtgcagaagagggcagagcattttaactttgcaatgcaaatgggaccattgtgataacatggcagcagaaattacgagatgagagatgcaaagatatcaaataatatttggaatttggatgaagaattattttcatagctatttgatacttttaattcgttgaaaggtcattatcttatttattttctcttttgtaaaagctcattccattggatcaaaatgccacagttaaaatatcaaacaaaaaaagacagtaaattggagctagccgggaatagacagggaggatgcaacagtctaagcaagagagaagaggatggacaccaaggcaataggaacaggatggggagaagtgagtcatagaacaaggggaaaattaaaggacatgctctccaattaggtgggaaaggcaaggagcaaaaacagctgtgacattttcttaaaaaaacaaaaattcattattttagaattattggaatatggaactgatttaatatgatttgccttaatgacatcacttcacagaagtgggacgatggaaagcaagccaaaaaaaggacagctcagcataattcttcattgttctgaaaacagcctgcactactgacaamggctttgtgtatcctctttagatttagggcctgcacggtgccatgagcatcttggctgtaggatccacattcttcttatgttgctacagtgacttgcacataataggccctacatatatgggtttagaatatacgaactcattaattaattgtgatactgattggaagtagcattttctggcttaaaacaacttctagagaaacttagtgcatgcctctactttcgaacaaggtgatatgtaaatcaaccactgaaatcagttgtcttcttgctatatttttacactggaaaatccaaacgaaaggtgcttcagtcagtgacacagttatttaggacactgtatatcatagcagggactagtttgagtctgagattccctgcatgaactctagcagatggcttccagatgttttgcctggttaacagcaaccatcagtttgactttggagaaatgacctataagattcactggggttgaaaggatggggaggtatttcacagacgatttgggtcattaaaacagagatagggcaaaaataataatttgatttacaacagatttttgggatagattaaaaaaatatatatatatatctgatggctgcaacttcactccttgaaagcaaaatgctatgctgggagttaatatttctatatcatgtggccctctcccaagctgtgtgcttgctgcagcgcggttgacatgagctcctctcctcatttctattccatccccttcctaacctcatttctggttatacagagctccttgtcacagcctttgttgtcatgttttatgctttctggttaaacaacaacagtaattatagcaaccttgcaattacaaattttaaaagaattaatcagctttagaattttttaaatgactggaacacattcacagaaaaaattaaaaagtgccttacttctatttctgatatcggatcagatttttgcaaatatgagcaacttacattgcatgtcattttattttatctatttcattttatcagaagtataataaaaatttcttaatggtttcagttctttgaaataaaaaaaaattctgcgcgaataatcggagagaatatgaggaatgtctccaagtcctcattctagtgctacattttcaacagccttggcttagacaaatcccttaacctcttgagatatccatttcacttgctaaaaactacatgaatcacaaatagctagctctttcagaatctgtgaatttagagaatgttgggaaaacagtttgactacttaaaaacaggataaaaatagagggaataggtttttagctccctcctaccaaaaaaaaaatttggtcattagaaaggctgccttcccactctatgtcatgcaaaccaccaggagattttgatgtatacttgtgagtgcatacaaagttctctctctctctctctctcaatctgtttctctatttgaaatctttatttctggatttcaacacaaaacattttgacagattgactttttgttaatgactttttacgtatcagcttactgaaatgtagaaacaaatccccctgtcctgggcttttagcaacgtggtgactccaaatcactgatgcatatttataaatctcttccgtgcatctgaagcaaaggtttaactttctacgtgatattttccatttacaaaatatttatgtagaactaat

SEQ ID NO: 715007 - DNA, 2111 bp, Homo sapiens
tgcataaagtaattgaatatttttttgcttgattgaaactgaagttccagactgggcgtggtgttaatggctcatgctcccagcactttggggggccaaggcaggtggatcacttgagctcaggagttcgagaccagcctgggcaacatggtgaaaccctgtctctataaaaaatataaaaattagctgggcacagtggcacatgactttaatcccagctacttgggaggctgaggtgggaggatcacttgagcctgggaggcgtaggttgcagtgagctgatatcacgccactgcactccagcctgggctacaggatgagtccctgtctcaaaaaaaaacaaaaaacaaaaaacaaaaaaccccaaacaccaaaaaaacccgaaaaccaaaacaagaaaacaaaaagcaaaccagaaaaaaaaaaacccatgaaaactgaagtcccttaagatctccattttattttattcagaaaagaaagtaagcactccctaagaacttctacttataattcaatgtctagagctatgtcatgtgcatgtggccacacataggtgcaaggtgggctggaaattttattattttgaatagatgttgattgagccagtgtagagcatcttccatactgataatgatggaggacatatgcacaagagagagtgaataggtgaaagagagagagacagggactagctaaaggataaagaaacacatggggagcggaaataagtgaaacaggcagtaacattttggataatttatcaggagagaaattttcaacaggaatcacatgggactgtgcagaagggaatttagaactacaacataaaaaatagtctttgactgagactagaaagtattagtttatcttcctttttaactaatgttttaaaaatactaaaatcagatggaaattgtgttataatagaattttgattatgtagctgcaattatgttttggatctacacggacctctttatgccaagtatgtttgctatgatagataggtaatgatttatcaaacaatttaacacatggtatctaaaatggaatatgagaaaaaaagcaaaatttaaaatgaatgctttaagaagactctataaaggtgcatttcaaagatattttgtccaattagatgtaggttttctctctaatttgaagaatcaataaaagaaaatgcattatgggagggtttatggaaaaaaagcaacatacaactttgtgctcattagaacaataataaaaaagtggacytacaacaaaacattgaaaaatattttatatctttgtatgtttagagttaaaaacaaaatgtttaagataggcatgcatcaatatttatttacctttttaactgacattttgctaacttatcagctataagtattgataatgttggataagaaggtattagatgctggcaggtgcaactggatataatacagtagtttcaatgagatgttgaagtaagccagcatgtcactccaaaatgcctccttgagatataagttatttttgagctaaaggcaataagaaactgcaaattgagaggaagctatctctaccctcttctctttctgcctaaagataggaaaataaattctttatagatgacaactctagactcatcagcccagagatgacaccagaggaatctgcaaacaaactttactccattagtttcatccccaatatttaccttcccacagttgcgtgcccttggaagtttaaaactgtttttctttgtctgtcattcctttacaagtgtattgttctttattgaagatgttctataagtggagctaagtcatctttttgaggtatttccattgagatttctccagtgtggtgtgtgtggcatgcattaatacacttgtttgtttgtttgtctgtcattaatctgtcttgtattaaaggagtctgtccaaacctaagaactatgatgaataaaggtaaagtttctactcctctagggttgatactgtgtttgaaaaataagaatgcatttggcctttacacacacacacattttcaatgctttcttatgttgtttcaaatatacaacaagctgaaagaattctagagttaatgctagtatacacaatacc

SEQ ID NO: 715008 - DNA, 2111 bp, Homo sapiens
tgcataaagtaattgaatatttttttgcttgattgaaactgaagttccagactgggcgtggtgttaatggctcatgctcccagcactttggggggccaaggcaggtggatcacttgagctcaggagttcgagaccagcctgggcaacatggtgaaaccctgtctctataaaaaatataaaaattagctgggcacagtggcacatgactttaatcccagctacttgggaggctgaggtgggaggatcacttgagcctgggaggcgtaggttgcagtgagctgatatcacgccactgcactccagcctgggctacaggatgagtccctgtctcaaaaaaaaacaaaaaacaaaaaacaaaaaaccccaaacaccaaaaaaacccgaaaaccaaaacaagaaaacaaaaagcaaaccagaaaaaaaaaaacccatgaaaactgaagtcccttaagatctccattttattttattcagaaaagaaagtaagcactccctaagaacttctacttataattcaatgtctagagctatgtcatgtgcatgtggccacacataggtgcaaggtgggctggaaattttattattttgaatagatgttgattgagccagtgtagagcatcttccatactgataatgatggaggacatatgcacaagagagagtgaataggtgaaagagagagagacagggactagctaaaggataaagaaacacatggggagcggaaataagtgaaacaggcagtaacattttggataatttatcaggagagaaattttcaacaggaatcacatgggactgtgcagaagggaatttagaactacaacataaaaaatagtctttgactgagactagaaagtattagtttatcttcctttttaactaatgttttaaaaatactaaaatcagatggaaattgtgttataatagaattttgattatgtagctgcaattatgttttggatctacacggacctctttatgccaagtatgtttgctatgatagataggtaatgatttatcaaacaatttaacacatggtatctaaaatggaatatgagaaaaaaagcaaaatttaaaatgaatgctttaagaagactctataaaggtgcatttcaaagatattttgtccaattagatgtaggttttctctctaatttgaagaatcaataaaagaaaatgcattatgggagggtttatggaaaaaaagcaacatacaactttgtgctcattagaacaataataaaaaagtggacctacaacaaaacattgaaaaatattttatatctttgtatgtttagagttaaaaacaaaatgtttaagataggcatgcatcaatatttatttacctttttaactgacattttgctaacttatcagctataagtattgataatgttggataagaaggtattagatgctggcaggtgcaactggatataatacagtagtttcaatgagatgttgaagtaagccagcatgtcactccaaaatgcctccttgagatataagttatttttgagctaaaggcaataagaaactgcaaattgagaggaagctatctctaccctcttctctttctgcctaaagataggaaaataaattctttatagatgacaactctagactcatcagcccagagatgacaccagaggaatctgcaaacaaactttactccattagtttcatccccaatatttaccttcccacagttgcgtgcccttggaagtttaaaactgtttttctttgtctgtcattcctttacaagtgtattgttctttattgaagatgttctataagtggagctaagtcatctttttgaggtatttccattgagatttctccagtgtggtgtgtgtggcatgcattaatacacttgtttgtttgtttgtctgtcattaatctgtcttgtattaaaggagtctgtccaaacctaagaactatgatgaataaaggtaaagtttctactcctctagggttgatactgtgtttgaaaaataagaatgcatttggcctttacacacacacacattttcaatgctttcttatgttgtttcaaatatacaacaagctgaaagaattytagagttaatgctagtatacacaatacc

SEQ ID NO: 715009 - DNA, 601 bp, Homo sapiens
tttcccagcccacccaggtctgtctgaatcttttgtttttgttttgaggtggagtttcgctcttgttgcccaggctggagtgcaatggtgcaatctcagctcactaaaacctctgcctcccgggttcaagtgattctcctgtttcagcctcccaagtagctgggattacaggcatgcgccacaacgcccagctaatttttttgtatttagtagaggtggggtttcaccatgttggccaggctggtgttgaactcctgacgtcaggtgatccacccacctcagcctcccgagtggctgggattacgggcatgagccactgtgcccagcctgtctgaatctttctttaccctcctccaggaacatgatctcaggaacacatatctccttttccagccggaagtacctgagagagaccccagaaggtggataagactgcagagagcagggagcatgragcaccttgcccaaggtctcaccaggcaagagaagggcggagaagggcggcttcttcatggattgtaaatccccaaagcgtgcaaacgtaaggactctctttagggctcaaggggtctaaacttacccttttacatacggagaaact

SEQ ID NO: 715010 - DNA, 999 bp, Homo sapiens
catttttaattaaacatcagtggaaatatgcttacagtaaaacatttaacagtaacagtgctttaaaagtataaaagaaaagttgtccccccaacctcttattctccactccccagaagttagctgctgctgttcttaatatactttagaagtgttgcacaaatacatgtgatcataattcccatttatttcacataatatttctacttttatggcattttgtaaattgatgaatcattttagccaaagaggatgattgtatctcggcgctaggattcagctgtgaagattcaggaggctttaagagctcattttaggtaattttctgcttttgaatattgtagaaaagaaattcctttgttaaaggacacaattaaatrtactccaaagcagactaacattcatttattcctttatttaaaaaatgatttcgcagtcatcatgtgcaaagcagttacccagtctatgaaagtttagaaccatagcgtctaagccagcacataggagttgcacgtgggtcctatagctcagagtacatctgccaaaagagggatagggcagagggccacggaactcactgtgagcccctctagccggggcttaggaaggtctgccagggggcgctaacatttggacttgatcttgcaggttagttgtaatttagttttacaagattaactatttttctcccacaaagactcaaaatggttgaggttacacatgccagaaacatgccagaattccttctttccagagcctttttttttctgtcttaaatgttttccagttccactgtctcagaggcctttgaggaggacacagaatataaagttctcaccagacgccaggatataacaaatgtcagctaagttacacgtcttagcagaaaccaagcctcctctcctgctttctgggtcccctttgtcaggagagttcccagtttgcagaatgcaccagacagcagcaggggaggctgtgtctgtgttaagtaaacaaagg

SEQ ID NO: 715011 - DNA, 696 bp, Homo sapiens
ctcctgccggtcagggctcttagagggagtattccggcttcagcggaataacctggacataggtcagacaagagccacaagggcacctgcccatataaacaagcttcctgtgagagggacacctggatacaggctggacaatcaggcattaggtcaggataaagaagtattctgtgaaaaacacaatataagcatcctcttcagggcagccccttcaggacaggctagacttcatagctactgtctgtctcaggagcaaattagaggaaagatcaaattagagaaaaatacaactggcacagcaagcagggtgtgtggtcacaaccacaaggggcacaacaaaatgcctttgacctgcgtgtggcttgctgtggctcttcccccatggctagcaccaygtggggaagcagaactgcttgctggaggggtgtgctgctgctatgcgggctgcataaagccctctgttgtctgttgttcaccgtgtccgccctaaagcatgaggttgccattatcaacctaagtcctcccaaaaagagccatgcgaccaggcgcctctggtctaacaagaatagaccacatagcagctcctgattgactaaggttaaagacaagacagattaaagaccaggtcctccctgcctcaagccaaggagagctgaagggcatggaacaattgcaagattgctatctccgccc

SEQ ID NO: 715012 - DNA, 3419 bp, Homo sapiens
aaaaataaaaataagaaagtaagtccccacggccatgtctatccctcataaccttgttccccaggtcctcccccaacccacccatcacaggtcattcatttagggtcaggagcctgatacaagctggaccactcacagcggcacttcatcttccagccacaactgatcggctcagtgagggcaatcaaggtccttactggggactgttttttttgttttttggggttttttttgagacggagtttcactctggttgcccaggctggagtgcaatgggactgtttttttagctggataaaatgggatataaagctcagctgctctgtttcccattctacaaaagtcgaggataacatctactgcagtgagaggcactaagaaggttctggctaggaagagcagataaattatttacctaaccatgacgcttttgcagtcatgcataaactaaaaatawcttagacaaactcaaatgtgtgatccttctagtccttaccaataaacagtccctgaaagacacaacaatgcaaggattggacaatggctgttttatgtatttatttatgtatctagtatttgaatattacagagactagttttgaaaaagaatagtctctactttaattatagtaataaggttaattaaatgattttttaatatttctggttgctagagaaacttattaacaacaacagcaccaggatggtgtgatggacatgaagttgagctgctcaggtgcccctcaaggaaggctcattaacacagctgcggggagtgttgtcagcagacagccctcagctctcagcctttgtagaggctatttcagtagtgaagagcaatgatgtcccagggtcataccatttctaggatgagccacagccaataaccggttgaggtgaggatataaagacctggccatattgagtaggcttactagatttagcatataaaattacaggatgcccatttaaatttgaatttcacataaacaataaatgacttttactataagtaaaccttattcaaaatttgaatatgaaattcaaacgtgcagcattttctctggcgaccctaatgttgccccagtgcaacacaactctgatgggccattctcaccccagagctccctgtggggtgtgccaaatagctcttagatcagctagtttctccccctgcctccctccttcccaaggccattccctagaaagcatcttgtatgtgaaactctgtctcaaaatttgcttcccagagaaaaccgaccacagaggcatcaaccttctgttttgcccaacttttaaaaaattcagatcataaaaacaataccccaaaggtattttgaaatctaaaatgacaagaaaatgattactacatattttattgatggttatattttaatagtttttaaagtattgatttagaatattaataatcattatataataatataaataatacatgttcatgaaaataactattttccaaaagaaaaagggtggtgaaaagagtggattcttttatattttatatttttgcaagttgctttcttgagtgtatcattacaagactggtggattttcatatctgctcatgcatgtaacttgttattttggttgaagtatatgaaaaaaagtaaacttttcagataattgtagatattcatctttaacataaactaaaactacacaagtggtagtttcttaaaggttagttatgatataaaacctgaaactttatcatcgttgaattaaatcactgttacattaagatacgtgggtctatcttgcatatttgacagaacgtattttagcaaacatattcactttaaatgaatcatatttatgatacagtagagctagagtttttctgggttttatataaactttacaacatatttgagccattgcataatcaacatgtatatatattcctttcctctttatggaacttaattttattatcttttaaaaagaaatactggtagtaaatctttgttatttgttatgagatttcatgttctaagtcaagaaagcaaccctcagttataacattgttctgggaattcacaatccattttatgatgatttgttttattaaagaatttacaagaaatgcattttagcaaaaattgagaactgctgagagcagcagaaaggcagtgaagtgcagtggcaggaccaggcaacccaggaccgaagggtccaggatcagtcttatgaggagttcaaaaagtggtttacgtggaagcacttggtaaaatgcaacatactgcaaaatggtcaattattatatttgagaatttacatttagttaaatgttgtttgctagttgctataaattattaaatggaaataggtgtggcatatgtctgtaatctttgatgatgtttatgtcatagaagaaaaccatgctttattgtaatacaagccttggggcagatcgtaggctgaaatttggtgatacccaaggatgcatatcttattctggaacatttcccagagatgcagcaacatttataagcctaactttcaccccgtgaagtaaagcactgcatatatctaggttatattgtactggttttatcattattaacatacatattctttatggcataaaggagcatctaaggccccttgtcactataacataatagcaaatgttcttacgctttagtggctgtcaatcactataaagaaatgagatacaagccatgctcaatcaacaagatgaggcaaacacaaaagtaacccacctccagtctagtacaaactttatataaaggtgacaacagtgatcagaattcctagttgacaaagttcatcctgcacccactctgcaatgcactcacactttgttctgtcccacccctaccagtccctccccttccctaccagcatcccccttggccctccgcgcccccctccattgctcctgtctcctcaccatcctctatgtctcttcctagattctctagaatcatatgacttaccttctgtcttgtggattggatttccttggctgactatggggaatatactcatctgcagtggctttgggataacttctcatcaattaagccatgccaagcagttcaataggccaaccaggagccatggagggtgctgtgaggtcatgttaagtagtgactaatgagaacaagctggaataacaagactcctaagtactcaaaggacccttccttcccagtgaggggagtgctgagtcggagaaaaacagtgcctccaacaaatttggtcatgttctatttggcctgggatcaggcctgtctgcagcttctgttggccatttttgcatttatcgcctgataaaaaacctcacatggttgttcccaagcaagaagaaatattactagaataaaatgtacataataaaaacagcatatcactaaagaaacatggtc

SEQ ID NO: 715013 - DNA, 973 bp, Homo sapiens
tgaaatgtgccttagaaagggaaagtactgtctccatgaagtggaagatcctggaagatttaatatctccctatcactagccataagtagtagtttgccaaaaggtaaagagaaagatttttcaagtgaaaataattacatgtatgaaaatttaatgattaaagaggattgtatgctcaaggaatgccaagaacttttggtgtggctagaatgcagttgatagaaagatgagtctgcraagcaccagactgagaagagctttgcataccatgccaatcagtgtgttctctatcctacgtacaagcaggtcaaggactctggcaggtcagaagctcctactgaggctaacgcagtaaatatacaatggagtcttggaatttttattttcaacatctctagtgattctgatacaagttgtcctcagatgaaactgtgagaaatgcctctgtatgcaaacaggaaatctaagggaattattgaaaaggcagtgtgggatggctagcccacttctaggaggttttggcactagatcaggcaaggaatgtcagttttaatgataatgattacaaacagattaatttagttagttgctactaggtttgcataaatcaagattgtacctgagtgatctataagtaaaggcactgaaatatcatgtgtttaatttacaatattccagcagttattattcttctattgctaaacatattgtcccacatgcgcctcataaaaaatccagtgaggtagtcattactatctgtacttaacagatgaggaaacaaatgttcagagggttgaaatgacatggcagcagttatccaatgcatgcatgatagaagtggaaattaaagtctagggctgtctgactcctcctccttcatcatgcttcctttccaaatatctgcaatgtaacttccaaactatacaatgaaacacaacaaaccccaattttgggcacaacgaaatacaacaa

SEQ ID NO: 715014 - DNA, 973 bp, Homo sapiens
tgaaatgtgccttagaaagggaaagtactgtctccatgaagtggaagatcctggaagatttaatatctccctatcactagccataagtagtagtttgccaaaaggtaaagagaaagatttttcaagtgaaaataattacatgtatgaaaatttaatgattaaagaggattgtatgctcaaggaatgccaagaacttttggtgtggctagaatgcagttgatagaaagatgagtctgcgaagcrccagactgagaagagctttgcataccatgccaatcagtgtgttctctatcctacgtacaagcaggtcaaggactctggcaggtcagaagctcctactgaggctaacgcagtaaatatacaatggagtcttggaatttttattttcaacatctctagtgattctgatacaagttgtcctcagatgaaactgtgagaaatgcctctgtatgcaaacaggaaatctaagggaattattgaaaaggcagtgtgggatggctagcccacttctaggaggttttggcactagatcaggcaaggaatgtcagttttaatgataatgattacaaacagattaatttagttagttgctactaggtttgcataaatcaagattgtacctgagtgatctataagtaaaggcactgaaatatcatgtgtttaatttacaatattccagcagttattattcttctattgctaaacatattgtcccacatgcgcctcataaaaaatccagtgaggtagtcattactatctgtacttaacagatgaggaaacaaatgttcagagggttgaaatgacatggcagcagttatccaatgcatgcatgatagaagtggaaattaaagtctagggctgtctgactcctcctccttcatcatgcttcctttccaaatatctgcaatgtaacttccaaactatacaatgaaacacaacaaaccccaattttgggcacaacgaaatacaacaa

SEQ ID NO: 715015 - DNA, 1323 bp, Homo sapiens
ggggtcaccgcaagagagttactatttggaaaccataccacttcgctgtataatatataaacaacaaaaggctagatcattgttcctcaaatgtgctgtttataaagctaagtaaaaacattccctgcaatgaacaaagatcttcaagatcctgaccttcaagtaaagcatgtgcataaggaaattctattaaagcactgaaatgcaattcttcacttcaaaagactatgccaacaaaaagattatatgatgaatggctatgatcttcctaaattgttttgtgactttcaggtgccaaagttgcctctctgagctgcctcgcaagttggcaaggaaaaactttctctacacatcaaaatcggcaatcatttaagtctgctcttaatctgggttttaagtgcaccagtaagcacttactcatttgccctatattttaaataaaagctgactyacctgaatattctaatttcacgttcttcccttaaaatcgatttcaccaaatcgattttaagttgtaagcaacagcattcctcccttcagtaatccaccacgtacactgaagcacttaaattctacatacagggtgggataccatacagtggaaaagatgcgagaaattacccaccgtcaaccagtttaagtcttctgacaactgttcaaagacttttagagaaagcctaataactgaatcgcatgatggagtatctgatatacgcggaatagcactctgaactttctctactgtgtatacaactcttgattacaaagaggaaactaacgactagggcttccccgagcgagagaaccggtaaggtaacaggctaaaagggcgtcgttgatttcttggctgcagcgacagaggcgggagacacacccctagcgtcggtctgaaacactacagcagcgaattctacctagggattaatgtgagggtaaggaaagacaaattaaaatcgccatgattcaaaaacaaccactccaagagagagacacaagaaggtaccaaagaaaatgaaaaaacccttggtagtaacggaagcatgaaaaattaagcgcccccatttctcccaaaccaagttcgcgtatgttttcgtgaacaaacaccttggatctttccggttcgccagggcagcgagcaaagcagcagcgaacggaaaccccgcaggctgcgcaccgcagctaaaccgacgctcgcaggagaggggaagtgagtggcagggttccctgctaagactcactgctgggaaacaggcagtgagtggaagcagcagcagctctggagagtaagtgggtcttatgtaaagtgccatttgccacatattg

SEQ ID NO: 715016 - DNA, 621 bp, Homo sapiens
ttaatcttttgccatgttcattttcttttgttatgtttgtgttttttcctcactctgaaagatggagtactttgtctcctgtcttaacctctttggtcttcctgacttgttaaagagttatagcattcagcaraattcccatgcaggctcacagtagacaactggtcaagtcagatttgcagtgtgtcgggggcaggtcttttatggccgcttcacgtgtcatgggcatcagttctttcatcctaacgcgccactttttgctgtcgttctcctagactgagaagagaggcagggattgagtgatggacactggactggaagttctcttttataaaataggcgtcatacctacctctccaggtagaaatatgtaaaaggtctttgtaaactgtgagggggtattcaagtgtagaatttttaaaaagcaaaatagaagtgaagggtttctttcccccccttttttttcctatcatgtattaactacaccatttaccttaaccaacgtactcagccttttgtgtataccaggccttttgtaaactttctcttccagacataaattcaaaagtcctttttgtagcccttgctgattttcttaagttcagctcattgtggacattt

SEQ ID NO: 715017 - DNA, 621 bp, Homo sapiens
ttaatcttttgccatgttcattttcttttgttatgtttgtgttttttcctcactctgaaagatggagtactttgtctcctgtcttaacctctttggtcttcctgacttgttaaagagttatagcattcagcagaattcccatgcaggctcacagtagacaactggtcaagtcagatttgcagtgtgtcgggggcaggtcttttatggccgcttcacgtgtcatgggcatcagttctttcatcctaacgcgccactttttgctgtcgttctcctagactgagaagagaggcagggattgagtgatggacactggactggaagttctcttttataaaataggcgtcatacctacctctccaggtagaaatatgtaaaaggtctttgtaaactgtgagggggtattcaagtgtagaatttttaaaaagcaaaatagaagtgaagggtttctttcccccccttttttttcctatcatgtattaactacaccatttaccttaaccaacrtactcagccttttgtgtataccaggccttttgtaaactttctcttccagacataaattcaaaagtcctttttgtagcccttgctgattttcttaagttcagctcattgtggacattt

SEQ ID NO: 715018 - DNA, 3547 bp, Homo sapiens
  misc_feature 1912: n = A,T,C or G
tcatctttcttttttgagtctcaggcaggacttacttttcttttctctgaacattttgtaatttttgttgcctaattgtgtcccatgtttccattcccagctattgtaacaaacttgaaaattccatggtaaattgctctccggtttcccagtacttccatttatcatcgaatttcttcccagtggtcacattcacatccagaatatttcttttcctayttgagaggtggaagggttagcaaggcatttatcagagacattgattttatctgtgggagaattctagcggctatcccaaaagttgaagtccccatcacagcttatttgtgtcagcctcagtctctagaataccagcaattcttaatgcttctactttccttgcttttgccctgttctagtgcagagtcccatttcatcaaatctcagtgatgcttaatagtatcatattaacttatttgtaaattgtcagttttctttctttgtttaatacccatattctgggcatgggtttccacagacctgagaccactttgttgctaacacctttcccatttgtttttctgcaacaaataattgacccaagctttcccattattttcagttttctttttcagagcatgcccagccagcttctttcattgttacagtaatatctgaactttttgtatctcttcttccattttcagcttaaggtctacttgatcagttaatcaaaattacatagtgattagaaaaagctcaagatccatcaccattttaactgtgtgacctgaaacaaatttcttaagttcttctctaaatttgtttttgtatctgtaaaatggggagtggagagcagtaatgcctgcttcttgagtcattaatccttgctttcagaattgagtgatatgaagatgatgatgataaacttttatgtagggtttactatttgccagatgttgttttaaaagccttacatattattaactaatacagtatatatggcatacagttctgtttattagcatatgcatggcatgtggaagcagtcagtaaatgttagtttttattagcagcagcggcagcagatctctgggtaaacattcttttcttagtttttgcaaggtatacttcctcaccagtgaaaagtctgttacagatgattgtatgctgtggtatgaatcagacgtttgtgtaccatttgtaccatttttgacgctattcatttgctataagaaaccacagaaatctcacaatagtcccttctcttaaaaaattatattttaggattagagcccagacaataataatgccattattgagaagccagccattacacactgaaactaaatacaaattatgtctttaaagtaaaatttcaacttttaaaaatagaaattttattgaaaattagtttttataatttacatttagtaaattccatatattttcactgattcagtacaaaatgttcaaatcaaaatacctattgagaaagcactatagaaactttgctaggtattaacgttaaaaatcgtaaaacattacattttccatggcagaaaactgataaaatcattgagtagtcaatttctgaaatgtttcttaattttagaataatatgggtaaacagccaggtgcagtggctcacacctgtaatcccagtgactcaggaggctgaggtggaaggatcactcgaggccaggagtttaaggctgcagtgagctatgatggcaccactgcactccagcctgggtgatggagtgggactctatctctaattaaaaaaaaaaaaaaaaggaataatatggatagatgtatttaaagtacactaagaataaaacaaaatatttgttatatgtagactctgagaattttttttttttttttgagatagagtcttactctgttgcccaggctggaacgcagtgtntgggatcccagctcactgcaatctcagcctcccgggttcaagcgattctcccatctcagcttcccgagtagctgggattacaggcgtgcaccaccatgcctggctaatttttgtatttttggtagagatggggtttctccacattggccaggctagtcttgacctcaggtgacccacccacctgggcctcccaaagtgctgggattacaggcgtaagtcactgtgcccagccaagattgttttgatagaacactttgtgtctctctcaccttgtatttagaaaagttagaaaataaaggataatgtatatagaaagctttttgaagactcttaaggagttcataaatatggggcactacgactatgcatatgaaaatatttcttatcagttggcagttaccacctcttacagtggcatgaaacctcttgagttaaaccaaggctcagtgagatttggtgatttaggtagtatcactttatgaacaagcaggtcttttattttattacacttctctttgacattcactccagttaaagaactctttcaaaagacctcatgcctggtctcatggagattgaaaggtgtttgagtccttccttattatccccttggaagatgctttgaggaccccagtgatgaatcgcaagaactctgtctccattatccctggtatagggcacctcatcactctggtgttatccctaaagggccttcatcataatgtgcttaaagagtcccctattatgtcctttaggatggagctttgacttgcccaaattgctatgtacatgttaaagagaggctggaactgaagttggtcatttctcactggatcagtcaacaagatttgagtactttctgtgtgctctgcatcattctgagtactttgggggacagaataaggcgtggctcctgccttcaaggagtgtggaatttaatagaagatgacaacatacatgactgtaaatctgtctacgtgagagtgcctaattgtgagattcctaataaatggcaagacatgttctgaaaacgtgaaacataaatgaggctgaagaaattgtgaaaagtttagcagaggaggaatagttcgtcaggttctttaaatacaagtaaaggggaaaggaaggaccatttttaagtttagatattccaagggttagtggtgaggttgattatggtatgtcttctcgttgatgagggaggagactggtgaatagtggaaaataaagttaaatggctagggtggggccaaattatgggctttaataaaagccaggcatagaaatttagattgggatggtagaaaaaggaaagctttaaaagtttttgagccaatgaatgacatcatacaagttctatgagcaatgatttcaggatgggagagaatggcatcaggaagacccacttgaatgctggtaagtaatgttaccaacagtgccattagtaacattaatgttactagggcctggactgatatgctgatggaagtgagaatgaagaataaggtgggatgaaagagattttgaaagaggttttaaagaacctgaaatgggaatgggagagattaactaagcctgcttgccatggacagcaatggggttgctagaagattagctgtggggaaaaagttatgc

SEQ ID NO: 715019 - DNA, 3547 bp, Homo sapiens
  misc_feature 1912: n = A,T,C or G
tcatctttcttttttgagtctcaggcaggacttacttttcttttctctgaacattttgtaatttttgttgcctaattgtgtcccatgtttccattcccagctattgtaacaaacttgaaaattccatggtaaattgctctccggtttcccagtacttccatttatcatcgaatttcttcccagtggtcacattcacatccagaatatttcttttcctatttgagaggtggaagggttagcaaggcatttatcagagacattgattttakctgtgggagaattctagcggctatcccaaaagttgaagtccccatcacagcttatttgtgtcagcctcagtctctagaataccagcaattcttaatgcttctactttccttgcttttgccctgttctagtgcagagtcccatttcatcaaatctcagtgatgcttaatagtatcatattaacttatttgtaaattgtcagttttctttctttgtttaatacccatattctgggcatgggtttccacagacctgagaccactttgttgctaacacctttcccatttgtttttctgcaacaaataattgacccaagctttcccattattttcagttttctttttcagagcatgcccagccagcttctttcattgttacagtaatatctgaactttttgtatctcttcttccattttcagcttaaggtctacttgatcagttaatcaaaattacatagtgattagaaaaagctcaagatccatcaccattttaactgtgtgacctgaaacaaatttcttaagttcttctctaaatttgtttttgtatctgtaaaatggggagtggagagcagtaatgcctgcttcttgagtcattaatccttgctttcagaattgagtgatatgaagatgatgatgataaacttttatgtagggtttactatttgccagatgttgttttaaaagccttacatattattaactaatacagtatatatggcatacagttctgtttattagcatatgcatggcatgtggaagcagtcagtaaatgttagtttttattagcagcagcggcagcagatctctgggtaaacattcttttcttagtttttgcaaggtatacttcctcaccagtgaaaagtctgttacagatgattgtatgctgtggtatgaatcagacgtttgtgtaccatttgtaccatttttgacgctattcatttgctataagaaaccacagaaatctcacaatagtcccttctcttaaaaaattatattttaggattagagcccagacaataataatgccattattgagaagccagccattacacactgaaactaaatacaaattatgtctttaaagtaaaatttcaacttttaaaaatagaaattttattgaaaattagtttttataatttacatttagtaaattccatatattttcactgattcagtacaaaatgttcaaatcaaaatacctattgagaaagcactatagaaactttgctaggtattaacgttaaaaatcgtaaaacattacattttccatggcagaaaactgataaaatcattgagtagtcaatttctgaaatgtttcttaattttagaataatatgggtaaacagccaggtgcagtggctcacacctgtaatcccagtgactcaggaggctgaggtggaaggatcactcgaggccaggagtttaaggctgcagtgagctatgatggcaccactgcactccagcctgggtgatggagtgggactctatctctaattaaaaaaaaaaaaaaaaggaataatatggatagatgtatttaaagtacactaagaataaaacaaaatatttgttatatgtagactctgagaattttttttttttttttgagatagagtcttactctgttgcccaggctggaacgcagtgtntgggatcccagctcactgcaatctcagcctcccgggttcaagcgattctcccatctcagcttcccgagtagctgggattacaggcgtgcaccaccatgcctggctaatttttgtatttttggtagagatggggtttctccacattggccaggctagtcttgacctcaggtgacccacccacctgggcctcccaaagtgctgggattacaggcgtaagtcactgtgcccagccaagattgttttgatagaacactttgtgtctctctcaccttgtatttagaaaagttagaaaataaaggataatgtatatagaaagctttttgaagactcttaaggagttcataaatatggggcactacgactatgcatatgaaaatatttcttatcagttggcagttaccacctcttacagtggcatgaaacctcttgagttaaaccaaggctcagtgagatttggtgatttaggtagtatcactttatgaacaagcaggtcttttattttattacacttctctttgacattcactccagttaaagaactctttcaaaagacctcatgcctggtctcatggagattgaaaggtgtttgagtccttccttattatccccttggaagatgctttgaggaccccagtgatgaatcgcaagaactctgtctccattatccctggtatagggcacctcatcactctggtgttatccctaaagggccttcatcataatgtgcttaaagagtcccctattatgtcctttaggatggagctttgacttgcccaaattgctatgtacatgttaaagagaggctggaactgaagttggtcatttctcactggatcagtcaacaagatttgagtactttctgtgtgctctgcatcattctgagtactttgggggacagaataaggcgtggctcctgccttcaaggagtgtggaatttaatagaagatgacaacatacatgactgtaaatctgtctacgtgagagtgcctaattgtgagattcctaataaatggcaagacatgttctgaaaacgtgaaacataaatgaggctgaagaaattgtgaaaagtttagcagaggaggaatagttcgtcaggttctttaaatacaagtaaaggggaaaggaaggaccatttttaagtttagatattccaagggttagtggtgaggttgattatggtatgtcttctcgttgatgagggaggagactggtgaatagtggaaaataaagttaaatggctagggtggggccaaattatgggctttaataaaagccaggcatagaaatttagattgggatggtagaaaaaggaaagctttaaaagtttttgagccaatgaatgacatcatacaagttctatgagcaatgatttcaggatgggagagaatggcatcaggaagacccacttgaatgctggtaagtaatgttaccaacagtgccattagtaacattaatgttactagggcctggactgatatgctgatggaagtgagaatgaagaataaggtgggatgaaagagattttgaaagaggttttaaagaacctgaaatgggaatgggagagattaactaagcctgcttgccatggacagcaatggggttgctagaagattagctgtggggaaaaagttatgc

SEQ ID NO: 715020 - DNA, 3547 bp, Homo sapiens
  misc_feature 1912: n = A,T,C or G
tcatctttcttttttgagtctcaggcaggacttacttttcttttctctgaacattttgtaatttttgttgcctaattgtgtcccatgtttccattcccagctattgtaacaaacttgaaaattccatggtaaattgctctccggtttcccagtacttccatttatcatcgaatttcttcccagtggtcacattcacatccagaatatttcttttcctatttgagaggtggaagggttagcaaggcatttatcagagacattgattttatctgtgggagaattctagcggctatcccaaaagttgaagtccccatcacagcttatytgtgtcagcctcagtctctagaataccagcaattcttaatgcttctactttccttgcttttgccctgttctagtgcagagtcccatttcatcaaatctcagtgatgcttaatagtatcatattaacttatttgtaaattgtcagttttctttctttgtttaatacccatattctgggcatgggtttccacagacctgagaccactttgttgctaacacctttcccatttgtttttctgcaacaaataattgacccaagctttcccattattttcagttttctttttcagagcatgcccagccagcttctttcattgttacagtaatatctgaactttttgtatctcttcttccattttcagcttaaggtctacttgatcagttaatcaaaattacatagtgattagaaaaagctcaagatccatcaccattttaactgtgtgacctgaaacaaatttcttaagttcttctctaaatttgtttttgtatctgtaaaatggggagtggagagcagtaatgcctgcttcttgagtcattaatccttgctttcagaattgagtgatatgaagatgatgatgataaacttttatgtagggtttactatttgccagatgttgttttaaaagccttacatattattaactaatacagtatatatggcatacagttctgtttattagcatatgcatggcatgtggaagcagtcagtaaatgttagtttttattagcagcagcggcagcagatctctgggtaaacattcttttcttagtttttgcaaggtatacttcctcaccagtgaaaagtctgttacagatgattgtatgctgtggtatgaatcagacgtttgtgtaccatttgtaccatttttgacgctattcatttgctataagaaaccacagaaatctcacaatagtcccttctcttaaaaaattatattttaggattagagcccagacaataataatgccattattgagaagccagccattacacactgaaactaaatacaaattatgtctttaaagtaaaatttcaacttttaaaaatagaaattttattgaaaattagtttttataatttacatttagtaaattccatatattttcactgattcagtacaaaatgttcaaatcaaaatacctattgagaaagcactatagaaactttgctaggtattaacgttaaaaatcgtaaaacattacattttccatggcagaaaactgataaaatcattgagtagtcaatttctgaaatgtttcttaattttagaataatatgggtaaacagccaggtgcagtggctcacacctgtaatcccagtgactcaggaggctgaggtggaaggatcactcgaggccaggagtttaaggctgcagtgagctatgatggcaccactgcactccagcctgggtgatggagtgggactctatctctaattaaaaaaaaaaaaaaaaggaataatatggatagatgtatttaaagtacactaagaataaaacaaaatatttgttatatgtagactctgagaattttttttttttttttgagatagagtcttactctgttgcccaggctggaacgcagtgtntgggatcccagctcactgcaatctcagcctcccgggttcaagcgattctcccatctcagcttcccgagtagctgggattacaggcgtgcaccaccatgcctggctaatttttgtatttttggtagagatggggtttctccacattggccaggctagtcttgacctcaggtgacccacccacctgggcctcccaaagtgctgggattacaggcgtaagtcactgtgcccagccaagattgttttgatagaacactttgtgtctctctcaccttgtatttagaaaagttagaaaataaaggataatgtatatagaaagctttttgaagactcttaaggagttcataaatatggggcactacgactatgcatatgaaaatatttcttatcagttggcagttaccacctcttacagtggcatgaaacctcttgagttaaaccaaggctcagtgagatttggtgatttaggtagtatcactttatgaacaagcaggtcttttattttattacacttctctttgacattcactccagttaaagaactctttcaaaagacctcatgcctggtctcatggagattgaaaggtgtttgagtccttccttattatccccttggaagatgctttgaggaccccagtgatgaatcgcaagaactctgtctccattatccctggtatagggcacctcatcactctggtgttatccctaaagggccttcatcataatgtgcttaaagagtcccctattatgtcctttaggatggagctttgacttgcccaaattgctatgtacatgttaaagagaggctggaactgaagttggtcatttctcactggatcagtcaacaagatttgagtactttctgtgtgctctgcatcattctgagtactttgggggacagaataaggcgtggctcctgccttcaaggagtgtggaatttaatagaagatgacaacatacatgactgtaaatctgtctacgtgagagtgcctaattgtgagattcctaataaatggcaagacatgttctgaaaacgtgaaacataaatgaggctgaagaaattgtgaaaagtttagcagaggaggaatagttcgtcaggttctttaaatacaagtaaaggggaaaggaaggaccatttttaagtttagatattccaagggttagtggtgaggttgattatggtatgtcttctcgttgatgagggaggagactggtgaatagtggaaaataaagttaaatggctagggtggggccaaattatgggctttaataaaagccaggcatagaaatttagattgggatggtagaaaaaggaaagctttaaaagtttttgagccaatgaatgacatcatacaagttctatgagcaatgatttcaggatgggagagaatggcatcaggaagacccacttgaatgctggtaagtaatgttaccaacagtgccattagtaacattaatgttactagggcctggactgatatgctgatggaagtgagaatgaagaataaggtgggatgaaagagattttgaaagaggttttaaagaacctgaaatgggaatgggagagattaactaagcctgcttgccatggacagcaatggggttgctagaagattagctgtggggaaaaagttatgc

SEQ ID NO: 715021 - DNA, 3547 bp, Homo sapiens
  misc_feature 1912: n = A,T,C or G
tcatctttcttttttgagtctcaggcaggacttacttttcttttctctgaacattttgtaatttttgttgcctaattgtgtcccatgtttccattcccagctattgtaacaaacttgaaaattccatggtaaattgctctccggtttcccagtacttccatttatcatcgaatttcttcccagtggtcacattcacatccagaatatttcttttcctatttgagaggtggaagggttagcaaggcatttatcagagacattgattttatctgtgggagaattctagcggctatcccaaaagttgaagtccccatcacagcttatttgtgtcagcctcagtctctagaataccagcaattcttaatgcttctactttccttgcttttgccctgttctagtgcagagtcccatttcatcaaatctcagtgatgcttaatagtatcatattaacttatttgtaaattgtcagttttctttctttgtttaatacccatattctgggcatgggtttccacagacctgagaccactttgttgctaacacctttcccatttgtttttctgcaacaaataattgacccaagctttcccattattttcagttttctttttcagagcatgcccagccagcttctttcattgttacagtaatatctgaactttttgtatctcttcttccattttcagcttaaggtctacttgatcagttaatcaaaattacatagtgattagaaaaagctcaagatccatcaccattttaactgtgtgacctgaaacaaatttcttaagttcttctctaaatttgtttttgtatctgtaaaatggggagtggrgagcagtaatgcctgcttcttgagtcattaatccttgctttcagaattgagtgatatgaagatgatgatgataaacttttatgtagggtttactatttgccagatgttgttttaaaagccttacatattattaactaatacagtatatatggcatacagttctgtttattagcatatgcatggcatgtggaagcagtcagtaaatgttagtttttattagcagcagcggcagcagatctctgggtaaacattcttttcttagtttttgcaaggtatacttcctcaccagtgaaaagtctgttacagatgattgtatgctgtggtatgaatcagacgtttgtgtaccatttgtaccatttttgacgctattcatttgctataagaaaccacagaaatctcacaatagtcccttctcttaaaaaattatattttaggattagagcccagacaataataatgccattattgagaagccagccattacacactgaaactaaatacaaattatgtctttaaagtaaaatttcaacttttaaaaatagaaattttattgaaaattagtttttataatttacatttagtaaattccatatattttcactgattcagtacaaaatgttcaaatcaaaatacctattgagaaagcactatagaaactttgctaggtattaacgttaaaaatcgtaaaacattacattttccatggcagaaaactgataaaatcattgagtagtcaatttctgaaatgtttcttaattttagaataatatgggtaaacagccaggtgcagtggctcacacctgtaatcccagtgactcaggaggctgaggtggaaggatcactcgaggccaggagtttaaggctgcagtgagctatgatggcaccactgcactccagcctgggtgatggagtgggactctatctctaattaaaaaaaaaaaaaaaaggaataatatggatagatgtatttaaagtacactaagaataaaacaaaatatttgttatatgtagactctgagaattttttttttttttttgagatagagtcttactctgttgcccaggctggaacgcagtgtntgggatcccagctcactgcaatctcagcctcccgggttcaagcgattctcccatctcagcttcccgagtagctgggattacaggcgtgcaccaccatgcctggctaatttttgtatttttggtagagatggggtttctccacattggccaggctagtcttgacctcaggtgacccacccacctgggcctcccaaagtgctgggattacaggcgtaagtcactgtgcccagccaagattgttttgatagaacactttgtgtctctctcaccttgtatttagaaaagttagaaaataaaggataatgtatatagaaagctttttgaagactcttaaggagttcataaatatggggcactacgactatgcatatgaaaatatttcttatcagttggcagttaccacctcttacagtggcatgaaacctcttgagttaaaccaaggctcagtgagatttggtgatttaggtagtatcactttatgaacaagcaggtcttttattttattacacttctctttgacattcactccagttaaagaactctttcaaaagacctcatgcctggtctcatggagattgaaaggtgtttgagtccttccttattatccccttggaagatgctttgaggaccccagtgatgaatcgcaagaactctgtctccattatccctggtatagggcacctcatcactctggtgttatccctaaagggccttcatcataatgtgcttaaagagtcccctattatgtcctttaggatggagctttgacttgcccaaattgctatgtacatgttaaagagaggctggaactgaagttggtcatttctcactggatcagtcaacaagatttgagtactttctgtgtgctctgcatcattctgagtactttgggggacagaataaggcgtggctcctgccttcaaggagtgtggaatttaatagaagatgacaacatacatgactgtaaatctgtctacgtgagagtgcctaattgtgagattcctaataaatggcaagacatgttctgaaaacgtgaaacataaatgaggctgaagaaattgtgaaaagtttagcagaggaggaatagttcgtcaggttctttaaatacaagtaaaggggaaaggaaggaccatttttaagtttagatattccaagggttagtggtgaggttgattatggtatgtcttctcgttgatgagggaggagactggtgaatagtggaaaataaagttaaatggctagggtggggccaaattatgggctttaataaaagccaggcatagaaatttagattgggatggtagaaaaaggaaagctttaaaagtttttgagccaatgaatgacatcatacaagttctatgagcaatgatttcaggatgggagagaatggcatcaggaagacccacttgaatgctggtaagtaatgttaccaacagtgccattagtaacattaatgttactagggcctggactgatatgctgatggaagtgagaatgaagaataaggtgggatgaaagagattttgaaagaggttttaaagaacctgaaatgggaatgggagagattaactaagcctgcttgccatggacagcaatggggttgctagaagattagctgtggggaaaaagttatgc

SEQ ID NO: 715022 - DNA, 1134 bp, Homo sapiens
tgaccttaaaattaattattaaaacaaagagctaagtgctacaaaagcagtaagataggagacattttacataaggaagaggaactgaacatttaggctgtaaagttagtgtgagaaattatattacaatgcagttgtctttaacattcagtttgaactaaatgcccccctctcaattcacctttcaagggaaacttcacacacacaatggagtttactgtgctgccaaaaaaaamaaaaaaaagaaaaaagcatttgaatattagaaatcaggtgatatggcagtagatggggaaccctagtagaaactaaaactggctaattaccctagggatagagagaggaggcatgggttaaaaagtgggagaccaagcaatagactgaaggctcaacatggcagagaccaccagttgcctactcaacttccagttagaaccccatgttgtcaagtatggcaatgaatttggtcagataaaactattagggttgtacatactatacttagcaataaaaatgcaggactctcagttacatttgtatttcagatgaacaataaatacttttagcataagcatgctccatgcaatattttatccagcatccctgagaagtatatttaccaacctcccttgcagatagtggtggtcaaagatatgtcagaagaggtcattgggtggagcatctaggagagtactcacgcacatatactcttctcttcctacctccttctgcctggaatgctaacgagcagcagctgtccagtgatcatgaaacaagctcgagggtagaatccagcactatggacgggattatagacagaggaaggagactggccaacactgacgatgttgcagaacaacccaacagccctgatttatcttacatgagaagataaatgagaaaaaacaaatttctgacttgtgtaagctagtaagttgggtttttatcttatgtatttgaactcaatcctaacccaaacactccgtgttcacgtgccattagcaaaaggtcacaaccattgtcagaatcaatcattttgagataatacataatacataacacagcaaggtaattaaaaatgcataatgataaaatcaagaaacctgtgggaagctcccacaagtcatcacagct

SEQ ID NO: 715023 - DNA, 1134 bp, Homo sapiens
tgaccttaaaattaattattaaaacaaagagctaagtgctacaaaagcagtaagataggagacattttacataaggaagaggaactgaacatttaggctgtaaagttagtgtgagaaattatattacaatgcagttgtctttaacattcagtttgaactaaatgcccccctctcaattcacctttcaagggaaacttcacacacacaatggagtttactgtgctgccaaaaaaaaamaaaaaaagaaaaaagcatttgaatattagaaatcaggtgatatggcagtagatggggaaccctagtagaaactaaaactggctaattaccctagggatagagagaggaggcatgggttaaaaagtgggagaccaagcaatagactgaaggctcaacatggcagagaccaccagttgcctactcaacttccagttagaaccccatgttgtcaagtatggcaatgaatttggtcagataaaactattagggttgtacatactatacttagcaataaaaatgcaggactctcagttacatttgtatttcagatgaacaataaatacttttagcataagcatgctccatgcaatattttatccagcatccctgagaagtatatttaccaacctcccttgcagatagtggtggtcaaagatatgtcagaagaggtcattgggtggagcatctaggagagtactcacgcacatatactcttctcttcctacctccttctgcctggaatgctaacgagcagcagctgtccagtgatcatgaaacaagctcgagggtagaatccagcactatggacgggattatagacagaggaaggagactggccaacactgacgatgttgcagaacaacccaacagccctgatttatcttacatgagaagataaatgagaaaaaacaaatttctgacttgtgtaagctagtaagttgggtttttatcttatgtatttgaactcaatcctaacccaaacactccgtgttcacgtgccattagcaaaaggtcacaaccattgtcagaatcaatcattttgagataatacataatacataacacagcaaggtaattaaaaatgcataatgataaaatcaagaaacctgtgggaagctcccacaagtcatcacagct

SEQ ID NO: 715024 - DNA, 645 bp, Homo sapiens
cttcaacaagtttgcttcctcagggatgggtgtggtggctcactcctgtaatcccagcactttgggaggcccaggcaaaaacatcacttgagcccaggagttcgagaccagcttgggcaacagagtgaaaccccatctcaaaaagaaaagaaaaagaaaaaaaaaacagtttacttccatagctgctacagctctcctaacagtcctagaactctggaaagtcagtaatcaccataactgagttcactctgccctttagtaacagcataattaattctgttaggattacgtcaatgaaaacatgtgtaaaacggtgtcataatactaactgtawaattcagtggcaaaatccagagtgttctgaagtagcagatctctgcttctttagggcaagagttctctttagttttgcccattcttttatctcggtccctagcttagtgctcagcacatggtaaacagtcaataactactttttgaacatcagctttaacctaacatagaggtgccttaaaaatgcctaatccttcaagaggttgtgaaacatcatgtatctttaaaattgtcagctactttgaattgtgaagtcttgtttttctatttgctccacaccttaacccccttagataaaataggctactttta

SEQ ID NO: 715025 - DNA, 633 bp, Homo sapiens
cagccctgaattagatcactcagaaatcacagacctcaggaatcaagtaaggcctaaatgattttcactgtgatatggtagagtgagcacagagattggagccagaagaccctggcaagtgtgacctgaactagttatttaaactctcagagtctgggtctttctttcctcacttgtaaagtagacataacaattaactcagccctcccctcgaaaaacactgtctatcccagaaagtgactatgagggtcaaatgagctcatgggaatgaaagtccttttgaaaayggaaggccatgcaattcctgaatgtgttgcactctcgccttcccacctttacctgtaacacctgtaatatcttttttactatcttgctactagtaatcactatgcacttttccttacttctcttccttccttccttctttccttccttccttcctctcctagacctcctcctcctctttcttcttcttctgcttctgcttctccttcttcttctttttcctttcctttcctttcctttcctttcctttcctttcctttcctttcctttcctttcctttcctttcctttccttcccagtcttttgtgtcttagattagttatgacttcctcagagaagacttccttg

SEQ ID NO: 715026 - DNA, 1408 bp, Homo sapiens
tggaagccaagagaagccaccgtctatgtttttagtttcctacaagcaataggtatgatttctgttgcttgccaacagagaggactccagtaagtcaaggaatccaacgtgactattacaagcggcctgcagcttctgtgggggaagagcgtttctttctcacttgtttctaaatagcattctagcgactcattagctgaatctaaagtacaagggattttgagaattaacattcctggcttctctcctgtgataccaagaagaacccagaaagaggtgatggtggggcttcactgagcacaatctggcacacttgcattctttacagcttttccaatttcttacaagataattttgcttattaatgaggggaaaacaatagtaataatgcactctgtatttagtgcacactatgtttaaacaatgcaaacatgaaatggaaatkctgtcctactggaagaatatcttcaatacatcatgtgttctacctcctctcttccaaagccatgagctacttaaacattttcactggggtctcatgcagatctttaacacggatagtgactttgaaaatcatattagaatatatttggaaacatagttcataaaatgatggattgttcatgttatattaatgtaaatagaatgcttggtacttatctgcctttatgactttattttctaggtaaaaataagcacttgatacatatttattaaattgaggtgagcttataagaatttaggctctataaatgtttcttaaatatttaactggaaatgcatagacaatcgagatttttgactcttttctatttatatcaaatagcttttgccgctaaattagtggctttaaaagtaagcatttattggccaggcatggtggctcacacctgtaatcccagcactttgggaggtcgaggcaggtggatcacgaggtcagaagactgagaccatcccgaccaacatggtgaaacctcgtttcttctaaaaatacaaaaattagttgggcgtagtggcgcacgcctgtaatcccagctactcaggaggctgaggcaggagaattgcttgaacctgggaggcagaggttgcagtgagccgagatcgtgccattgcactccagcgtgggtgacagagcgagattccatctcaaaaataaaattaaaaaataaaattaagcatttatttagcttgtgattcagcccttggccagattgtcccttgggtctaggctatcttgacagatatctactaatgttcctcatatatctgtggtcaactggcaggtcaggttgtggctgtatgatatatgatggcctcatgtacttatcaggcagccattaagctgtcgatcaggatgacagggatgactggttgacatttctctcactgtcggacagagtagcctgat

SEQ ID NO: 715027 - DNA, 3150 bp, Homo sapiens
taaagataatgtcactgagacacggagaggctaagttacctgcccaaggccgtaagcaaataggggaattaggattaaattamaatccacagactggttcttgattacttctctactctatttcttgaattacccattccttcttgtgaaaatgcagcttaatttgatgaatacttcttatctagacttcagaggtatagtaagttaaatactatctaatgaatattgaacctggactcagtattattgtactattaccttattctattggctaaaataagtattccaaaagtacatcagctaagaagctgtgaaactcatttctcttatacataatttatctcttcatatgtttaacgattacaattatgtccaaatattatgtgatagactgaattatctctttttgcatctctgccctacccttgccaacatagcccatttttaaggtccagttattttattaatttagtaagaatgcatgctaattatgatttatacatatcaataataaaattatgaagatgatattaaggttagatttaatattttactattttcctatgtatattatattcatttggtcttcttacaaacctcccctatggtcctagttattatcttgatcattttgtgagtgaaggagctgagaaacaaggaggaaagtgatgtgccccaaactaatatttggctaaggatagatttgcactgggtacttttacagctagttctgggtcatttccacaaaagcattacttggctggagtaaaactataaacccaattgtattaggcaccaagcagatccagatagaattatcctgttccagagtttcatcttttatgatgattgtggagatcttgggtgactttacaaaataagaaacttttaaaaactggcaatagataggatcatttaatatgaggataaagaatctaaaggatagccttaaaaatgtgatttataatcatgaaggtttttatacggaggaaaatataattgcatttaaaatttccctagtaaaggaaattacctgctctagaagctgttaactgctagactgttggtttaaaatttcaagggacagagaggtagatcaggaaggacatggactttggagctgggcaaccaggattgcattgccagatcatggggcaagtagtaacttgtcccatcctcctcttcctcgttggtcaaatagaaatattgatacctactcagaagttattgggtggtggtcaggcaagagggaatctttagcacagtgtctagaatgttccaagtgcctagtaattcttggctcaggttctccccttgggtagtttgaggactggaaatccaggcaatattgagattattaataaagatttcaagtcaagccctcaagaacacaagtcacagaccccaaaacttttggagttagcagggtttctttaattaaagagtcctagtaatatgttggtaagggggatgggagctgtggcagatgtgtgtgacataattttgttgcaaatgcaaattagttttcctgtcatttgctagcaagcccactgtttataataactgttcataatgaatcaggctgatattttcttcatacattttccctcaaggccctaataactctgcttctatgttttatggttacacattgtggaatgagactctggtggaaatgcagtcccattttatagcctttgtagaaatgagaggcagagaagaaaagcaaaggaagcaaattagtggtcagaaagggttccaagacagcaatgtgtgttcttcaagccaggcctggagggtatatgaggaagataaagggtggtccagaaagcctccatcagtgaagtagttgaacagaattaaaactatagcaaaggttcttggacttggttagaaggaaaccctgagcgacctgaactaaatgagttctgtccaattcagcaaatacttactaatacctactatgtcccagatcctttatagccttacagctgtaccatccaacatagtagtcattagccacatgtgcctattggaatttaaattaccgaaaattaaataaaattaaaaactcaattcctcagttgctctatttctcaagttctcaagccacaaaacatagtgtgtaatgactactatattagatggcatagaagaatatttttttttatgacagaaagttctcttggacaattgtgccctagaagtatgaggatgaccaatatttgactcctgcccttgaggaatttatggtcttagaaggcagaggaacatgtaaggaaggaagaaagttagtggggctgtgacagaagtatgtcagcacactgttgtgggaactgaggatagggtgatgaggcctaaaagagacagtggtcaaatatagtaggatgaaggaagaacagcttttcaaaaaggctatgtagagggtggaacatgatcagagtcttaaaagatatgtagttttacctcaggtggaaaagggtggaaaaaggcattataagcaaaagtagaagtgcgaaccaagaagggagatgcagtgtggagcgttgggagaaatgcccctgttgtagcctggctggagtgtgctgccagagctaagccccaagaggcaggtgggccaggctgggtgtttgggcaccacaccaggggtcaagacttgtcttctgggctgtgagaaatcagcgaatggttttaaacaagagaatgaattttgtgatcagatttctatgaatgggaatggaaaaagctaggagtttgtttccaatgggatgcactgcacattttactgtgtcttcggtcaggttatttaacccctgtgagtctcagttttctcatgtataaaatgagacttatctccatctcataggaatgatatgtggataaaataacataatgtaggtaaagcagccagtacagttcctggcacatagcaggtggccaaagagtcttagatccttttccttttggccttactgtggcaagggaaacaaaaatgagtgaggtttatctgtacccccggggagcttagagcagggagtgggcctgtgtggatgagtaaaacaaggacacaagtaactatgtccacaccctacacacaccccaaacatacatacacacacacaaccatactaacacctaacacatatgcac

SEQ ID NO: 715028 - DNA, 3150 bp, Homo sapiens
taaagataatgtcactgagacacggagaggctaagttacctgcccaaggccgtaagcaaataggggaattaggattaaattaaaatccacagactggttcttgattacttctctactctatttcttgaattacccaytccttcttgtgaaaatgcagcttaatttgatgaatacttcttatctagacttcagaggtatagtaagttaaatactatctaatgaatattgaacctggactcagtattattgtactattaccttattctattggctaaaataagtattccaaaagtacatcagctaagaagctgtgaaactcatttctcttatacataatttatctcttcatatgtttaacgattacaattatgtccaaatattatgtgatagactgaattatctctttttgcatctctgccctacccttgccaacatagcccatttttaaggtccagttattttattaatttagtaagaatgcatgctaattatgatttatacatatcaataataaaattatgaagatgatattaaggttagatttaatattttactattttcctatgtatattatattcatttggtcttcttacaaacctcccctatggtcctagttattatcttgatcattttgtgagtgaaggagctgagaaacaaggaggaaagtgatgtgccccaaactaatatttggctaaggatagatttgcactgggtacttttacagctagttctgggtcatttccacaaaagcattacttggctggagtaaaactataaacccaattgtattaggcaccaagcagatccagatagaattatcctgttccagagtttcatcttttatgatgattgtggagatcttgggtgactttacaaaataagaaacttttaaaaactggcaatagataggatcatttaatatgaggataaagaatctaaaggatagccttaaaaatgtgatttataatcatgaaggtttttatacggaggaaaatataattgcatttaaaatttccctagtaaaggaaattacctgctctagaagctgttaactgctagactgttggtttaaaatttcaagggacagagaggtagatcaggaaggacatggactttggagctgggcaaccaggattgcattgccagatcatggggcaagtagtaacttgtcccatcctcctcttcctcgttggtcaaatagaaatattgatacctactcagaagttattgggtggtggtcaggcaagagggaatctttagcacagtgtctagaatgttccaagtgcctagtaattcttggctcaggttctccccttgggtagtttgaggactggaaatccaggcaatattgagattattaataaagatttcaagtcaagccctcaagaacacaagtcacagaccccaaaacttttggagttagcagggtttctttaattaaagagtcctagtaatatgttggtaagggggatgggagctgtggcagatgtgtgtgacataattttgttgcaaatgcaaattagttttcctgtcatttgctagcaagcccactgtttataataactgttcataatgaatcaggctgatattttcttcatacattttccctcaaggccctaataactctgcttctatgttttatggttacacattgtggaatgagactctggtggaaatgcagtcccattttatagcctttgtagaaatgagaggcagagaagaaaagcaaaggaagcaaattagtggtcagaaagggttccaagacagcaatgtgtgttcttcaagccaggcctggagggtatatgaggaagataaagggtggtccagaaagcctccatcagtgaagtagttgaacagaattaaaactatagcaaaggttcttggacttggttagaaggaaaccctgagcgacctgaactaaatgagttctgtccaattcagcaaatacttactaatacctactatgtcccagatcctttatagccttacagctgtaccatccaacatagtagtcattagccacatgtgcctattggaatttaaattaccgaaaattaaataaaattaaaaactcaattcctcagttgctctatttctcaagttctcaagccacaaaacatagtgtgtaatgactactatattagatggcatagaagaatatttttttttatgacagaaagttctcttggacaattgtgccctagaagtatgaggatgaccaatatttgactcctgcccttgaggaatttatggtcttagaaggcagaggaacatgtaaggaaggaagaaagttagtggggctgtgacagaagtatgtcagcacactgttgtgggaactgaggatagggtgatgaggcctaaaagagacagtggtcaaatatagtaggatgaaggaagaacagcttttcaaaaaggctatgtagagggtggaacatgatcagagtcttaaaagatatgtagttttacctcaggtggaaaagggtggaaaaaggcattataagcaaaagtagaagtgcgaaccaagaagggagatgcagtgtggagcgttgggagaaatgcccctgttgtagcctggctggagtgtgctgccagagctaagccccaagaggcaggtgggccaggctgggtgtttgggcaccacaccaggggtcaagacttgtcttctgggctgtgagaaatcagcgaatggttttaaacaagagaatgaattttgtgatcagatttctatgaatgggaatggaaaaagctaggagtttgtttccaatgggatgcactgcacattttactgtgtcttcggtcaggttatttaacccctgtgagtctcagttttctcatgtataaaatgagacttatctccatctcataggaatgatatgtggataaaataacataatgtaggtaaagcagccagtacagttcctggcacatagcaggtggccaaagagtcttagatccttttccttttggccttactgtggcaagggaaacaaaaatgagtgaggtttatctgtacccccggggagcttagagcagggagtgggcctgtgtggatgagtaaaacaaggacacaagtaactatgtccacaccctacacacaccccaaacatacatacacacacacaaccatactaacacctaacacatatgcac

SEQ ID NO: 715029 - DNA, 902 bp, Homo sapiens
cacattttgtggccatgttgacttattctgtgaattgtctattgtttcactgagattttatgtgttaaatattacgtatatattattaagcttttgcattcgtatatgtgagatatattttcctagattgcatatttcaatctttagaattttaaatttttttttggaaataaaacctacttagtatcccattcacctatatatttttgtgttttttgaaaactggtttcaactttatcatttgtcttaagttcattgaaattttggtgtatggcataatgagaaataatagtcttattttattccaagtagttaaccctttacctgagcaccatttactgagtcctttgttctctactagtttgtagtagttcgtagcagagaacaaaggactcagtaaatggtgctcaggaatctttaccatatgttaaaaataaatccattagaatctgtttctgaactaccttcatgaatagacatggtttcacatgtctattctagtacctatattttactgtcttaaatattacatttatatgatgaattttaatatctagcagggaattctccacttcatatattttcatgttcttggatggtcagactcattccagataaactctacaattgtatagttaagaaattatttagagactttaatagcaattgcatcaaatctgtaaactaatataagaactgatacctttgcaaatttgttcttaccatctaggaacgctgtgtagataaataaatattgataaggacctaaatatgcataaraacacgaatagatatagatatcaggaaagatttgaaatttcatatgttttatattttttattttttttgagacggagtctcactctgtcgctcaggctggaatgcagtggtatgatctcagc

SEQ ID NO: 715030 - DNA, 729 bp, Homo sapiens
tggagggagttgtatttactttcctattaaaaagacatagtttggtcaagcagggattgattgatttatatcgkaatttgaagtgtttatcaacactcttgtcacattgagataagcttattacagctacttcagctggtttccctgataagagtttgtttaaatgtgtgggcaaaactatttattcaaaagagaatacttcttttttattttattttttatgagtacatagtgggtacatatgtttattgggtgtatgagatattttgatacaggcatacaatgtgtactaatcaccctggggtaaatggggtatccaccgccctaaacatttattatttctctgtgtcacaaacatttttctgtctgttcagaagcctttgtactctttgtcacttacaagtgcaacaaagcatttattccagagttacttgtcccagtgcttgaattacctgtggctttaatccaacacatataagaaacttctagcttgtatgtagctatgaagacaaaactatctgactgtttggtatgtgcagagtttaaacagaaaaacctttataggtcatatacatataatcgttgggaaattctattatgtaggtatgtacaccataggaatcaaaagcattatctgggcctctatattagcctacagccaagtgtcctgcctgaggcactggtcagttccacaaagttgtttggggataataaatacaaattttagtc

SEQ ID NO: 715031 - DNA, 587 bp, Homo sapiens
cagaatactgaatctattgttaaattcatggtgcacatctttccttcgtcatccttagaatctagttttatttcaaaattagatctcttgttctttcaaaacacattgttacctctgaattcttttattcctcattttgtagattgtcatgtttggatatttgctctcataacttctgattcttgattatctgtttctactaaaaagaggaaagtactaaaccaacgagaaatttttggctgtgcatagggacagtcagcttgtaggattcactgcattacaactgctgcagagtaaactactttaatgaggtatcccccagattttagtagatggaagtctttyctctatgctctttgctttcttcttataagatccatttgataagttgctttagaaagagctaccttagtgtctgtgttccgcataaggtggagaaatctaattattcaatacattttcttttaaattggtgtttaatgtgcatgcaataaagtacatgaatatttaccatatggctcaattaattttatgtatcaatattatttactgtcaccatatacattaggagagattagtatccaaga

SEQ ID NO: 715032 - DNA, 2661 bp, Homo sapiens
aagatcagttggctgtaagtatttgagtttatttctgggttctctattctgttccattggcctatatgcgtatttttataccagtaccatgctgttttggtgactgtggccttacagtatagtttgaacttgtaatgtgatgcccccagatttgttttttgtttttgttttttgcttagtcttgctttggctatgcgtgctctttttttggttgcatatgaattttaggattgttttttctagttttgtgaagaatgatggtggtattttaatgggaattaaatggaagcacatcccatgctcatagatgagtagaattaattttgtgaaaatgaccatactgctaaaagcaatctacagattttgcatttttaacaagctccaaagtgatgtcagtgctgctggaatgagaactacactttgaatggaaggcattagaatttgttcattagaatgtcctgcggagcttttaaaataaaattgctgcagagctgtacccaacaaattaaattagaaatcttctttggtgattcttgtgtgcaactcggttaagagccttaacaaaatggcattctttctaccatagggagtcagtaacaaactttcacctatgtctcccttacagccatcccatagtttagattataactgaaaacccccaaattatgatcaggatctcttgtgataaccaggagaagaaactataatgctttaaatacactctttttgaatattctcttatgcatttcaaccctttagtcctggctaagaatcggaatacagaagaaaggggaacctggagtgattatgataatagctaaaatctattgaacaattacaatgtgccatgcattgttcaaaatattttacatgcattatcttattttaccctcacattttaccctgtggggtaggtactgtaattttctccatattatagaatgaacaaagtgtatagagaggagaaatgacttgttgaaaatcacacagctagtaagtggtccagttgggatttgaagctagacagtgagactccagggtcccagagaagctagaagtgagactccagggtcccagtagctgcatcctgtagtctatagtctgtttcttccagaccttctgccacaaatccctaactgatcttctatccttggggagtggagctggatgccacccaaatcttcaaggcccttttattagtctcctaaaacatacccaagcctgctaagagtgtttctgtatccccatgacacaatcttgtcttgctttccagggctctgttgatgttagaggctcctctgagctatcttattctgattgcttgagctgaaagagaaagacccaagaagcacattttcaaaccccactttttctctctgaatgctctggcctcttggacctgagttttcttgtgtccttaatcctcatctgagttcttctcctctcctcgaagatggatataggaaaaacttaatgttagactgaaattgagcagggtgtttaaccaactgaccatgtacttaacctctgttacccctttttgtttttaatagtgattgagtttcattgaagcttccagcaattttagtgccttaaaaattctttgttaacataatgcctttagaatgctaagtgtcaggaaagcctattttaaatttatcaatggcacccttagtcttaatatgcttaagcatactttacttttgaggggagaattaatcttttatcacatgtaccatagatgctgttggtttcattattttaggaaaatgttcttatgattgttttagcattaatgctactcacatacttctttcttccaatatctgttcagcataggtaaggaagatacaaaaagagtcacccatgctaaagctaatgccaaagagatgtaagttgctattgtttgaaaaactaacaaagatgttaaatttgtcgatctcatcttgactgtgaagaaagtgaatctgaaattaagcatatgatagagaatatttggactttcttttataagctacatctttgggaaacatgaagaaaatttaagcacaattacaagaagataattttgtaaatggaaatttttttggaggtgcgggagacgaaaaaggaattttattctgccattcatttaaagcagggctgcttagaaatacagaacactgtcagtgtaacttctttgaagcactgggggcctcaagttttcacatgcttaagagtcacttgggggcttgttgaaaatacagttccttgggccccactcctttcagctctgagtttttaatataataaaacttgggattgtaatactcaaggtattagtcatggttctccacagaaacagaaccattaggatattgtctgtacgtctgtctgtatatctttctagagattgttgtaaggaattggcttacatgattatggagactgagaagttccaagatctccatttgtcaatctagagtcccaggagagccaktggtatagtctcagtccaagtctgaaggcttgagaagtacaaaaactaatggtgtaaattctagtccaagtttaaagacctgagaactgggagagccaatggtgaaagttccagtgcaagtctgaatcaaaggcaggagaagactgatctcctacttggaagatagtcaggcagagagagca

SEQ ID NO: 715033 - DNA, 1303 bp, Homo sapiens
  misc_feature 374, 375, 376, 377, 378, 379, 380, 381, 382, 383, 384, 385,386, 387, 388, 389, 390, 391, 392, 393, 394, 395, 396, 397,398, 399, 400, 401, 402, 403, 404, 405, 406, 407, 408, 409,410, 411, 412, 413, 414, 415, 416, 417, 418, 419, 420: n = A,T,C or G
  misc_feature 421, 422, 423, 424, 425, 426, 427, 428, 429, 430, 431, 432,433, 434, 435, 436, 437, 438, 439, 440, 441, 442, 443, 444,445, 446, 447, 448, 449, 450, 451, 452, 453, 454, 455, 456,457, 458, 459, 460, 461, 462, 463, 464, 465, 466, 467: n = A,T,C or G
  misc_feature 468, 469, 470, 471, 472, 473: n = A,T,C or G
atttgtggtgatgcttgtaggatctgtgattcatgtctcctgcttgttctggttactatgactacactttatatatttcaattatctttgcaaagaaccagcttatggttgcattgtttttctctattatttctgtttttattttattcttttggattttattattagaatttctttttgtctccttactttgtgtttaatttctttttctggtttcttaagatagaagataaaatcattaatatgagaactttcttattttctaatatgagtgtttacaattataatttgtcctctaagtactgctcagctccattcaacaaatactgatatatttcattttgattttcatttaattcagaatttcttagttnnnnnnnnnnnnnnnnnnnnnnnnnnnnnnnnnnnnnnnnnnnnnnnnnnnnnnnnnnnnnnnnnnnnnnnnnnnnnnnnnnnnnnnnnnnnnnnnnnnnatagcagcaacagcagctgaaagagggtgcagaagatgacttttgacagacatcccacacctgggctggtaggaaggaaatagcagcatagagagagtagctcccatgctggaaaggaatggatgggtgttaaatgagatcagtatttatacaggtttactgaacacagacatgaactagctctgactgatcatttgggaaagatgcccactcaaagcgtgatgcccactcaaatagtgatttaatatactattagcataaacgaaggtatccttcatattgttttttccctggtaaataaaaaaaaaattagacatctggagaaaggaataaagatgattttttagtgacttacgcaacatgccctctttcattatacttggctcaacccttctagaatgattcaaccacagatctatgaaaaggattcttggaaagattatcacagctagggtatagagcagactccaaagtaggagtttgatcaaagggagaggagactgggaactcttctgcattttcacaactgtattccagaagttgtggaatgacaccattaatcacatgaactttaactggcatggaaatcaggcataacttgtgtgggtcattgacttgtgaaaaataatatttccttcattaaagctcatccaactgtcatctctttttcttttctagcaacatttaacagcagtaaagcagacttttatcacttatccctgacttacattgacaacctccaaamttgtccttctcaacttaattttttcctctctaatccacacaacaaacatttatcctcccattccaccaaattgcacttaccactc

SEQ ID NO: 715034 - DNA, 608 bp, Homo sapiens
tgacttctcctacttataaatgaagatgggttgtttatcaaaccttgttacaacttacttgatttttgctgactttttaaaaagtgccttttaaagactcatggaatgcttccctttgtttactgttctggttctttgtaaaaacccaaggtagggtcagtgaggtgagtctgagagcaagcgtgcccttgtggtgctagtgcccgaggggtctgatggcactttcccctgcacacattccactgcctggccggcaagtgtattagtctgctctcatgctgctcataaagacatacctgagactgggtaatttataaaggaaagagatttaatggactcacagttcaacatggctagggaggcctcacaatcatggcagaagatgagggaagagcaaagtcacatcttacatggtggcaggcaagagagcttgtgcargggaactcccctttataaaaccatcagatctcatcagacttattcactatcatgagaacagcaggggaaagacctgctcccataattcaattacctcccactgggctcctcccatgacacatgggaattgtgggagctacaattcaagatgagatttgggtggggatgca

SEQ ID NO: 715035 - DNA, 3384 bp, Homo sapiens
  misc_feature 1030, 1031, 1032, 1033, 1034, 1035, 1036, 1037, 1038, 1039,1040, 1041, 1042, 1043, 1044, 1045, 1046, 1047, 1048, 1049,1050, 1051, 1052, 1053, 1054, 1055, 1056, 1057, 1058, 1059,1060, 1061, 1062, 1063, 1064, 1065, 1066, 1067, 1068: n = A,T,C or G
  misc_feature 1069, 1070, 1071, 1072, 1073, 1074, 1075, 1076, 1077, 1078,1079, 1080, 1081, 1082, 1083, 1084, 1085, 1086, 1087, 1088,1089, 1090, 1091, 1092, 1093, 1094, 1095, 1096, 1097, 1098,1099, 1100, 1101, 1102, 1103, 1104, 1105, 1106, 1107: n = A,T,C or G
  misc_feature 1108, 1109, 1110, 1111, 1112, 1113, 1114, 1115, 1116, 1117,1118, 1119, 1120, 1121, 1122, 1123, 1124, 1125, 1126, 1127,1128, 1129: n = A,T,C or G
gttttatatcacacctaataaaatctctgtaaaagtctgttgggaaaaaaatgtaaaacagaataaagatttggcaaagaatcatgctgtgagaacacaggctatggggtgactcctgaagtcagagatctgggctgtagtcagggccaggactggggtgaggcttaagtgctgcggccacaatttaaatcccagtgtctcatcgccaaaggtaaaaagttaaggaggcattgttctcagagttgcacaagtgcatgggcagcacctgcagcggggggagcctccttttcttcagccccctaaactcctctcttgactcagtcttgtcccatcctcagatgtagcttggccctttagggacccaccaactgtgggtcttgggcagcttggctcctccttcttggctgcaggtacctgacctacaaaatgaggaggtgttttgattatgcttttacgttgtctgtctttgccactagacagaaaaattcctgggaacactaaccactgctgattcacctgaggtgagtggctctcaataaatgctaatggccctatttgttgagyggttgtactgatgactggtatcagcttagttacctatggcataaccaacagtgtctccgagctggctttggaattaaagacacctaagttcacatctcagcttcctaacttaccggctgaaaaactttaagttactgaacctctccatatgcttcaatttcctcatctctaaagtgggaacaatacaaatccctacttcaaagcattgttgtaaggattctataaggtcatggaaggaaagttcttagagaggcacttactgtggagtaaacgcacaatcaagtgtagttgtggctttattattagtgtcactgtcactctctcagctcagtgtctactcgtgaagacacagacattttggatatgcagtctgacagtgctatatctcagttccaagtattttcaagaaaaatgtttgttttgtttctatctgggatctggacagtttcataagcctcccttaagnnnnnnnnnnnnnnnnnnnnnnnnnnnnnnnnnnnnnnnnnnnnnnnnnnnnnnnnnnnnnnnnnnnnnnnnnnnnnnnnnnnnnnnnnnnnnnnnnnnngaagaaatggaggccgacaaaaaagcacaaaaaaaaaaaggaaaaagaaaaagaaaaagaaaagaaaagaaaaaagaaaagaaagaaaaaataaagagaaaaaagccaaacagttctttgtttcccaaggtctccttgcaactggggccgccaatcctcttccatgcagacccagcttcctgcaccctcagctcttcctgcagagagctcattctaacccacaaacctgaccctgccagatccttgcttcaaaggctccccatcgtgggcagcacagagtctgcagtcttgggcgaagtcaaggtcgccgtggcttaacctctgcttccctcctgatgcccccacttctgactcatttttctgcatccccatggtacctcatatcttatctctgctatggcacctctcccttcagcaacaccgggattctgaactgctgatacagaaagagcgctccaggactgtcctcaacatctgtattcacatcctctggcaggtttctcctaccaagctgctggcctgtgggaggttcacctgatccccgtgttagagtcctggtttgctgcatcacggacttcatcaggggctgagtttgctggtgagtagtacttgatgccgtggggtctggagtcagcaggacctaaaatgtagaccagattccactcctgactggctgagatggacaaaccacttcaacttcttcatctaggaagaagggatagtgatccccatctctaatgaaccttagggacactggatccaaccacgttttctgtttttgaggaaatgaggtcaatttcctcatctctgcaatgggaagtgtgaaagggctcttgggatgaatggagctaatatgagcacaatgtgtgacacatggaaggtgctccatacatgaaagttatgattgcataattatgtttgttggtctcacggatgttctgtattttgccattcatctgagcctctacaagcaaagtgttcaatggccacagcagaaactactctagttgtgcctgaaataataagacaatctccctgtatctgagttagcactggttatatgcatatttgccattttaaatttctgcaaactctgagtgaagagacggatttttttctcagatagcatctaaacaaccacctggtagccagaatttgcccaatttgagctcatcaaacacattcattctcaagatccttttccatttgaattcagctatcattcacagacaccctccggtgcttggggctgtttggtagacttttcatgccacgtggatttaatgctggtgaccgctggtgggtcaggtgttagtctcatcatctgacaggggaggaaatggagccatggacagatgctcattccaccaggcctggtcttccagagatgagtgagggcagagacagggcctggggaaactgcagacaggcatcgctgggtaaagtcctttgctgctctttgtctgatgtcagaaacacagagaagcctggatcagcagccaacaagagtgcattttccaggtgggagagtgattttggtctcctcacttctacaactgaataaaatgcatctgtttcctcaccctggtgagcatggttttcatttcttctttgaaaatgcttctggagcaatagctatttgataagagtcattgctgaaatgaaaactccaaggaggtgaaattagaaaatatcttctgggctagagtggagtttcttgcagtagagctggcctgctgcttgggcaatgctggggtttagtggatgtggatgaggaagaggcatggtggagacccccaactccattcacaactggcattggcacagcgtccttggcctccctgccacacacacacacacaaacacacacacaatcttacgaaggttgtattttcatctgttctcttctcaggcttttgttttgagagatgataggaggccatagttgtacaaaggtagcaactgtcttgaaacagagacactgtataatcctgagcagagaaattgtggctgacctttagaagaagggaagaggcatgagcagagagaagcctctagaagtggatgggtggatagatcaatagaaattgaaggacataggctctcaagctggacttgcaggttttggtcctgctcctcacctccctagaggtatgaccttgggaaaggtacttacctttctgtgtctcagtgaactcatctgtgaaatgggggtaatgataatagcacctgactcatcacattacttaggactg

SEQ ID NO: 715036 - DNA, 654 bp, Homo sapiens
atggaaggttctcgaaaaaaatggaatcgaatggaatggaattgaatggaacggaatagagtcgaatggaattgaatggaatggaatggactagagtgaaatggaatcgaaccacaaggaatggasaggaatagaatggtctcgaattgaatggaatcgtatggaatggcatcaaacggaatggaatggacagccacggaatggaatgcactcgaatgcaatggagtcgaaactaatggactggaatagaatggactcgactggtacggactccaatggaatggaatcgaatggaagggaatcgaacggaatggactcgaagggaaaagactgcaatggaaaggtctcgaatggaatggaaattaatggaatggaatggaatcgaatgaaatggagtcaaaaggaatggaatcgaatggcaagaaatcgaatgtaatggaatcgcaaggaattgatgtgaacggaacggaatggaatggaatccaaaggaatggaatagaatggaatggaatcgaatggaaaggactcgaatggaaatcactcgaatagaatgcaatttaataaaataggatcaaatgtaatggaatggaatggaaaggaatcgaaacgaaaggaatggagacagatggaatggaatggaacagagagcaatgg

SEQ ID NO: 715037 - DNA, 2634 bp, Homo sapiens
aaaactggcaagaaatggaatcaaaatgaatggagtgttatggaacggactcaaaaggaattgaatgtaatagaatggagtggagtggactcgaatataatggactggaatggaatgaaatcacatggaatgggaacgaatggaatggaatggaaaggaatggaatcgaatggaaaggaatcgaatggaagggaatgaaattgaatcaacaggaatggaagggaatagaatagacggtaatggaatggactcgaatagaatggacacgaatgctcaaattgaatggactcgaatggaatggaaacgaaaggaatgtcatcgaatggaattgaatcgattggaatgaaatcgcatagaatggagtggaatcaaatggaattgaatcgaaaggaaaggaagcgaatggactgaaatgaaatggaatggaattgaatggaaagtaatgcaatggaatagaatggaacgaaatttcacggaatggaatcaaactgaatggaatcaaatcaatggaatcaaatcaaatggaatggaaaggaattgaatggagtagattggattggatgggattggaatgaaatgtactgaaaaggactcgaatttcatgaaacggaatggaatgaattggaacggaagggactcgaatggaatggaatgtcatggaatggcatcaaatggaatgacatcaaatggaatggaatcgaatgcaatggaatgttatggaatggaatggaatgcattggaatggaatgtcctctaatggaatggattcgagtggaatggaatcgaatataatggagtcgaatgaaatggaattgaaaggaatgggatcgaatacaatggaatatactggaatgtaatgtaatgaactcgaatgtaattgactggaatggaatgtacatgagtggaatgtaatcgaatggaaagtaatccaatggaatagaatctaatgcaataaaaccgactcagatagagtaaaatgtaatggaatggagtgcagtgcaatggaatggaatggaattgaatgcaatggaatggaatggaatggaatggaatggaatggaatggaatggaatggaatggaatgggatggaatggtatggaatggatagtaatggactggagtgaaatggactggaaaggaatcgactcaaattgaaagggctcgaaaggaatggagtcaaatggaatggtctggaatggaatgaacacgaatgtaatgcaatccaatagaatggaatcgaatggcatggaatataaagaaatggaatcgaagagaatggaaacaaatggaatggaattgaatggaatggaattgaatggaatgggaacgaatggagtgaaattgtatgcagtagaagggaatagaatggaatgcaagcgaaaggaaaggaatggattggaatggaatggaattcattggaatggaagggaatgtagtgtaatggacaggcctggaataaagtggaatgctacggtctcgaatggaataaaaatgtatggaatggaatgcaatgaaayggaatcgaatgtcatagaatgtaatggaatgcaacaaaatggaatccaaaatcattgactggaaaggctgggtgtcgaaaggaattgactccaatggaatggaatcgaatggaatggaagtgaatagaatcgaactaaatcgaatggaatggaattgataggaacggaatggaaaggaatgcaatgatttggcatggaatggaatcgaatggcatcgaatggaatggtatggaatgcaatggaatggaatgtattagaatgtaatgaactttaatggaatgtactcgaatggattcgactggaatggaatgttctggaagtgaatggactccaatggaatggattcaaaaggaatggaatcgtacggaatggaatctaatggaatggaattaaatggaaatgaatcaaattgaatagcacggaactgaattgaatggaatcgaatgcaatggaatctaatgaaacggaaaggaatggaatggaatgggctggaatggaaaggaatcgaaacgaatggaatggaatcgaactgaagagactggaatggaatgcactggaatggaagggagtgtaatggaaggttctcgaaagaaatggaatcgaatggaatggaattgaatggaacggaatagagtcgaatggaattgaatggaatggaatggactagagtgaaatggaatcgaaccacaaggaatggacaggaatagaatggtctcgaattgaatggaatcatatggaatggcatcaaacggaatggaatggacagccacggaatggaatgcactcgaatgcaatggagtcgaaactaatggactggaatagaatggactcgactggtacggactccaatggaatggaatcgaatggaagggaatcgaacggaatggactcgaagggaaaagactgcaatggaaaggtctcgaatggaatggaaattaatggaatggaatggaatcgaatgaaatggagtcaaaaggaatggaatcgaatggcaagaaatcgaatgtaatggaatcgcaaggaattgatgtgaacggaacggaatggaatggaatccaaaggaatggaatagaatggaatggaatcgaatggaaaggactcgaatggaaatcactc

SEQ ID NO: 715038 - DNA, 2634 bp, Homo sapiens
aaaactggcaagaaatggaatcaaaatgaatggagtgttatggaacggactcaaaaggaattgaatgtaatagaatggagtggagtggactcgaatataatggactggaatggaatgaaatcacatggaatgggaacgaatggaatggaatggaaaggaatggaatcgaatggaaaggaatcgaatggaagggaatgaaattgaatcaacaggaatggaagggaatagaatagacggtaatggaatggactcgaatagaatggacacgaatgctcaaattgaatggactcgaatggaatggaaacgaaaggaatgtcatcgaatggaattgaatcgattggaatgaaatcgcatagaatggagtggaatcaaatggaattgaatcgaaaggaaaggaagcgaatggactgaaatgaaatggaatggaattgaatggaaagtaatgcaatggaatagaatggaacgaaatttcacggaatggaatcaaactgaatggaatcaaatcaatggaatcaaatcaaatggaatggaaaggaattgaatggagtagattggattggatgggattggaatgaaatgtactgaaaaggactcgaatttcatgaaacggaatggaatgaattggaacggaagggactcgaatggaatggaatgtcatggaatggcatcaaatggaatgacatcaaatggaatggaatcgaatgcaatggaatgttatggaatggaatggaatgcattggaatggaatgtcctctaatggaatggattcgagtggaatggaatcgaatataatggagtcgaatgaaatggaattgaaaggaatgggatcgaatacaatggaatatactggaatgtaatgtaatgaactcgaatgtaattgactggaatggaatgtacatgagtggaatgtaatcgaatggaaagtaatccaatggaatagaatctaatgcaataaaaccgactcagatagagtaaaatgtaatggaatggagtgcagtgcaatggaatggaatggaattgaatgcaatggaatggaatggaatggaatggaatggaatggaatggaatggaatggaatggaatgggatggaatggtatggaatggatagtaatggactggagtgaaatggactggaaaggaatcgactcaaattgaaagggctcgaaaggaatggagtcaaatggaatggtctggaatggaatgaacacgaatgtaatgcaatccaatagaatggaatcgaatggcatggaatataaagaaatggaatcgaagagaatggaaacaaatggaatggaattgaatggaatggaattgaatggaatgggaacgaatggagtgaaattgtatgcagtagaagggaatagaatggaatgcaagcgaaaggaaaggaatggattggaatggaatggaattcattggaatggaagggaatgtagtgtaatggacaggcctggaataaagtggaatgctacggtctcgaatggaataaaaatgtatggaatggaatgcaatgaaacggaatcgaatgtcatagaatgwaatggaatgcaacaaaatggaatccaaaatcattgactggaaaggctgggtgtcgaaaggaattgactccaatggaatggaatcgaatggaatggaagtgaatagaatcgaactaaatcgaatggaatggaattgataggaacggaatggaaaggaatgcaatgatttggcatggaatggaatcgaatggcatcgaatggaatggtatggaatgcaatggaatggaatgtattagaatgtaatgaactttaatggaatgtactcgaatggattcgactggaatggaatgttctggaagtgaatggactccaatggaatggattcaaaaggaatggaatcgtacggaatggaatctaatggaatggaattaaatggaaatgaatcaaattgaatagcacggaactgaattgaatggaatcgaatgcaatggaatctaatgaaacggaaaggaatggaatggaatgggctggaatggaaaggaatcgaaacgaatggaatggaatcgaactgaagagactggaatggaatgcactggaatggaagggagtgtaatggaaggttctcgaaagaaatggaatcgaatggaatggaattgaatggaacggaatagagtcgaatggaattgaatggaatggaatggactagagtgaaatggaatcgaaccacaaggaatggacaggaatagaatggtctcgaattgaatggaatcatatggaatggcatcaaacggaatggaatggacagccacggaatggaatgcactcgaatgcaatggagtcgaaactaatggactggaatagaatggactcgactggtacggactccaatggaatggaatcgaatggaagggaatcgaacggaatggactcgaagggaaaagactgcaatggaaaggtctcgaatggaatggaaattaatggaatggaatggaatcgaatgaaatggagtcaaaaggaatggaatcgaatggcaagaaatcgaatgtaatggaatcgcaaggaattgatgtgaacggaacggaatggaatggaatccaaaggaatggaatagaatggaatggaatcgaatggaaaggactcgaatggaaatcactc

SEQ ID NO: 715039 - DNA, 2634 bp, Homo sapiens
aaaactggcaagaaatggaatcaaaatgaatggagtgttatggaacggactcaaaaggaattgaatgtaatagaatggagtggagtggactcgaatataatggactggaatggaatgaaatcacatggaatgggaacgaatggaatggaatggaaaggaatggaatcgaatggaaaggaatcgaatggaagggaatgaaattgaatcaacaggaatggaagggaatagaatagacggtaatggaatggactcgaatagaatggacacgaatgctcaaattgaatggactcgaatggaatggaaacgaaaggaatgtcatcgaatggaattgaatcgattggaatgaaatcgcatagaatggagtggaatcaaatggaattgaatcgaaaggaaaggaagcgaatggactgaaatgaaatggaatggaattgaatggaaagtaatgcaatggaatagaatggaacgaaatttcacggaatggaatcaaactgaatggaatcaaatcaatggaatcaaatcaaatggaatggaaaggaattgaatggagtagattggattggatgggattggaatgaaatgtactgaaaaggactcgaatttcatgaaacggaatggaatgaattggaacggaagggactcgaatggaatggaatgtcatggaatggcatcaaatggaatgacatcaaatggaatggaatcgaatgcaatggaatgttatggaatggaatggaatgcattggaatggaatgtcctctaatggaatggattcgagtggaatggaatcgaatataatggagtcgaatgaaatggaattgaaaggaatgggatcgaatacaatggaatatactggaatgtaatgtaatgaactcgaatgtaattgactggaatggaatgtacatgagtggaatgtaatcgaatggaaagtaatccaatggaatagaatctaatgcaataaaaccgactcagatagagtaaaatgtaatggaatggagtgcagtgcaatggaatggaatggaattgaatgcaatggaatggaatggaatggaatggaatggaatggaatggaatggaatggaatggaatgggatggaatggtatggaatggatagtaatggactggagtgaaatggactggaaaggaatcgactcaaattgaaagggctcgaaaggaatggagtcaaatggaatggtctggaatggaatgaacacgaatgtaatgcaatccaatagaatggaatcgaatggcatggaatataaagaaatggaatcgaagagaatggaaacaaatggaatggaattgaatggaatggaattgaatggaatgggaacgaatggagtgaaattgtatgcagtagaagggaatagaatggaatgcaagcgaaaggaaaggaatggattggaatggaatggaattcattggaatggaagggaatgtagtgtaatggacaggcctggaataaagtggaatgctacggtctcgaatggaataaaaatgtatggaatggaatgcaatgaaacggaatcgaatgtcatagaatgtaatggaatgcaacaaaatggaatccaaaatcattgactggaaaggctgggtgtcgraaggaattgactccaatggaatggaatcgaatggaatggaagtgaatagaatcgaactaaatcgaatggaatggaattgataggaacggaatggaaaggaatgcaatgatttggcatggaatggaatcgaatggcatcgaatggaatggtatggaatgcaatggaatggaatgtattagaatgtaatgaactttaatggaatgtactcgaatggattcgactggaatggaatgttctggaagtgaatggactccaatggaatggattcaaaaggaatggaatcgtacggaatggaatctaatggaatggaattaaatggaaatgaatcaaattgaatagcacggaactgaattgaatggaatcgaatgcaatggaatctaatgaaacggaaaggaatggaatggaatgggctggaatggaaaggaatcgaaacgaatggaatggaatcgaactgaagagactggaatggaatgcactggaatggaagggagtgtaatggaaggttctcgaaagaaatggaatcgaatggaatggaattgaatggaacggaatagagtcgaatggaattgaatggaatggaatggactagagtgaaatggaatcgaaccacaaggaatggacaggaatagaatggtctcgaattgaatggaatcatatggaatggcatcaaacggaatggaatggacagccacggaatggaatgcactcgaatgcaatggagtcgaaactaatggactggaatagaatggactcgactggtacggactccaatggaatggaatcgaatggaagggaatcgaacggaatggactcgaagggaaaagactgcaatggaaaggtctcgaatggaatggaaattaatggaatggaatggaatcgaatgaaatggagtcaaaaggaatggaatcgaatggcaagaaatcgaatgtaatggaatcgcaaggaattgatgtgaacggaacggaatggaatggaatccaaaggaatggaatagaatggaatggaatcgaatggaaaggactcgaatggaaatcactc

SEQ ID NO: 715040 - DNA, 1204 bp, Homo sapiens
atttaaattatggtctctatatatctctcttatacacacacatacacacactcacaaaaagcaccgttattttcattttactctttttcagctaataagcatcaaatacaaaggtccttccagatggaccttaggcacattacaacctcctgaagtcatcagaatgatattgctaatgtctgacctaaaatttccagtcctagggttgtgtatgttgttaaattcccactcaatctctggcattctggagttgctagcactgctgcctggatgcaaaagtgacttttatcaatcttaagatttttttgctagaaaatcattaattcattttatatccgctactgacagctatcaaataataataacaataggtctacatcaggctggtttgtattcaatcttttcatctatgagggaaagattccatctctattaccaatgccctgarccaaaagaaatcccaaagtagatttactcataactgaaccttggtgaccagaaatatgctaataaacgttaaactggaaaggtaggatttcataaagcttttgtctctaatcctccaagtagggaagttggttctgctgcagagttaattagcatacatgtggaagcagtttatggatgcggtttaatcccaaacaaatgtgaaaataagctcacattgttttgtagaatgatttacattcattatcatctacttaaaaaaaacccacatgctttaaaaaaatcattattccttccagaatatcagtgaataaagcaattccatatttgtacttttgaaaattatgtatttccagacaaggtcatatttcctcaaattgaaataaagtataaactttggtctcaagctatggtttccaaactttatccaggtacagagacattactgagtgacataggacttatgaagtgagttaacagatttaattgactagacatcatagaaaaccaaactttttttactagttcctatgaaagatattttggaacttcattatatgagatctctgtaaaagtctcatgatggaaatagtgctaatactcatattactctgatcatgaaataacaagtctgatatttcaatatgggttataaaactgtctcatggtttgtgatcatggtttcaggggacacagtttcaccagaggtatagttgtaacttacagttgtaatgatgaataatattataaagaagtt

SEQ ID NO: 715041 - DNA, 640 bp, Homo sapiens
tttacgttactttcaccaaagacagacaaaaaaaaatctgttaggttataggtctagagatgagtgccaagtactatattcctgctctaggtgcatttcttgttgaaggcagtgctagattcagtgacctgttacggccgtttacagtcttatggtgataaaacaagagaactgattgctaaaaaaaaaaaaaaatttcagttgaaatatctttttactcttaagcatcaacaaaaaataaatagaaaacagaagagttgaattatttagtttgagctatttgtaataaatttggacaactaagctaagcccgagtgtagttaattcaatgaaattagtcatatttgaatattgtcacaaccttactaccacattagcattaagtgtgattaaaatttattctttgtttctgtgtgagtctccacagaatcagctatcaacaccttcataataaactagcccttcattgctttcaggaaacttttagattcagagcaggtggttgggcttctgctttaaaagagaacacatcatttttaaagtccctttcctgtttgtgtgtgtgaatttagaacacagaaattatccattgcrttgtttatttttgctaggaggtagaagttcttaaaaatataggaaa

SEQ ID NO: 715042 - DNA, 1848 bp, Homo sapiens
caaatagttagcaaaggatattgaatgttcccaaaacaaagaaatgataaatgtttgcaatgatggatatgctaattaccatcacctcatcagggtaattaaatatatacactatgagtattgaaacatcactatgtacccataaatatgcacaattattatgtgccaattaaaaaaataaaataaaattatgataataaaagcttcatatttgtggtgtagagttaaattgagagggtaatttattatttgaaattcttctattagaaaaatacgtaggtttaaaagtcaatgaaaaaataaacaaaacgtaatttgaaaaaataaaataacaggtaatgaaagaaataaatgaaattgaaagtaaataaattcacaaagtgaaaagttcctttgaaaaaatcagtaaagttgttacatactagtaagactaagaaaaaaggactgataaaagaagaaatatcattacagaacctctatatttaaatgataataactattatgaacaattccatactcaagaatttggcagcttaaagttctgtaaagagacaaattaccaaagcttatttaagaacaaattcataatgtgaatttttctgtatctatatgtatccagatagtctaggttttctaatttctggcctatggttgctcatagtagcctctaatgatccttacaatttcaacaaagaaattcagaagaaattgaaaartttattgaagcagataaaaacggcaacacaacataccaaaacctatgggatacagcaaaaagcagtagtaagagggaaatgtatacctataatttccaagatcaaaaaagtgaaaaacctcaaataaataacctgatgatacatctttttttaaggtcactataaattttaatctatgatataaaatattacctacagatataattgaacatcaggtatcagaaaataaaacataacaatgaaatgcaattttgtaaatacttctatggtacaagcattattttcctcagattcaaccttttaattgtgttttgtttgctttctgaaaatcacactttataaagaacacaagtagagcttgttaaaatgattgtcacagatgtactgtttactaattcaaaaaatactacattcattcgctcatatcaattttattcattaattatgaagaagaaaatataatattccatgcttgtcatgaaatagcggtttcttcttccagtctaatcagggaactaataaatgcttagttcatggcaaaacttccatttgatttacattgacttaattacctcttagggtctagcctcatcaatggagaaaaagcactttttcttgaggcaacagcacattaacagcactgaatacaaaatatggcaaattcaatggctgtcagcattgctttaggaattttgagactataaaaaaactataaccatgaataaaagaaaagggcttattaatatcttctttttgggagagtgatacattctgaaggtttcttgttattctgttgaatagcaaggacttccaaacttaagtgtcttaaggctgaaaattagttacattcctcagattttagccttattaatgaaattccaaaagtattataagatttagtatgtcttgaaattataaatttgtaacagatatttttcaaaatacatgccttcaaacaacttaaatgcaaaaatcattcattcttaataatacctagcagttcatcccttgcttcccagaagtactcatacaaacatgtgaatttaaaaaatagatttttctgttcaaaaaataaagcttctgcccttttaaaaacttgtcaggctttcatttgccaaaatgttgaaaactg

SEQ ID NO: 715043 - DNA, 659 bp, Homo sapiens
caaagcaatattttacacgctttggaaaaaatagctatttttcaaataacttgatatatggtttacatatttcatgcagtctctgaggttttttttttctacaatactgttttgcattaaagtctctcatgttgtttaccagtaattgtttccttaggctgaaataaaactttgcttgttcattagttttctgtatatcccatttggttttgaaagcagctcttcatgttttccatattcagtaatttttccttgatcaagaacagcaaccatattagcattcttaatggtggagagatgatgggcaataactaacgctgttcttccatccatcagtggatctagagcttcttgaacaaggtactcattttcagcatccagcgcactggttgcttcatctaggagaagaaytttgggattcttcagcagagcacgggcaattgcaatccgctgtttctgcccacctgagaggagaacacccttttctccaaccacagtgttgaacccttgggggaaattcccggatcaagaccactgcattggccacttcagccactctctggacttgctcagcggtcacagaggaaggccatcagcaccataagcaatgttctcagtgatagagcaagaaaacaaaatgggttcctgtctcactgtcc

SEQ ID NO: 715044 - DNA, 3160 bp, Homo sapiens
gggaggctgaggtgggtggatcaccttaagtcaggagtttgagaccagcctggccaacatggtgaaaccccatctcttctaaaaatacaaaaattagctgagcacggtggagcgtgcctgtaatgccagctactgaggaggctgaggaaggagaatcgcttgaacccaggagtcggagcctgcagtgagccaagatcgcgccactgcactccagcctggatgacagagcaagactccttctcaaaataaataaataaataaaaatacatcacaaatttaataaataaataaataactgtaagcagaagctgatacaatttaatacatgttttatgaggacttcactatgaaaactggaccctgcgtacaagaatggaaaaaagaaagtaacacagacagaaggccacataattggagctagaataataagagtggataagctgagaagtgcatagatttagacaaatattggaagcggggtttttgggatttgttaatggattggaaatttgggagacggaagaaagatgatagcgaggtttggtgggatgatagtgtcactaagtgagaaaaggaattctgagagaggagcaggcctggcggagggtccctgggattgattagaaatcagtggttttgttaactgtgagatgcttgttagatgcccaagagggatgtgcagaactcagggagaccacacaactggaggtgtatgtttgtaagcatcagcacgtggatagtatttaagccctgagattgtataaggttgtcacctttcctttagagtataaattcacaccaaaactattggtggagatgataggacaagggaatcatacaaaaaaaattgtactgcaaaaagctatgaatgaataaaacatttyattaaatgtatttggcaccttgtatatacctagttgatctaggacagagaagatacttagtaacattcattttttcttactgtaagaataatgacccaggaggcggaggctgcagtgagctgagatcaggccactgcactctagctctagcagacagagtgagactccgtctcaaaaaaaaaaaaaaaaaagaataatgaatgctcatcagagggaattgaattttattattctaggaaatctgatggaaaaagtgaaaaataaatattgataccatttataaaacaatgaaaagacttataagagaagccatctaggcttttctctatacttaattatacatataaatacatcagtactttacttcaaaaaataagatcatagggtacatttgattttatgatctgaactgctcacctgaccacacaaaacaaatactttaccatgacattaaatagtctgctctctggttgttagtgctggcatactattctatcatatggaaaaattacagttttccttcacccagtcaccgaaagttggatatttaggatgcgaccagtttttcatgataataaagactaataggaatagcagtagacataagatgtttttggcatcttttttttcttgtaatacgttctacatattgaaactaataattgtattttgctacatattgccacgtttttctcaaggaaaattatagctaacagaaagtgtcagctttctctgtgtgttaagggtgtgggtggaagctcggcagtgacgctgagacatattggtatggaacatcattggactctctagagatcaaggtagcagtcctgtagaaatgttagcccgagctgtgtgtcacctgggagtactccaaggacggccaaaagaaatattttagttagaagacaatttataagaaaagtttagaggcttcctagagaggtcatagcatacacaattttatttcatcctttagggcaagccgtatatatatgttctgcgcacatctcctcctgcaccctcctcaaaaaaaaaaaaaaaaaaaaaaaaaaaaagctgagatctgatgtaaatagatagctgtgaattatagcttggtccttaaggaatatctcagaaacttcaatgttccttcaccccctccgcaaacccttctgaattgagaatgggaaccttggcaacagaggggagtcatgcacctcccttttccatctgtgactctgacatcttcctccaggtcagccatggtgcaaactctcacagttactttctggcagtttcctgcattccaaacctgtttctgaaatgggcaatatttgtccccttgaaaatcacctgtgataaatgtggtatagcccacggccagtgaaaattttcctacagggagacatattcctaagtgttaacattaactttttcagatgtttgagtcagactcaattgccctttcatattatagattgaaaacaacacttggttgatgttagtatatctgattgaggaaatatgagagcctttttaatttagatttgctcgcctagaaaactcactttgaaacttcttggtcatgttatgtttgcttatggcaaagttatcagcaaaaaagtcactgttatgcagcaatttatctttaaacactaaatgacatctatcatttttcaaagaaaatagtgtcagcagttaaaatcctaactgcttgagcactgttagttgacaattataatgccccattgcttagaaattaattgacctactttcaataagaaacataaaaagtaatatcacagcaattttctggatctattttattccaaaaccaataaatgttacagtgttgttaaaagtaatagatttaaaaacattttattttcttaaacttaacaattcaaataacataaaataatattacgtttctattaagtattcatttttatacagaccaaaagttctttagaaaatgtcttcatgtataatataaatttgatttttagatgtgagaaaagcaacaatcataatcgttgcctaaatccacaaaataagtagatattctataatatgtatttcagtaatcacaatgtattggattcaggcagagatgagagacactctgattttagcagaaaaagactgtgttaaattacctctttgccttttctcactctgttcctaggatagcaatataataaatagtaactttagaactgggatacactgagaaaatgtcctaatttaaatctcaatagatgattacacaggtagtgtttacacacacacac

SEQ ID NO: 715045 - DNA, 3160 bp, Homo sapiens
gggaggctgaggtgggtggatcaccttaagtcaggagtttgagaccagcctggccaacatggtgaaaccccatctcttctaaaaatacaaaaattagctgagcacggtggagcgtgcctgtaatgccagctactgaggaggctgaggaaggagaatcgcttgaacccaggagtcggagcctgcagtgagccaagatcgcgccactgcactccagcctggatgacagagcaagactccttctcaaaataaataaataaataaaaatacatcacaaatttaataaataaataaataactgtaagcagaagctgatacaatttaatacatgttttatgaggacttcactatgaaaactggaccctgcgtacaagaatggaaaaaagaaagtaacacagacagaaggccacataattggagctagaataataagagtggataagctgagaagtgcatagatttagacaaatattggaagcggggtttttgggatttgttaatggattggaaatttgggagacggaagaaagatgatagcgaggtttggtgggatgatagtgtcactaagtgagaaaaggaattctgagagaggagcaggcctggcggagggtccctgggattgattagaaatcagtggttttgttaactgtgagatgcttgttagatgcccaagagggatgtgcagaactcagggagaccacacaactggaggtgtatgtttgtaagcatcagcacgtggatagtatttaagccctgagattgtataaggttgtcacctttcctttagagtataaattcacaccaaaactattggtggagatgataggacaagggaatcatacaaaaaaaattgtactgcaaaaagctatgaatgaataaaacattttattaaatgtatttggcaccttgtatatacctagttgatctaggacagagaagatacwtagtaacattcattttttcttactgtaagaataatgacccaggaggcggaggctgcagtgagctgagatcaggccactgcactctagctctagcagacagagtgagactccgtctcaaaaaaaaaaaaaaaaaagaataatgaatgctcatcagagggaattgaattttattattctaggaaatctgatggaaaaagtgaaaaataaatattgataccatttataaaacaatgaaaagacttataagagaagccatctaggcttttctctatacttaattatacatataaatacatcagtactttacttcaaaaaataagatcatagggtacatttgattttatgatctgaactgctcacctgaccacacaaaacaaatactttaccatgacattaaatagtctgctctctggttgttagtgctggcatactattctatcatatggaaaaattacagttttccttcacccagtcaccgaaagttggatatttaggatgcgaccagtttttcatgataataaagactaataggaatagcagtagacataagatgtttttggcatcttttttttcttgtaatacgttctacatattgaaactaataattgtattttgctacatattgccacgtttttctcaaggaaaattatagctaacagaaagtgtcagctttctctgtgtgttaagggtgtgggtggaagctcggcagtgacgctgagacatattggtatggaacatcattggactctctagagatcaaggtagcagtcctgtagaaatgttagcccgagctgtgtgtcacctgggagtactccaaggacggccaaaagaaatattttagttagaagacaatttataagaaaagtttagaggcttcctagagaggtcatagcatacacaattttatttcatcctttagggcaagccgtatatatatgttctgcgcacatctcctcctgcaccctcctcaaaaaaaaaaaaaaaaaaaaaaaaaaaaagctgagatctgatgtaaatagatagctgtgaattatagcttggtccttaaggaatatctcagaaacttcaatgttccttcaccccctccgcaaacccttctgaattgagaatgggaaccttggcaacagaggggagtcatgcacctcccttttccatctgtgactctgacatcttcctccaggtcagccatggtgcaaactctcacagttactttctggcagtttcctgcattccaaacctgtttctgaaatgggcaatatttgtccccttgaaaatcacctgtgataaatgtggtatagcccacggccagtgaaaattttcctacagggagacatattcctaagtgttaacattaactttttcagatgtttgagtcagactcaattgccctttcatattatagattgaaaacaacacttggttgatgttagtatatctgattgaggaaatatgagagcctttttaatttagatttgctcgcctagaaaactcactttgaaacttcttggtcatgttatgtttgcttatggcaaagttatcagcaaaaaagtcactgttatgcagcaatttatctttaaacactaaatgacatctatcatttttcaaagaaaatagtgtcagcagttaaaatcctaactgcttgagcactgttagttgacaattataatgccccattgcttagaaattaattgacctactttcaataagaaacataaaaagtaatatcacagcaattttctggatctattttattccaaaaccaataaatgttacagtgttgttaaaagtaatagatttaaaaacattttattttcttaaacttaacaattcaaataacataaaataatattacgtttctattaagtattcatttttatacagaccaaaagttctttagaaaatgtcttcatgtataatataaatttgatttttagatgtgagaaaagcaacaatcataatcgttgcctaaatccacaaaataagtagatattctataatatgtatttcagtaatcacaatgtattggattcaggcagagatgagagacactctgattttagcagaaaaagactgtgttaaattacctctttgccttttctcactctgttcctaggatagcaatataataaatagtaactttagaactgggatacactgagaaaatgtcctaatttaaatctcaatagatgattacacaggtagtgtttacacacacacac

SEQ ID NO: 715046 - DNA, 3160 bp, Homo sapiens
gggaggctgaggtgggtggatcaccttaagtcaggagtttgagaccagcctggccaacatggtgaaaccccatctcttctaaaaatacaaaaattagctgagcacggtggagcgtgcctgtaatgccagctactgaggaggctgaggaaggagaatcgcttgaacccaggagtcggagcctgcagtgagccaagatcgcgccactgcactccagcctggatgacagagcaagactccttctcaaaataaataaataaataaaaatacatcacaaatttaataaataaataaataactgtaagcagaagctgatacaatttaatacatgttttatgaggacttcactatgaaaactggaccctgcgtacaagaatggaaaaaagaaagtaacacagacagaaggccacataattggagctagaataataagagtggataagctgagaagtgcatagatttagacaaatattggaagcggggtttttgggatttgttaatggattggaaatttgggagacggaagaaagatgatagcgaggtttggtgggatgatagtgtcactaagtgagaaaaggaattctgagagaggagcaggcctggcggagggtccctgggattgattagaaatcagtggttttgttaactgtgagatgcttgttagatgcccaagagggatgtgcagaactcagggagaccacacaactggaggtgtatgtttgtaagcatcagcacgtggatagtatttaagccctgagattgtataaggttgtcacctttcctttagagtataaattcacaccaaaactattggtggagatgataggacaagggaatcatacaaaaaaaattgtactgcaaaaagctatgaatgaataaaacattttattaaatgtatttggcaccttgtatatacctagttgatctaggacagagaagatacttagtaacattcattttttcttactgtaagaataatgacccaggaggcggaggctgcagtgagctgagatcaggccactgcacwctagctctagcagacagagtgagactccgtctcaaaaaaaaaaaaaaaaaagaataatgaatgctcatcagagggaattgaattttattattctaggaaatctgatggaaaaagtgaaaaataaatattgataccatttataaaacaatgaaaagacttataagagaagccatctaggcttttctctatacttaattatacatataaatacatcagtactttacttcaaaaaataagatcatagggtacatttgattttatgatctgaactgctcacctgaccacacaaaacaaatactttaccatgacattaaatagtctgctctctggttgttagtgctggcatactattctatcatatggaaaaattacagttttccttcacccagtcaccgaaagttggatatttaggatgcgaccagtttttcatgataataaagactaataggaatagcagtagacataagatgtttttggcatcttttttttcttgtaatacgttctacatattgaaactaataattgtattttgctacatattgccacgtttttctcaaggaaaattatagctaacagaaagtgtcagctttctctgtgtgttaagggtgtgggtggaagctcggcagtgacgctgagacatattggtatggaacatcattggactctctagagatcaaggtagcagtcctgtagaaatgttagcccgagctgtgtgtcacctgggagtactccaaggacggccaaaagaaatattttagttagaagacaatttataagaaaagtttagaggcttcctagagaggtcatagcatacacaattttatttcatcctttagggcaagccgtatatatatgttctgcgcacatctcctcctgcaccctcctcaaaaaaaaaaaaaaaaaaaaaaaaaaaaagctgagatctgatgtaaatagatagctgtgaattatagcttggtccttaaggaatatctcagaaacttcaatgttccttcaccccctccgcaaacccttctgaattgagaatgggaaccttggcaacagaggggagtcatgcacctcccttttccatctgtgactctgacatcttcctccaggtcagccatggtgcaaactctcacagttactttctggcagtttcctgcattccaaacctgtttctgaaatgggcaatatttgtccccttgaaaatcacctgtgataaatgtggtatagcccacggccagtgaaaattttcctacagggagacatattcctaagtgttaacattaactttttcagatgtttgagtcagactcaattgccctttcatattatagattgaaaacaacacttggttgatgttagtatatctgattgaggaaatatgagagcctttttaatttagatttgctcgcctagaaaactcactttgaaacttcttggtcatgttatgtttgcttatggcaaagttatcagcaaaaaagtcactgttatgcagcaatttatctttaaacactaaatgacatctatcatttttcaaagaaaatagtgtcagcagttaaaatcctaactgcttgagcactgttagttgacaattataatgccccattgcttagaaattaattgacctactttcaataagaaacataaaaagtaatatcacagcaattttctggatctattttattccaaaaccaataaatgttacagtgttgttaaaagtaatagatttaaaaacattttattttcttaaacttaacaattcaaataacataaaataatattacgtttctattaagtattcatttttatacagaccaaaagttctttagaaaatgtcttcatgtataatataaatttgatttttagatgtgagaaaagcaacaatcataatcgttgcctaaatccacaaaataagtagatattctataatatgtatttcagtaatcacaatgtattggattcaggcagagatgagagacactctgattttagcagaaaaagactgtgttaaattacctctttgccttttctcactctgttcctaggatagcaatataataaatagtaactttagaactgggatacactgagaaaatgtcctaatttaaatctcaatagatgattacacaggtagtgtttacacacacacac

SEQ ID NO: 715047 - DNA, 605 bp, Homo sapiens
ggtattttacaattttttttggagacaaggtctcactctgttacgcaggctcgagtgcagtggatcaagctcactgcagcctcaatctcctgggctcaagcaattgttccacctcagcttcctaagcagctggtactacaagcgtacgccaccatgcctcgttawtttttttttttttttttttttagtagagacaagatctcgctatgttgctcaggctggtctccaactcctgagctcaagcaatcctcctgccttggcctctgaaagtgccaggcaggaaagattacaggcatgagccaccatgcccagccttattttacaattttactattgcatttctaataaatgacaaccctgataactgaattggcagtacctttctgtgtttacagtgcaatacaatattgtattcagcacatgagaaagaattctagtaattaatatctagcatataattgttttttaaaacttagccgtttaatacatccacatttatgttcccttaggcaaagacattggttctgaaatgtctgcttacaactaggtaaagtctacacataagaaaaaaaagactggaggccaggtgcagtgcctcacacttg

SEQ ID NO: 715048 - DNA, 605 bp, Homo sapiens
ggtattttacaattttttttggagacaaggtctcactctgttacgcaggctcgagtgcagtggatcaagctcactgcagcctcaatctcctgggctcaagcaattgttccacctcagcttcctaagcagctggtactacaagcgtacgccaccatgcctcgttattttttttttttttttttttttagtagagacaagatctcgctatgttgctcaggctggtctccaactcctgagctcaagcaatcctcctgccttggcctctgaaagtgccaggcaggaaagattacaggcatgagccaccatgcccagccttattttacaattttactattgcatttctaataaatgacaaccctgayaactgaattggcagtacctttctgtgtttacagtgcaatacaatattgtattcagcacatgagaaagaattctagtaattaatatctagcatataattgttttttaaaacttagccgtttaatacatccacatttatgttcccttaggcaaagacattggttctgaaatgtctgcttacaactaggtaaagtctacacataagaaaaaaaagactggaggccaggtgcagtgcctcacacttg

SEQ ID NO: 715049 - DNA, 605 bp, Homo sapiens
ggtattttacaattttttttggagacaaggtctcactctgttacgcaggctcgagtgcagtggatcaagctcactgcagcctcaatctcctgggctcaagcaattgttccacctcagcttcctaagcagctggtactacaagcgtacgccaccatgcctcgttattttttttttttttttttttttagtagagacaagatctcgctatgttgctcaggctggtctccaactcctgagctcaagcaatcctcctgccttggcctctgaaagtgccaggcaggaaagattacaggcatgagccaccatgcccagccttattttacaattttactattgcatttctaataaatgacaaccctgataactgaattggcagtacctttctgtgtttacagtgcaatacaatattgtattcagcacrtgagaaagaattctagtaattaatatctagcatataattgttttttaaaacttagccgtttaatacatccacatttatgttcccttaggcaaagacattggttctgaaatgtctgcttacaactaggtaaagtctacacataagaaaaaaaagactggaggccaggtgcagtgcctcacacttg

SEQ ID NO: 715050 - DNA, 1074 bp, Homo sapiens
cactttgggagcccgaggcaggtggatcacgaggtcaagaggtcgagaccatcctggccaacaaggtgaaaccccatctccactaaaaacacaaaaattagctgggcatggtggtgtgtgcctgtggtcccagctactagggaggctgaggcaagagaatcgcttgaacccgggaggtgaaggttgcagtgagccgagatcacgccactgccctccagcctagtgacagagtaagactccatctcaaaaacaaaacaaaacaaaaaaattatctgggcgtggtggctcgcgcctatagtcccagctactcaggaagctgaggtgggggaatcacttgaacctcggaggtcgaggtggcagtgagccaagattgcaccaccgcactccagcctacgcaatcrgaatgagactgtctcaaaaaaaataaagactggaaagaaagaacgaaatcacagtagttatattaggatggaaagattatagctgcttgactttttctacacttcaacttttttgcaatgtggttattatgtatttttattataaaaatgtataaattaaacaaaatgctgtttacagatatatattttaaagtgattcttaaaatcctagttctatcccttttttgaccaaaaattacatccaataatatgcatatagataacttatctgaaacaatgaaaacaagcaatgttcacaaagctgccatcattaacaagactcaaaccaagacttgtgatggtgccgaggccattggagctatggtcacataccccaatacctacaggtagcaggggacaacccctctttctagaataaaaaaataaaaaaataaaaacctcatgaaaggatgataatgggccgggctgatgaagtcagatagcaggatttgcagccagctgcaactgtatttacttagaggcttaagaagtcaaagtcaaaaacaaaaattgtattctacaaaggcgtctcctaacctagtataacaatgtagaatggccacttgcaccttgcgaatcatgaatatttaacaaacaggtcactacactcaattagaaacccaccgcgcagaac

SEQ ID NO: 715051 - DNA, 2639 bp, Homo sapiens
aaaaaaaaaaaaaaaaaggctgggcgcggtggctcaggcctgttatcccagcactttgggaggctgaggcggtggatcacttgaggtcaggagtttgagaccagcctggccaacatggtaaaaccctgtctctactgaaaatacaaaaattagccaggcrtggcgacacgcacctgcgatcccagctactcaggaggctgaggcaggagaatcactggaacccgggatgtttgattcccaaaataattgtgtatatttaccctaggagttctgaaggaagtcagtttaggcttgggttgttcttagtaaggagggaccttaagggcatgatgagatttggaatttaggtttcttagtccatttgtgctgccataacaaaatacctgagattgggcaatttataacacaagtgtatttttcacagttgtgggtctgggaagtccaagattaaggcactggcctttgatgtctggtgagggccttcttgctgtatcctcacgtgggggaaggtagaagaacctaaaagttgcctccagcccttttatgaggcactgatccatttgctgtggtttggatttgtgtcttgcccacatctcatgttgaattataatccccaatgttggaggtggggcctggtgggagacgaaagtttgcctcttcgtggggctgagcaaaaatgcacgcgtgtgtaggaaaaaccatgggatcttacaacactcctgactctggcaactcttctacactgggctttgatgacttgctgagttgtactgaacccagcttaatagaagttttgtatccttaaatacccccagatttcttcctaagcctacagaacactgagattgcttttgttcgttcttctggtttagttctgtgccttcccctgcagccacagcagccatcccaggagaagttctacagcatggctgcccagatcaagctactcttagaaattccggagaagatctggagctcgatggaagcctctcagtgtctccacgccacacagctctacctgctctgctgccacctccacagcctgctccagctggattcttctagttcccgatacagtcccgtcctctcccggtttcctatactcatccggcaggtggcagccgccagccacttccggtaagtggatccagcgcaaagagctgctctggtggtggccaggcttcacattacgggtttatggcgtttgtcttctttcctgatgtaccaaagctctttacccaagatgtgaaaaacaccctggcgacttctgtcatcatttttctaggtcaactattctgcatgaaagcaagatgttgctcaaatgccaaggtgtgtctgaccaagctgtggccgaggccctgtgctctataatgctcttagaagagagttctcctcgccaagccctcacagacttcctgctggccagaaaggcaactattcagaaacttctcaaccagccacaccatggtgggtgtggcttctggccaacatttggtccttaaatatgggatggagaagggtgagctgcgggagactgaagcctccagagcgtcctctgtctttcactttgggaaaggtaattgtttcaaagaggatggtttcttcttttaggtgctggtatcaaggctcagatttgctcattagtggagttgctggccaccactctgaagcaagctcatgcccttttctacactttgccagaaggactgctgccagatccagccctgccatgtggcttgctcttctctactctggagaccatcacaggccagcatcctgccggtgagctcttagccaagctttttaaattctggttcactcaactgataatttgctcagcgtctaccgtgtgccagccaccatgctaggctctggggatggagcagtgaactggacaaatagaggcccttccttcatcgaggccacagttgagtggtagaagcaggtatcagactcacaaatatgcgaatatccatttagtgtctatattggtcattgctagaaaggcttagtacaagttgccttgggaacattgaatggaagtaactcaccaaggtcagagaaggcttccctggagaagcctttaacctgaaagctgaaggttgagtgggagtcacttagatgaagaaggcaagcaacaggctttcaggcaaagggaagaggatgtgcaaagatcctgaggcaagaagaaactgtaagacagccagtgaggcattgggtgagggggagagctgcttgagcagagactggaggtggggccaggggccagataatgcccagccttgtgagcgaggctagggaatttagactttatccaaagaacaatggaagcctcctgggaccttccaggcttggtgcggaccctctgttatgtgtgcccgtgcatcctgtacttttatttggtagcatttatcgcaactgaaatgaaataaatgaatttggcttttaggtggaatagatccccttggggctagaatggatgccaagagctcacttaggaggctgttgccacgatccaggtgtcagccgctgggagcttgggttacgaaggaacaatagagacggagctaattgcatgttcggacgtctgtttaggaggagaggatttggtgacagattggctgtaaggatgtgagaag

SEQ ID NO: 715052 - DNA, 655 bp, Homo sapiens
tgggattacaggcgtgagccaccatgcccggcctcattttgatttttgagctatgtgaatatattacttattcaaagcaataagaatacagcttttcatagtttttgtaacagtttagctagtggggtgtgggctagagtggagggagcagacattagagtgaaatgtgaaggacatttaaaatccttgatcccctacagaagtgtttctcaaaccctgagaggtcctgattcaggaagtccaagttggggtgtgaggcagagggacatctatatttctaatcagcttctgggaggattctgatgcccatagccatggaggactttttgtaagcacaaagcttctcttacaggtgtagagcctacagaagtatggactttggggtcacacaaacctaggttcaaattgtggcttaccctcatcctagctgcatgatgttggtcaagttacctaacctctccaaacacccttttctcaaccgcaaaggatggataacaaagaactgacttyacacgaacatacggaggatgaaatgggataatgcagctaagtattcaataagcattatttattaccttcatctggcaaacacagcagcctttcagcacccaggtactgctctggctctcactctgcctgggcgtgcaaagccaca

SEQ ID NO: 715053 - DNA, 655 bp, Homo sapiens
tgggattacaggcgtgagccaccatgcccggcctcattttgatttttgagctatgtgaatatattacttattcaaagcaataagaatacagcttttcatagtttttgtaacagtttagctagtggggtgtgggctagagtggagggagcagacattagagtgaaatgtgaaggacatttaaaatccttgatcccctacagaagtgtttctcaaaccctgagaggtcctgattcaggaagtccaagttggggtgtgaggcagagggacatctatatttctaatcagcttctgggaggattctgatgcccatagccatggaggactttttgtaagcacaaagcttctcttacaggtgtagagcctacagaagtatggactttggggtcacacaaacctaggttcaaattgtggcttaccctcatcctagctgcatgatgttggtcaagttacctaacctctccaaacacccttttctcaaccgcaaaggatggataacaaagaactgacttcacacgaacatacggaggatgaaatgggataatgcagctaagtattcaataagcrttatttattaccttcatctggcaaacacagcagcctttcagcacccaggtactgctctggctctcactctgcctgggcgtgcaaagccaca

SEQ ID NO: 715054 - DNA, 628 bp, Homo sapiens
tagtgggcattgttgcagtggaggcattgtccacctcctaaaacatctcatcatatgaagcttggttttcctggggagtaccgtctgcatagattccccatgagtggtttttgtttatttgtttttgttttcctttttccccctctagtttaaggggcctgttaggaacactatgaaaagagaggaaaggcaaacatttcgtaagattagaagggaagaaaggagggataggctgggtgcagtggctcatgcctatcatctgtgggaacagagacccttccaggaggccaacccccaactttaggtcacagtgagccttccactcatcataaggtaagttactcagaacaggaaaaaataacacttggaagcaataaatataaatgaattcaatgaaaaacagtttggccaatgatattatytgggagttagagaaatatttctgctttcccctctggtagctgagagagcaaatagccctaatagagaccagcaaataacagcaataaaaactaaagccagtttgcaagactgaagagagatgtcagctccaagaagggaaagagaaagaactggaagtggagcaaagcaaagaaatgtaggcttaagcctatgaggcacaggtggg

SEQ ID NO: 715055 - DNA, 618 bp, Homo sapiens
gtaggcaaatacctcacttttctcaccagcaaaatggagattatagattgcttatttcatccagttgttgtgaggactacatgagtcaatacaggccaagtgcttacactagatactggcatgcttctaaccagtgggaaactcacttgtccttgtcccccttcccagccctctgcaaccatttgtctctttggttctctctcctccctgcaaaaggaaggagtatctcagccattgcctaggcaaatrtcagactggatgaccagatgatgtagttcccttactcgtaggcaccactgactaactactccaaccatctctctgtctctgtctttccctccttgtcttcttcctttccctctccccatcttcctccctctttccttccttcttgtccaacacccccttagtctcctgccctggtggtggtgtgctggggctggagctggggctgctggccagggatggctgcatctccataggtgctggtggggtccttgatgccttggagtcagcagagatcaagagcagacactggagtctgctcaggtggaaatcctgctctgacagtaccatctttatggccttgggaaagtggcttaacctctctcagtctca

SEQ ID NO: 715056 - DNA, 618 bp, Homo sapiens
gtaggcaaatacctcacttttctcaccagcaaaatggagattatagattgcttatttcatccagttgttgtgaggactacatgagtcaatacaggccaagtgcttacactagatactggcatgcttctaaccagtgggaaactcacttgtccttgtcccccttcccagccctctgcaaccatttgtctctttggttctctctcctccctgcaaaaggaaggagtatctcagccattgcctaggcaaatatcagactggatgaccagatgatgtagttcccttactcgtaggcaccactgactaactactccaaccatctctctgtctctgtctttccctccttgtcttcttcctttccctctccccatcttcctccctctttccttccttcttgtccaacacccccttagtctyctgccctggtggtggtgtgctggggctggagctggggctgctggccagggatggctgcatctccataggtgctggtggggtccttgatgccttggagtcagcagagatcaagagcagacactggagtctgctcaggtggaaatcctgctctgacagtaccatctttatggccttgggaaagtggcttaacctctctcagtctca

SEQ ID NO: 715057 - DNA, 582 bp, Homo sapiens
ggaagtagagttcttggtctactgggacacacgcattttgaatttttaggtatgcaagctttattgatcattttaagatgattccttctgagckgttttccaagactggccacagaatcaagaacacccccgagctggaagagatcttgcagaccttctgtcagccccttctttaccacttgggattttgaggtccacagatggataagaccggccgaaataagtcactgagctgggaatagaacaactgaattatggattttgttttatttcaaacaatttaaatttagacatctcactggggccagtggctactgtgttggacagttccatagccttagaagagtgcatcctcaatcttacttaaaacccctaatggcattacctgacaggcaacagagttgaggtcagttttctgcccctattttaggtgtcttttaatatcctttgtttgatttcaatccacttgaaggactttgtttgccgatctgtaaagattgcttacttcctttgctcttctgtgccgcttgcaaacgtctaattttcttatctgcagactagtaatctcttatatttcattca

SEQ ID NO: 715058 - DNA, 582 bp, Homo sapiens
ggaagtagagttcttggtctactgggacacacgcattttgaatttttaggtatgcaagctttattgatcattttaagatgattccttctgagcggttttccaagactggccacagaatcaagaacacccccgagctggaagagatcttgcagaccttctgtcagccccttctttaccasttgggattttgaggtccacagatggataagaccggccgaaataagtcactgagctgggaatagaacaactgaattatggattttgttttatttcaaacaatttaaatttagacatctcactggggccagtggctactgtgttggacagttccatagccttagaagagtgcatcctcaatcttacttaaaacccctaatggcattacctgacaggcaacagagttgaggtcagttttctgcccctattttaggtgtcttttaatatcctttgtttgatttcaatccacttgaaggactttgtttgccgatctgtaaagattgcttacttcctttgctcttctgtgccgcttgcaaacgtctaattttcttatctgcagactagtaatctcttatatttcattca

SEQ ID NO: 715059 - DNA, 1723 bp, Homo sapiens
aggtcttgaagaagctgggccacccataaaagaaaagccctccgatcaggaaagccacgtcagctgcacgtggctgaggatggaggctccttacgctcctacagggtgggcgaggtgaggtgtcygatgacacccagatgtgttatgacccgtgccgcgtgacagctcgtggtgtgccagccacggaattcactggtttcctatccatgggataagaacacacttgggagtttcagtgcttctcaaaaggaaagaagaaaggaccccaccttcccccaggttagcacaggtgacgtcctcgtgagagtgatgacagtgcaggggcacttcctgtgggatcggaagaaagagcagggcggacacaaggtctccaagtcctatgtacacattttacaaagtttccacacttcctccattaggcacgaggttgatttgtctagcttaggagggggtggacagagaagggcagagggagggagtgcactgtggggggaagagagggaggtgggagcaagagaggagaacgtgggtctcctctagggcaaccggcccccctccagtcctcaccgtaagctagtttgtttggagagcttagcacccatcaagatgcccgaggtgagagtcacaggagctttcatctgcatgctagatcccaccatggtggggaagctgcgattccgccggatgccactattgagctgcagcccaccgatggcactggtgacagtggggcatctgaggggcaggccctcaggtaccaggcctctgggaacaagggctggtgctggccccgggggcccacagaggaggggtccctgctcctcagtcaaggtggggacatgggctcgccctgagttcaccactttggccaccccaaacctcctgactttgtccacgaggttgaggttggagacggacacgtcggtctggctctcgctgctgcggacgttcttttctctcacttccctcaggatggagctggctggcttggaagccaggaaattgtcgtagggagggctcgtgcacttgaactcaaaggagggtggggaggatgtgggtgtctgcataggcgagttcggcggagtagaggggatcacagccatcttgggcgtgtaggagtgcaggagggagccccggccggccctgtcccagctctgggggtcgtacacggcagcagaaatgccccgctccttcaacagccacacgagccccagggatgtgctcatggtggtcgtggactcacgggtgttagtgaaggactcagccaggctcagtctccgtggagtgcatggtgtggccaccggcgtggatttcaagtggctggtgctgccacaagctggagttggggctgagttaaggctgaaagaagaaatgacaggttattcaccagaaatgcccatgagctccagagaaagggtcagtggccagtttcctgcagggggggtagggacgacccaggacacgatgagagggttccaccagctgaggcccccaaaggctctgtccacgtctgctcctccctctcacccttcaagggaagcatggtttaagttaacaggaagctgcacatgatcccctttgcccatccctggttggtgggtacagttgtcccctttgcagatgaagaaacaggctcagagctaagggtttacttggtgtcacatctggctgttaagtggacaacccaagttgagggactctaaatctgttagagaacgggaaa

SEQ ID NO: 715060 - DNA, 1448 bp, Homo sapiens
cattcactcgtgttgtgctcactagggacttgctaggttccagcagttgggatccagtcgtggagtccattaggacagaaaagtttccagaagggcagcagaggggaatgcattgttgtctgcttaaaaagcaggaaaggttcttttttttttttataattgcaattacttttgcaccaacctaataattcagtatccctaaaaactgtcaaaaattgccaatgctgcctctatctcaagtcgtcacggcggggtattggggaaaattttcaactagtaataaacctcattggctatgatactgccactgtgcaaagcttggaaaggttctcttttaacagctgctacrgggatccaggggaggccaaacaggcatggaagccctatactgcttctcaatgagcaaccaaggggcaaagatgcacagccctcctaacagtctcgtgggacatgccctggtgccggctccaggattttgctggggctgccagtgtgccttggagcaggtcagctgcatggtccctaggagctggggatggagacttctctccccagtctggcagaaggaagtccatgtactctgagaaaggcaccaaaggagggaatgggaaggaaaagggcccattctggagcaggtctttgcgatgaccagagaaggggccccctccctcgtgggaaacacgaggttcaaagcaacgtacaagctaggggaaccaactggccccacattcaggtgacctcagccctgggaggtcagcacagggtggggatcccagaacaggcccatctcacacaagctcaggggtggggatgctggtgggctgggggactcggaaaagcatgattagaaaccacaacaaattcctaaggttaaacatggattttttcagaaggcatttgtggagttttacaaatgttgatgtaccctcagtaaagggcaaaaatgctctagacttaaaatcatgttgatgtggccatccctagggagattttgtttccatttaaaaaagattcaattgatttgtttccattttatttcaagcagcctttctttcaaactcaagccaaaaaaaaaaaaaaaaaaaaaagagccttctcttgctactgacttcccaggctttgttcggccctgacacagccacatgaaaacctgtgtttggtttgagtcctatggctacagtcaggagtgccatctagttacccagggcaccagcctctcatagggagaagcttggttccatggttttgaaaacaatctcttcccaacataaagccacaggatgaggaagccaagttctccaggggcagagagacggaggagacaaagctaatatttatgatccccgtctggtgagaacttagggttaggcctttattagtgctggcactcggcttgactgggggtgtttagctgggttaggggcatcgaccatcaaggccgagttagc

SEQ ID NO: 715061 - DNA, 1448 bp, Homo sapiens
cattcactcgtgttgtgctcactagggacttgctaggttccagcagttgggatccagtcgtggagtccattaggacagaaaagtttccagaagggcagcagaggggaatgcattgttgtctgcttaaaaagcaggaaaggttcttttttttttttataattgcaattacttttgcaccaacctaataattcagtatccctaaaaactgtcaaaaattgccaatgctgcctctatctcaagtcgtcacggcggggtattggggaaaattttcaactagtaataaacctcattggctatgatactgccactgtgcaaagcttggaaaggttctcttttaacagctgctacagggatccaggggaggccaaacaggcatggaagccctatactgcttctcaatgagcaaccaaggggcaaagatgcacagccctcctaacagtctcgtgggacatgccctggtgccggctccaggattttgctggggctgccagtgtgccttggagcaggtcagctgcatggtccctaggagctggggatggagacttctctccccagtctgrcagaaggaagtccatgtactctgagaaaggcaccaaaggagggaatgggaaggaaaagggcccattctggagcaggtctttgcgatgaccagagaaggggccccctccctcgtgggaaacacgaggttcaaagcaacgtacaagctaggggaaccaactggccccacattcaggtgacctcagccctgggaggtcagcacagggtggggatcccagaacaggcccatctcacacaagctcaggggtggggatgctggtgggctgggggactcggaaaagcatgattagaaaccacaacaaattcctaaggttaaacatggattttttcagaaggcatttgtggagttttacaaatgttgatgtaccctcagtaaagggcaaaaatgctctagacttaaaatcatgttgatgtggccatccctagggagattttgtttccatttaaaaaagattcaattgatttgtttccattttatttcaagcagcctttctttcaaactcaagccaaaaaaaaaaaaaaaaaaaaaagagccttctcttgctactgacttcccaggctttgttcggccctgacacagccacatgaaaacctgtgtttggtttgagtcctatggctacagtcaggagtgccatctagttacccagggcaccagcctctcatagggagaagcttggttccatggttttgaaaacaatctcttcccaacataaagccacaggatgaggaagccaagttctccaggggcagagagacggaggagacaaagctaatatttatgatccccgtctggtgagaacttagggttaggcctttattagtgctggcactcggcttgactgggggtgtttagctgggttaggggcatcgaccatcaaggccgagttagc

SEQ ID NO: 715062 - DNA, 978 bp, Homo sapiens
tttttttttttttagcaggtctcattctgtgccagactggctcagtgtatgtcatggctcctgcagctcgaccttaggctcaagggtcttccgctcagcctctaagtagttggcaccacaggcacatgccaccatgcctcgctaatttttttattttttgtagagacagggtctcactatgttgtccaggctggtctcaaactcctgggctcaagcaatccacccacttcagcctcccaaagtgctgggattacaggtgtgagccaccatgcctggtcccatcagtaattttttttttttttccagacagagtctcactctctctcccaggctggagtgcagtggtgcgatctctgcttgctgcaacctccgcctcctgggttcaaactattctcctgcctcagcctcccaagtaactggattacaggcgcccgccaccacgcctggctaattttgtatttttagtaaagatggggtttcaccatgttagtcaagctggtctcaaactcctgacctcaactgatccactcgcctcggcctcccaaagtgttgggattatgaaygggcatgagccacagaacccggcccccatcggtaatttttaaagctccagtttttaaagcccaatgtttactttgatcatttggtttcctcactgtgaagctattatttttccctttgttattcaacagtgtttcatggtgatatatttcatggtgatatactttgagaccaccagttttaataagtcttgtcttagtcatttatgtggatggatgggaaagtggtgaatttctaatttctaattccatcattccaacacttattagttggctttttattgtaataactttttcttccctcccgttatttagtcattcatttatttttatcagtatagactcacggattcttcctttattctataagtcataatccttgactactattatttattttgatgttcaaattgcccca

SEQ ID NO: 715063 - DNA, 653 bp, Homo sapiens
tcagagttggggaggtatccccgaagattagttcctgaaacagatatattttcaatacacgatttttttagtcatgagacctagctcaaagacatatgtcaattttgtatgtgtagaaaacttagtggaatttccagggacatgctagagcctcctgatttattattcatagaatttaagcttgttacaagcaagccccacttaccagaaggcaggaggctatttgctgtgatcagaaacrtgatggttagaaggcttcttttttgggtctttttttttcctgaacatgtattaaaatattattatttgtcctggaatttttcaaagtccacatagccaatatcatctgccaatatctggaatgattagactgaaaaaagggaagtaactatggtcatggtgaagtgtttccttttcctaacgatgaatttctttagaatatcttgtcatagtttgggttcctacaaaagcagagcctgggacagcacctggttacaggtaatttatttgagagtgattccaagggagcaggagtaagggagaagggaagagagaagacagtgaagtattgagtacagtggatgactgctgtggacccaatcccctggggactctctgagatacctcttggaacatggctcatagccagccta

SEQ ID NO: 715064 - DNA, 2779 bp, Homo sapiens
  misc_feature 1173, 1174, 1175, 1176, 1177, 1178, 1179, 1180, 1181, 1182,1183, 1184, 1185, 1186, 1187, 1188, 1189, 1190, 1191, 1192,1193, 1194, 1195, 1196, 1197, 1198, 1199, 1200, 1201, 1202,1203, 1204, 1205, 1206, 1207, 1208, 1209, 1210, 1211: n = A,T,C or G
  misc_feature 1212, 1213, 1214, 1215, 1216, 1217, 1218, 1219, 1220, 1221,1222, 1223, 1224, 1225, 1226, 1227, 1228, 1229, 1230, 1231,1232, 1233, 1234, 1235, 1236, 1237, 1238, 1239, 1240, 1241,1242, 1243, 1244, 1245, 1246, 1247, 1248, 1249, 1250: n = A,T,C or G
  misc_feature 1251, 1252, 1253, 1254, 1255, 1256, 1257, 1258, 1259, 1260,1261, 1262, 1263, 1264, 1265, 1266, 1267, 1268, 1269, 1270,1271, 1272: n = A,T,C or G
tgcataggttataagcaaacactatgcccttttatatcagagacttaggcattgaaggatttggtatctgcagggggtcctggaaccaatccccctcagatactcagggatgactgtaatttcaaagccatactgagaaaaagtcagatgcaggctctgtgacttgtttttggccatgaccctctcccctctggcaatccaggcaagtctgtggactccttcctggaataatatttttaggcaaataaaattatgattataaaagaaggcagatatgtatcaatataacaacgtgtgtgtgtgtgtgtgtgtgtgtgtgtgtgtgtgtgagagagagagagagagagaaagagagagagagagagagagagagaggagaagggagagagaaattagctcaggactgttctctgctgtcattttgaaggggagatcaccctctgtggtgttgtgaggcagctgtaacaactgaaatgtgccatagggccaggcgcggcggctcatgcctgtaatcctagcactttgggaggccgagacgggtggatcacctgaggtaaggaattcgagaccagcttggccaacatggtgaaaccccatctctactaaaaatacaaaaaaaaaaaaaaattagccgggcgtggtggcacatgcctgtagtcccagctacttgggaggttgaggcaggagaatcgcttgaactcaggagagggaggttgcagtgagccaagatcgcaccactgcactccagcctggatgacagagcaagactccgtctcaaaaaaaaaaaaaaaagaagaagagaaaaagaaatgtgccataaaaatacctgtgatttctaatgatgacaaagtcacaagcagtgctaatatcactgtgacctggtgaccttcatacaggaaggaaatattgagtacaattaggaactaatttcacaggccccccccaaatttcgtctgtggatcccagatgaactcctgccattgggcaagagaattgggaacatagttgtgcaaaaactgctactcactgttttattcagcgattagaatggctaggagcaaaagaggcagatctgggcgttctgcatgatgcaatctttagactgctttaaatacctttaatgcataatacactttaaaaatagccatcttcaaaatgataactactacagcnnnnnnnnnnnnnnnnnnnnnnnnnnnnnnnnnnnnnnnnnnnnnnnnnnnnnnnnnnnnnnnnnnnnnnnnnnnnnnnnnnnnnnnnnnnnnnnnnnnnccatcactttttacggtggacggcccatgttcagtcatggaagctgcatttatcatacaccctgacttccccgttccacgtacagttctgtcctcatgtcatgtgtatttaccagggtcctcactcactttcccagtgctgacatagagtaggggcttacatctgatgtatggaattgatcaaagcctgattcctatgggccacaagagatggacgggcctccctctgaatcacacaaagaattggaaggggcttattggaaagctagcctcgggactgtctgcatgtcactcagctagtgggctgctgaatcaccttattcctggagaaagactttggtgctgagaaaacagtgactttcttagctcttgctaaaactgaagggtttagctcttttaaactttaaaatgtggaataggcagtacagctaggaagctgaatggcttccaggccctcctggggggagcaggactagatagagtctcagccctgctgttgcgtagatatgcaactgcatgtaggttactcaggcttttagagccccagcttccacactggcaaaatgggtataataatattcactgtgcagggctgttgtactgagaaagacaatatagatgtagcattgaagctttgctgggcatgggggaggcgcacactaaatgcctctagatatctttacccactgccctccaatagaattgtttcttcttgggccattgaaagtgctgcagatatttcctaatgataaactcttaagtactgctcaaagaatgcattgtcttgtttagaacttttaagaataatatatactatagtggagcaaaaatctgatatgatctcaaaatatgtaaaatattcaaaatatgtaaaatattctatatactgcacatatagaaactgtgcagtatctatatgtgtaagtatttagtcctagttcatgtttgtcacatagaagagtttgcttgttttttagctagagttgatcctaggtgttggcatctaaatttccaagtgattgctattccctcctgggtttgtttggcacaattggctgaaggcaaagggagaggggggctgagaagagggactagaaagaactttccagytaagatttatgctataagagccattgtctagtattggttctaggaaataatttggtaatgagcttttttttttttcttttttttccctagagcaattttggaaccaagactcaattcggcacatttcaggcctttttgcagatatcctcagcctacatagaagaaaaaccagggtctttcctaaattggaggaggggagtccaggtccacagttaaatgaaaagcctaggatatttcagactggtctggctgaaattcagcctgtatctggggacagatactaaattattttcaggcagagaatcagcaggaactcaaaagctttcagactttctctctccatctgagaagtatttctatctttttcaatttaattagcaggaaagcaaaacacaagg

SEQ ID NO: 715065 - DNA, 2779 bp, Homo sapiens
  misc_feature 1173, 1174, 1175, 1176, 1177, 1178, 1179, 1180, 1181, 1182,1183, 1184, 1185, 1186, 1187, 1188, 1189, 1190, 1191, 1192,1193, 1194, 1195, 1196, 1197, 1198, 1199, 1200, 1201, 1202,1203, 1204, 1205, 1206, 1207, 1208, 1209, 1210, 1211: n = A,T,C or G
  misc_feature 1212, 1213, 1214, 1215, 1216, 1217, 1218, 1219, 1220, 1221,1222, 1223, 1224, 1225, 1226, 1227, 1228, 1229, 1230, 1231,1232, 1233, 1234, 1235, 1236, 1237, 1238, 1239, 1240, 1241,1242, 1243, 1244, 1245, 1246, 1247, 1248, 1249, 1250: n = A,T,C or G
  misc_feature 1251, 1252, 1253, 1254, 1255, 1256, 1257, 1258, 1259, 1260,1261, 1262, 1263, 1264, 1265, 1266, 1267, 1268, 1269, 1270,1271, 1272: n = A,T,C or G
tgcataggttataagcaaacactatgcccttttatatcagagacttaggcattgaaggatttggtatctgcagggggtcctggaaccaatccccctcagatactcagggatgactgtaatttcaaagccatactgagaaaaagtcagatgcaggctctgtgacttgtttttggccatgaccctctcccctctggcaatccaggcaagtctgtggactccttcctggaataatatttttaggcaaataaaattatgattataaaagaaggcagatatgtatcaatataacaacgtgtgtgtgtgtgtgtgtgtgtgtgtgtgtgtgtgtgagagagagagagagagagaaagagagagagagagagagagagagaggagaagggagagagaaattagctcaggactgttctctgctgtcattttgaaggggagatcaccctctgtggtgttgtgaggcagctgtaacaactgaaatgtgccatagggccaggcgcggcggctcatgcctgtaatcctagcactttgggaggccgagacgggtggatcacctgaggtaaggaattcgagaccagcttggccaacatggtgaaaccccatctctactaaaaatacaaaaaaaaaaaaaaattagccgggcgtggtggcacatgcctgtagtcccagctacttgggaggttgaggcaggagaatcgcttgaactcaggagagggaggttgcagtgagccaagatcgcaccactgcactccagcctggatgacagagcaagactccgtctcaaaaaaaaaaaaaaaagaagaagagaaaaagaaatgtgccataaaaatacctgtgatttctaatgatgacaaagtcacaagcagtgctaatatcactgtgacctggtgaccttcatacaggaaggaaatattgagtacaattaggaactaatttcacaggccccccccaaatttcgtctgtggatcccagatgaactcctgccattgggcaagagaattgggaacatagttgtgcaaaaactgctactcactgttttattcagcgattagaatggctaggagcaaaagaggcagatctgggcgttctgcatgatgcaatctttagactgctttaaatacctttaatgcataatacactttaaaaatagccatcttcaaaatgataactactacagcnnnnnnnnnnnnnnnnnnnnnnnnnnnnnnnnnnnnnnnnnnnnnnnnnnnnnnnnnnnnnnnnnnnnnnnnnnnnnnnnnnnnnnnnnnnnnnnnnnnnccatcactttttacggtggacggcccatgttcagtcatggaagctgcatttatcatacaccctgacttccccgttccacgtacagttctgtcctcatgtcatgtgtatttaccagggtcctcactcactttcccagtgctgacatagagtaggggcttacatctgatgtatggaattgatcaaagcctgattcctatgggccacaagagatggacgggcctccctctgaatcacacaaagaattggaaggggcttattggaaagctagcctcgggactgtctgcatgtcactcagctagtgggctgctgaatcaccttattcctggagaaagactttggtgctgagaaaacagtgactttcttagctcttgctaaaactgaagggtttagctcttttaaactttaaaatgtggaataggcagtacagctaggaagctgaatggcttccaggccctcctggggggagcaggactagatagagtctcagccctgctgttgcgtagatatgcaactgcatgtaggttactcaggcttttagagccccagcttccacactggcaaaatgggtataataatattcactgtgcagggctgttgtactgagaaagacaatatagatgtagcattgaagctttgctgggcatgggggaggcgcacactaaatgcctctagatatctttacccactgccctccaatagaattgtttcttcttgggccattgaaagtgctgcagatatttcctaatgataaactcttaagtactgctcaaagaatgcattgtcttgtttagaacttttaagaataatatatactatagtggagcaaaaatctgatatgatctcaaaatatgtaaaatattcaaaatatgtaaaatattctatatactgcacatatagaaactgtgcagtatctatatgtgtaagtatttagtcctagttcatgtttgtcacatagaagagtttgcttgttttttagctagagttgatcctaggtgttggcatctaaatttccaagtgattgctattccctcctgggtttgtttggcacaattggctgaaggcaaagggagaggggggctgagaagagggactagaaagaactttccagctaagatttatgctataagagccattgtctagtattgkttctaggaaataatttggtaatgagcttttttttttttcttttttttccctagagcaattttggaaccaagactcaattcggcacatttcaggcctttttgcagatatcctcagcctacatagaagaaaaaccagggtctttcctaaattggaggaggggagtccaggtccacagttaaatgaaaagcctaggatatttcagactggtctggctgaaattcagcctgtatctggggacagatactaaattattttcaggcagagaatcagcaggaactcaaaagctttcagactttctctctccatctgagaagtatttctatctttttcaatttaattagcaggaaagcaaaacacaagg

SEQ ID NO: 715066 - DNA, 640 bp, Homo sapiens
aagtacttgttaaatgtaacttgaaagcagatttgaaaattttccccttttaaatttattttcccagagtcctaataaatgaaagctgggctgctgtctaggtttccaagccactagagcctgattgttttctatttgtttcagtgtttgaagccagcaaaagctgcwttaaaactgacggtgccaagtagtaacaagcacactttaagcatagctaatgtatgaacccatagccccaggttataatatttcaaatacaacagaatgtagaggctaggctctttgtcatagcattttataaacaaagcatttttaaatatagtagacttatgaaaacaaaaaacctcactaataagtaaaaacagaatggtaactgtgtcatatgctctctgtctttttgcatttctgtcacatatgtatttcttatacccttatctaacataaatgaatgcttcaatacaaatgtattctctctctctctttttacttggataacacactcacataaagttggttctattgctttctctctaactctctaaaatatttttcattatagtcattcacatctctgccagttactttagggacaacaaaacaattattgcctgctctttccaccccaaaacatgaaaaatat

SEQ ID NO: 715067 - DNA, 1072 bp, Homo sapiens
taagattattcaccagaataattaaataaataaaaaatactaggggtctctaagtcagtaaataaccgaccaagagaaaaacaaaacaaaatataattgtccatctaaaacagggaattggaaatgggaccaagagttattaatgatgataatgatgatgatgcctgcttaccaagcatctaccatatatcaggtactctagatctagtttattgtgttttatttcttttttttaaacaaagmagatactattcttaattgtatacaagaagcagctgagcttccagaaatgtaactttcccaatgatacataattgctaacttctacaagcacaggctaattttgagaaaagcacatttgagccattgtactacactatttactgtcacttggaacaaatacttattttggcctccatttctttataaaacaagaaaattctacattctacttaacggatatgtgtaaaatacatttaaaaaaacttctaattataatatcttcctacagagccgtggtcctcaagctttggtgtacataagactccaggaagagtatttttgaaaatatctcccgttcagcacttactaccagagattctgattcaggaagtcttgtgtgggaactagtaatctgcattctcttatgtcaattcaggcgtaaacgtagtcccactcacctagtgattaagaataagattagacttaagaaaagtattacgaaaaagattcactttgtgcctccaggaacaaagatcccaatccctaaaccttgtcttgaacaggtgcatcctgtaacagattaattgcacagctgtttgaatcagaaaagctccagagtatttgttctgagtgaaaagaaaagttatggcatatgttggaataaaaatccaattgtggtaaataagtaacaaattgatccattgattatacttcacaattaatactacccatgttccaaggcagcggtccccaacgtttttggcaccagggaccaattttggggaaaacaatttttccacagaagtagtcagggttagtgggtgaattaggggctggggggcgggaggtg

SEQ ID NO: 715068 - DNA, 1072 bp, Homo sapiens
taagattattcaccagaataattaaataaataaaaaatactaggggtctctaagtcagtaaataaccgaccaagagaaaaacaaaacaaaatataattgtccatctaaaacagggaattggaaatgggaccaagagttattaatgatgataatgatgatgatgcctgcttaccaagcatctaccatatatcaggtactctagatctagtttattgtgttttatttcttttttttaaacaaagaagatactattcttaattgtatacaagaagcagctgagcttccagaaatgtaactttcccaatgatacataattgctaacttctacaagcacaggctaattttgagaaaagcacatttgagccattgtactacactatttactgtcacttggaacaaatacttattttggcctccatttctttataaaacaagaaaattctacattctacttaacggatatgtgtaaaatacatttaaaaaaacttctaattataatatcttcctacagagcmgtggtcctcaagctttggtgtacataagactccaggaagagtatttttgaaaatatctcccgttcagcacttactaccagagattctgattcaggaagtcttgtgtgggaactagtaatctgcattctcttatgtcaattcaggcgtaaacgtagtcccactcacctagtgattaagaataagattagacttaagaaaagtattacgaaaaagattcactttgtgcctccaggaacaaagatcccaatccctaaaccttgtcttgaacaggtgcatcctgtaacagattaattgcacagctgtttgaatcagaaaagctccagagtatttgttctgagtgaaaagaaaagttatggcatatgttggaataaaaatccaattgtggtaaataagtaacaaattgatccattgattatacttcacaattaatactacccatgttccaaggcagcggtccccaacgtttttggcaccagggaccaattttggggaaaacaatttttccacagaagtagtcagggttagtgggtgaattaggggctggggggcgggaggtg

SEQ ID NO: 715069 - DNA, 1072 bp, Homo sapiens
taagattattcaccagaataattaaataaataaaaaatactaggggtctctaagtcagtaaataaccgaccaagagaaaaacaaaacaaaatataattgtccatctaaaacagggaattggaaatgggaccaagagttattaatgatgataatgatgatgatgcctgcttaccaagcatctaccatatatcaggtactctagatctagtttattgtgttttatttcttttttttaaacaaagaagatactattcttaattgtatacaagaagcagctgagcttccagaaatgtaactttcccaatgatacataattgctaacttctacaagcacaggctaattttgagaaaagcacatttgagccattgtactacactatttactgtcacttggaacaaatacttattttggcctccatttctttataaaacaagaaaattctacattctacttaacggatatgtgtaaaatacatttaaaaaaacttctaattataatatcttcctacagagccgtggtcctcaagctttggtgtacataagactccaggaagagtatttttgaaaatatctcccrttcagcacttactaccagagattctgattcaggaagtcttgtgtgggaactagtaatctgcattctcttatgtcaattcaggcgtaaacgtagtcccactcacctagtgattaagaataagattagacttaagaaaagtattacgaaaaagattcactttgtgcctccaggaacaaagatcccaatccctaaaccttgtcttgaacaggtgcatcctgtaacagattaattgcacagctgtttgaatcagaaaagctccagagtatttgttctgagtgaaaagaaaagttatggcatatgttggaataaaaatccaattgtggtaaataagtaacaaattgatccattgattatacttcacaattaatactacccatgttccaaggcagcggtccccaacgtttttggcaccagggaccaattttggggaaaacaatttttccacagaagtagtcagggttagtgggtgaattaggggctggggggcgggaggtg

SEQ ID NO: 715070 - DNA, 1072 bp, Homo sapiens
taagattattcaccagaataattaaataaataaaaaatactaggggtctctaagtcagtaaataaccgaccaagagaaaaacaaaacaaaatataattgtccatctaaaacagggaattggaaatgggaccaagagttattaatgatgataatgatgatgatgcctgcttaccaagcatctaccatatatcaggtactctagatctagtttattgtgttttatttcttttttttaaacaaagaagatactattcttaattgtatacaagaagcagctgagcttccagaaatgtaactttcccaatgatacataattgctaacttctacaagcacaggctaattttgagaaaagcacatttgagccattgtactacactatttactgtcacttggaacaaatacttattttggcctccatttctttataaaacaagaaaattctacattctacttaacggatatgtgtaaaatacatttaaaaaaacttctaattataatatcttcctacagagccgtggtcctcaagctttggtgtacataagactccaggaagagtatttttgaaaatatctcccgttcagcacttactaccagagattctgattcaggaagtcttgtgtgggaactagtaatctgcattctcttatgtcaattcaggcgtaaacgtagtcccactcacctagtgattaagaataagattagacttaagaaaagtattacgaaaaagattcactttgtgcctccaggaacaaagatcccaatccctaaaccttgtcttgaacaggtgcatcctgtaacagattaattgcacagctgtttgaatcagaaaagctccagagtatttgttctgagtgaaaagaaaagttatggcrtatgttggaataaaaatccaattgtggtaaataagtaacaaattgatccattgattatacttcacaattaatactacccatgttccaaggcagcggtccccaacgtttttggcaccagggaccaattttggggaaaacaatttttccacagaagtagtcagggttagtgggtgaattaggggctggggggcgggaggtg

SEQ ID NO: 715071 - DNA, 1072 bp, Homo sapiens
taagattattcaccagaataattaaataaataaaaaatactaggggtctctaagtcagtaaataaccgaccaagagaaaaacaaaacaaaatataattgtccatctaaaacagggaattggaaatgggaccaagagttattaatgatgataatgatgatgatgcctgcttaccaagcatctaccatatatcaggtactctagatctagtttattgtgttttatttcttttttttaaacaaagaagatactattcttaattgtatacaagaagcagctgagcttccagaaatgtaactttcccaatgatacataattgctaacttctacaagcacaggctaattttgagaaaagcacatttgagccattgtactacactatttactgtcacttggaacaaatacttattttggcctccatttctttataaaacaagaaaattctacattctacttaacggatatgtgtaaaatacatttaaaaaaacttctaattataatatcttcctacagagccgtggtcctcaagctttggtgtacataagactccaggaagagtatttttgaaaatatctcccgttcagcacttactaccagagattctgattcaggaagtcttgtgtgggaactagtaatctgcattctcttatgtcaattcaggcgtaaacgtagtcccactcacctagtgattaagaataagattagacttaagaaaagtattacgaaaaagattcactttgtgcctccaggaacaaagatcccaatccctaaaccttgtcttgaacaggtgcatcctgtaacagattaattgcacagctgtttgaatcagaaaagctccagagtatttgttctgagtgaaaagaaaagttatggcatatgttggaataaaaatccaattgtggtaaataagtaacaaattgatccattgattatacttcacaattaatactacccatgttccaaggcagcggtccccaacgtttttggcascagggaccaattttggggaaaacaatttttccacagaagtagtcagggttagtgggtgaattaggggctggggggcgggaggtg

SEQ ID NO: 715072 - DNA, 1072 bp, Homo sapiens
taagattattcaccagaataattaaataaataaaaaatactaggggtctctaagtcagtaaataaccgaccaagagaaaaacaaaacaaaatataattgtccatctaaaacagggaattggaaatgggaccaagagttattaatgatgataatgatgatgatgcctgcttaccaagcatctaccatatatcaggtactctagatctagtttattgtgttttatttcttttttttaaacaaagaagatactattcttaattgtatacaagaagcagctgagcttccagaaatgtaactttcccaatgatacataattgctaacttctacaagcacaggctaattttgagaaaagcacatttgagccattgtactacactatttactgtcacttggaacaaatacttattttggcctccatttctttataaaacaagaaaattctacattctacttaacggatatgtgtaaaatacatttaaaaaaacttctaattataatatcttcctacagagccgtggtcctcaagctttggtgtacataagactccaggaagagtatttttgaaaatatctcccgttcagcacttactaccagagattctgattcaggaagtcttgtgtgggaactagtaatctgcattctcttatgtcaattcaggcgtaaacgtagtcccactcacctagtgattaagaataagattagacttaagaaaagtattacgaaaaagattcactttgtgcctccaggaacaaagatcccaatccctaaaccttgtcttgaacaggtgcatcctgtaacagattaattgcacagctgtttgaatcagaaaagctccagagtatttgttctgagtgaaaagaaaagttatggcatatgttggaataaaaatccaattgtggtaaataagtaacaaattgatccattgattatacttcacaattaatactacccatgttccaaggcagcggtccccaacgtttttggcaccagggaccaattttggggaaaacaatttttccacagaagtagkcagggttagtgggtgaattaggggctggggggcgggaggtg

SEQ ID NO: 715073 - DNA, 1766 bp, Homo sapiens
aattaaaatcagtcacctgtatttatatagcatgaaaatgaaaaggacctcattttctcttcttatctttaacagctgcttaatggagataatcagtattataaaaagtattgctactgtttgccaaataaacaatttcatgatcatcagccttaactataaacctaaagtctaggtacaacatagacataagaaaaaaaaaaaccctatatgaatctttgaaatttgtagcaaaaataaattaaataaaaataaatcataaaagccctacggaaggtcaacagaaaagcagaagcaatgggttgttttggttcacttaaaaataagaaatcatggggctgggcgcggtggctcacgcctgtaatcccagcactttgggaggccgaggtgggtggatcacaaggtcaggagtttgagaccagcctggccaacatggtgaaagcctgtctccactaaagatacaaaaattagctgggcatggtggcgcacacctgtaatcccagctactcgggaggcagaggcaggagaattacttgaaccaggaggtggaggttgcagtgagccaagatcgtgccactgcactccagcccaggtgacagagcaagacttcatctcaaaaataaataaataaataagaaatcactagttgaaccaaaaaaaatttaccagatataaatgatgggaataagacaaaagaaaattcaatacattttacttaagtatgtatttaatttagtaaattccatcaaaagatgtgtatgtcatgtcatgatcatatttattttcattttccctggtaagttatttgttgcataactacagtcacagatttgcatgtggtttacgacaaaatgaagaagtagagtgacactggtaaatgtgtacagagcaaaagcagatttctcaggccaaatgaaatatttatcggccaaatgagtttagataactatgtgcaaggccagatccataaggcttcaaaattttggatctcaatgctgagagatcatttcagaagactctgtgaaatcagcagcatatgcctttttaagcctttcttgaaaaaaagaccactctatctgttgcttctcagaaacacacacccaaatactcaacaaatcggtcttggatttattcagctaatactgtagaagaatggtattgcataaataaaccatagcaccatgatctcaagcagcctaagctaatcatgggtcctgccaaattcaatatataaataaayaaaagctaacagaataccaaacaaatattcagtgagatacaattcaaccctggaattaaggttttttaaaaaagtacattgtcctcaggcaaacttacaaaaaaattcgatttccttctggcaaatttataagggagggaagaaagaatcttttaagacttcatggtgggagtcaccacatttaggaatttgctgaagccatgattccaaaacaatgagagcttttagcaaaatccagatttttagcacacatctaagactaatagtagtcaattctgaacttcagtttcctctataaatcgtccatttgacagcttcatttgtaaatctgatatcccactcagcctcagcaggtgattttcgaaccctctctgggatggttaatactgaatgttaacttgattggattgagggatacagagtattaatcctgggtgtgtctgtgtggacgttgcccaaaagagattaatatttgagtcagtgggctggggaaggcagagccacccttaacctgatgggcacaatc

SEQ ID NO: 715074 - DNA, 871 bp, Homo sapiens
cttcactaatttttaggagggtctttggggaccctaggaacaaatggaccagaaagaagataaaatgattcagaaatataaggaaatagaattggactgaaaaaagtccttacatagacttaaatgtcagcaacaacataaatctactgaattctcctcttgactctctgtggaatcctgatgttccaatagagttttacagtcctgatatgagagtagtgctagagggagaactgtctccagcccgtgytgggtatgtgccagaaacctccagccacggggaagctggagcttaatatgacccactcccattcctcaaggaactattgaagtaatcatccctggggcttccatggcaaatgtccttttcttgtggctaatctgggttattcatcaaatggctaaaggtgaatacatgggcctaagtccaaccgagtttcctgactagttttccaaatggttcaaatctactgatgcaattcctagcacagaattgcctcagatgtccattaaacccctgccagtgatatagcctgtctatttcagggcactgtatgtttaacccaaggtgcaggtaatgcatattcccaagtatagcccaaccatatcacatttctttcctccaagtcataatgtcactctctgaatgactaatgtaaaccgaggggtatagaatagccctgtgcaactgaatctttttttcccggttggttcttagatatcttgcttcttaggttattactgcaaaggtaggctgtactgggggaaaataaatgacagagaagagaggagataatgggaaatgtatagaaaatgctactaaggaaatgtagtgaactaggttggtgagttatttagtcagaaagacttt

SEQ ID NO: 715075 - DNA, 871 bp, Homo sapiens
cttcactaatttttaggagggtctttggggaccctaggaacaaatggaccagaaagaagataaaatgattcagaaatataaggaaatagaattggactgaaaaaagtccttacatagacttaaatgtcagcaacaacataaatctactgaattctcctcttgactctctgtggaatcctgatgttccaatagagttttacagtcctgatatgagagtagtgctagagggagaactgtctccagcccgtgttgggtatgtgccagaaacctccagccacrgggaagctggagcttaatatgacccactcccattcctcaaggaactattgaagtaatcatccctggggcttccatggcaaatgtccttttcttgtggctaatctgggttattcatcaaatggctaaaggtgaatacatgggcctaagtccaaccgagtttcctgactagttttccaaatggttcaaatctactgatgcaattcctagcacagaattgcctcagatgtccattaaacccctgccagtgatatagcctgtctatttcagggcactgtatgtttaacccaaggtgcaggtaatgcatattcccaagtatagcccaaccatatcacatttctttcctccaagtcataatgtcactctctgaatgactaatgtaaaccgaggggtatagaatagccctgtgcaactgaatctttttttcccggttggttcttagatatcttgcttcttaggttattactgcaaaggtaggctgtactgggggaaaataaatgacagagaagagaggagataatgggaaatgtatagaaaatgctactaaggaaatgtagtgaactaggttggtgagttatttagtcagaaagacttt

SEQ ID NO: 715076 - DNA, 3554 bp, Homo sapiens
ccaagaacctcccccttcctcccatcttcccctccccttgccacttcccttccagctccaagttagagagatagaaagaatggtgcaagcaagggcagcatgcagggccaaggtctgagaagatcgctgcattagagcatccgtgtgtgaggaaagaggcaggcctggtgcagagtagcccagagatggagctattctgggcactgacaggtgctcattagtgccaccagcaaagagaagttaggctactgcaagtgggatctacctaggaaggattggatgtccttgaggatggggttaatctaaattgacacggagatggttgaaggttgggggagggttccctctgcgctgcttcctggagttagctcaggaaagaaggcatctgggaggaaggtgaagagtttttacataccccacacccaccaaggcagcagctgtctgaaaaatatacaaacctttccaaggggtcagggctgtagttttcacttctaaaagaaattaaaaacaagccactgttaaggtcgaaagcagacggagatgctcactttgccctcagatgatttcaggaagaagctggcgctcctggcgcagcagcgtccctgcgcctcttgcccatgtcccttgctgtcctgaccactgcccagccctcctatgtgacccccctctggttttctggtttacttgggcagccagttgcctcaagaggtgagcagatggctggagaaggatgtgaacgacagtcagattggaccacagatggaagcagagccaagatgtccgcctgattttagcaggtgacacagctgcacctttggagcctgagacaccaaaccaaataggctttgtagaacaacttactttctttggtcatcaggctatcctctaattagttgaagcctgtaggtcttacgtataaagttgattgctacatatggatttatactacagcatttgaatgtaggtgctcatgctgtatttgaaatgcaaaagtttaactggcatttagctatgcatttagaaacactggtgagtcagcttccatgtaccagaggagaccaaaccattgacatttgacttttcttgatgagctggacaataccaagctggtcccacagggcttcatctctctggggcagcctgcggctctgacccacacccgtgctgctacagttgcacttgctgggacctccctgtagaaatgctgggaggctggcccctctctgctgcctaggctgtgaaaggtctccatttcaccagcttcaactctcagaacaacctatggagtctctccaccttttctgtggatagcagatgccttgtttggcctgaatttggaatgatctctaatcttttacttccctctttgtcgttcaccctggatacagagaggacggaaaatggcactaaagctttttgcatcaaagtgatgccttgggagtctgtgttctctgtgcaaaggtcctcgcatacagaaagacaacctagatataactcatcctaaaagcaactaaaacatttgctcaaagtcagatgaatacgtacttgtgcattcacaccttcaatctactctttaaaatcacctgacacacgatatccctcttgatttaagtgggcattagcggccctgagaagccaccctgaaggtacaaagagggaaagggtttatcgacgatcaaaagttttgtgattgagaaaatatctgatgtactgcaggacggtagggaaaagccaggggtgatgatgccatggtgcctgtgcatttaacaaggatggtcccttgaagggcttgctgggccccagaaacaagttcagaagctaaggagggggaggggctattttcattaattgtcttatttaggtaccggtgatttttgatcctctctgtgccaagaaaaaaagataactggaaggaggaaggacagactaaagacagacttggggagataaagtaatcataaaacttttacccccaaaccacaagcagttttggggggctcatccagacagtgatgggcgtactggttcagactgtgctggaggaaggacacaggaagagccttcacctggcagttgagactatcagaaagaagaatgcattgaaagcacaaattcctgctgaaaataaaagaggttttctataaacaaagacccccccaaaaaaacctcagcttaattattccatccagatggggtttttttctcttcctctaaatctccaacacacactacttgaaagatggccaactctttttagtgtccacataggtaaagaaaatgtgatgctcatccttgactttagctagaactcatccttgggcttttccaggtagcagttgttcaacctttccagtcaactagagggtccttttgatcccacttctagcccgccacaatgaggtggaaatgccaggatattttcgtatatactctaaacccatcatgctcattccagtccaccccccttgctttggtactaaggagaaggtgcacatgctggcactgtcctctgtgccatgcttgacatgcttctgtccagtgtgtgttgtgtcctgcttccagaagcaggagccttgcttgagccaccaaagctagtcctggccacaaactccagtctttgagtaacattttgactatcaggaacataaacaatccctgaaaattcaagcttgtcaagcatgcgttttccacaccaagacttcaactgaaatttaattgatctctttgttaatggtatattaacaacaggtcagggagggtgggaaaatatgttgaaaagaaaggaagaaaaaggatggaaggaaggaaggaagggagggagggagggagacaggaaggaagaaagggagagaggaaaggggagagggggacagaaaatacaacaagaagaaaacaacagtaaaaagaaccctcccatcccatctctaagtcaatattcaatgtctgctcaatccagaaagttatatttttgccagcaaagccagtttggctgaatccgagtgtccagataagcaaagggctgttgtctggctctagtgggcagaggagggcaggtttcatgtgaagacggatatacaaaccttctagcaagagggtgagggaattttctttcttttgtgctttctgttatctagacacacatataccatagaaatgcttaaccactggatgacttggcctaattaacygtctttaatcctctgcagggaagaactaataatctcttctgctgcaattgtttccttctgatatacagagtttactttagtccccattctttaataaattgctttgatggtcactttgaggtttacagacattaatcagtcaacctttaccagcccactgataccatcaaatctgacttaatgcccaggagataaaagacaaaggaccagtgggtggaaaatgaacagccacggagccgctgagtttgcacagtggcctgagtacagtttactgtgcagaagcccagtgagggatggtggaacatccttgagtccttatttatcaccgtgagagtcctgcaccaccaaatattaataggagaggtg

SEQ ID NO: 715077 - DNA, 648 bp, Homo sapiens
ggcaggggaataactatcttagaaaatttgatgaaaatcaagtttgtaaaatattaatacctgaaaagtcatatacttacatctccaacattcatttaaaactgagttgtgggatatgtaagttgcatttgtgtgcatgtgtatgtatgtatgtatgtatgcagaaacattttgatttgtggatgttttatgccttaaaatatttactggcttgaaaatatattttaactggcttaaaattttagaggtgagctccctgtgaatatccgtgttaaattgaccattttgaaatttaagacaatatatatatcgtttcagatattgttccactattttgatcagaaaagtatgctagagaaccatattttacatawaagaatatatatattaacatttttcagtcagcagatatttattttatgtcatgcccatttcattttctttttcactgttagggacttttgccgtcaggatgaaaagtgtgattattactttagtgtggatgcagatgttgttttgacaaatccaaggactttaaaaattttgattgaacaaaacaggtactttctaaaattcgatatcaatttattgttaaaatgattatttttcatattgatgtgaacatactgtagtaattgtgtatttagt

SEQ ID NO: 715078 - DNA, 648 bp, Homo sapiens
ggcaggggaataactatcttagaaaatttgatgaaaatcaagtttgtaaaatattaatacctgaaaagtcatatacttacatctccaacattcatttaaaactgagttgtgggatatgtaagttgcatttgtgtgcatgtgtatgtatgtatgtatgtatgcagaaacattttgatttgtggatgttttatgccttaaaatatttactggcttgaaaatatattttaactggcttaaaattttagaggtgagctccctgtgaatatccgtgttaaattgaccattttgaaatttaagacaatatatatatcgtttcagatattgttccactattttgatcagaaaagtatgctagagaaccatattttacataaaagratatatatattaacatttttcagtcagcagatatttattttatgtcatgcccatttcattttctttttcactgttagggacttttgccgtcaggatgaaaagtgtgattattactttagtgtggatgcagatgttgttttgacaaatccaaggactttaaaaattttgattgaacaaaacaggtactttctaaaattcgatatcaatttattgttaaaatgattatttttcatattgatgtgaacatactgtagtaattgtgtatttagt

SEQ ID NO: 715079 - DNA, 649 bp, Homo sapiens
taacactaacagccagaacattccagtattcctgattgcatgagtttttttgtgtgaaatagctattattctgctttaaatacaagttttttttaccaatattagattttcacttctagagattgaaaagaatatatttgctgaaaagtgtgtgcatgatttatatttatttcagagacaatggttgattactaaaaataatcacaattgaaatagttttgctaaggtaatattggagaagaatgtcattctttttttcatacatatgatggaccagagtgactaagacattacatgctttgccttagttctcaaacatgtcagcctgattaaaaaggggcagtayactctcaggactaaaaggatgtgcccttacatttagaaaaaaaaaggcacacgtttctgttcaaacagttgagtggtaaaaagatgtgttgcttgtggaaatagtaattggtgtggaaagcttcaatctgaatgatgtaaatacaataaaggtttttgttagctgcaattaaaatgcacagtggaggagaaaagactattaagatcgtattctgttgtttctgtgcagttgtattgactctgggtgagttgtatagacaatatacctgattgtatctttgggcacatcacaaatgagggtttg

SEQ ID NO: 715080 - DNA, 558 bp, Homo sapiens
cgacataattaattgtatttcatgatctatagagtagatctaaacttgaccaataacttgtttttattaagacacttattagctttggggaagggaattatcaatttgttctctttcaatattctattatttttgttttgtgtattcaaaagcaccatccagttttaatcacaattttagaaacatgtttacaaatagttcacatattataatagtttgattttttagaagaaaattcaaaaagttttgtttaggaaaatacattttttaaaattattttttgacarttttgtgaatgtacatcaaagatagccagagagaattgcagagaaagctgattgattcagcatatggagtcttaacttgaagaaacaatttccttttaaaatctgttttcttcttcttttttttttttttttttttacagatttgagtggtacagtaattagctccttttgtgttttacagggacatctttttgttaggcaagtggcacacttattcaagggaaaatgctgtcttcaacaatcaaacctgtaacactgctgtaatgatttt

SEQ ID NO: 715081 - DNA, 662 bp, Homo sapiens
atcattgtgtatttcctgattaattgcagatgactaagtgaggacatacatgcagcacctagcaaagaactcaccatgctaagagtgctcagcttttcccatgtattctgtcactcctttgtcagtaagagaagggtcaagaacctgggctctgaagtcagactgccttgggcaaaatactgcttaaactgaatttcctcatctgtaaaatagggacagtaatagtacctgctttttagggttgtggggagtaagtgaaataattcatgtaaagcatttaatatatgcctaggccataataagcactaagatattaatttccattatgattatgactgtgattttatctcttctgaatttctagataggagctccttgagaataaagatttgactttttaatccccgtggtgtctaacacagggctttataacatagtaaggtttgtgcgggtgaatgcttaggatgcccagttggcactgtcagtgagtaattaatgccacagattattgacccccgaratacttgatggtgccaggaatcaggattgggaatgaggttgattctgtttagtgtcaaagtgctggtcctcacttttgtgatattagataacttgcatgcctaatgtgttttaggaggacctccagggaagtagaatgttct

SEQ ID NO: 715082 - DNA, 662 bp, Homo sapiens
atcattgtgtatttcctgattaattgcagatgactaagtgaggacatacatgcagcacctagcaaagaactcaccatgctaagagtgctcagcttttcccatgtattctgtcactcctttgtcagtaagagaagggtcaagaacctgggctctgaagtcagactgccttgggcaaaatactgcttaaactgaatttcctcatctgtaaaatagggacagtaatagtacctgctttttagggttgtggggagtaagtgaaataattcatgtaaagcatttaatatatgcctaggccataataagcactaagatattaatttccattatgattatgactgtgattttatctcttctgaatttctagataggagctccttgagaataaagatttgactttttaatccccgtggtgtctaacacagggctttataacatagtaaggtttgtgcgggtgaatgcttaggatgcccagttggcactgtcagtgagtaattaatgccacagattattgacccccgagatacttgatggtgccaggaatcaggattgggaatgaggttgattctgtttagtgtcaaagtgctggtcctcacttttgtgrtattagataacttgcatgcctaatgtgttttaggaggacctccagggaagtagaatgttct

SEQ ID NO: 715083 - DNA, 608 bp, Homo sapiens
ggccttctgggagctccagtctcctttccgtgcatcctgcccctcctgcccaagaaagcccaggctgtcgccctcctagctcactgccacctttgcacactctacccctcctccctgaatctccccttgctccaactcacaccatctccaaactccgatttcacccccagctgcgccatgcagtggaacatttaattgttctatttcctgggtcctggtttccaattatactattaaagtcttgagaacgggggatctcttttagcctcgtagtacttggcacaatgctggtcacataacaagtagtcagtgactacttattgattaatgggtgaatttaatcttactataatacagttaacctggcatactgatttaggtttttcccctgatatcagctaggggtcatatggatactggcttgcccrtgtgctagaactgggcactgggatgaaggaattacttcaacatgtgtttggatagttctacccaccttttgcaaggaggttggtttgtgcgtctgcaacgacctagtcaatggcctagttgcaccaccatcttcctggtgcttgttctgatgcaccctgacagctgtctccacaagactt

SEQ ID NO: 715084 - DNA, 1290 bp, Homo sapiens
gaaggaaatagtcataaagagaaaagaatagaattgatgaatatccttggggcttttcgattgtgtaatccacaaaaaaaaatttgctttttaaaaaagtactctgtcaaagctgagtttatgttacataaaatagttgaaagtgccagcaggtatgtgtttatagtgtcttagtacagataagtgttttatcattctcagacctttttcagatgcctactgtgcgctcatctttctgctctgcaggaggagcatgcaaagatcagctcaacctctgaaacagatcactgtactgatttatatcggtggattggttgccaaaacaagcaggagctrgccagtttacttttggactatactgcataggtcaactcacatttggtatgtgactaatcatatcacctaattccctaatcagtgattcagaattagaaattccaagtagaaattcacccacggatagaagaatctaattcctttttcctttaatgcacaaataaagcaaggggttgttgtgtcttgtagtaccagcaaaaaaggattactcatttgtcaagttctagacaatggacccaagtatacatttgtgataagaattaagtctaaagtttttttctctaatagcaaaaataattgtgatagacataaataaaatatgttattgaagatatatgttattgaagattaaaagtatagttcagataattgtacatgtttgaggttgtattttagggctactagtgaggtagttaattcacaaattgtccaggctatggaaaagtttgtaattattaatttattcaaaatatgtctcacctattgtattctatggccttttggtctaaatcacatctgtttcttttctatatggttgaagggtaaaatatgaccctagaaaattactcactctgttcagtcgaatgtcaatattgttgagaatttgaaagaatgaaaaagctaattatttgaataaaactatctcagctagtggacaactgtgcacctgtaagacattgagctgttgaaaaacggactgacagctgattttcacagcacaggaaaaataaagttgatcaatgaaacagttaataattttttgttgacatcataccaaatacactgatgatatatactttccctcccacttacctggtgtctactaactgttcagctgacatccaaaatataaacactatttttttctcttctaaattctttagacctatcctactatcctaaaaaaaagggatgctttattgctgctttctgtgtaaaatgaaatgtcacctt

SEQ ID NO: 715085 - DNA, 1298 bp, Homo sapiens
tgtcactccaggctctcacctcaggttccaaattttttctctccctataaacttattatcctgcttcttttcattatcccttaagtgattctctacctgctgtgtgtctgcagctgtgtccctctaaagttctaaaccagacttaaaaacggcagaatgtgcatggtgttctgtctttgtgactcatttctcagcattccctagaggctatgacagtggctgaaaccactacaccagatgaactcagaacgctaggctttctcagagagaatgcagcatggaagtgaatccaaactaaatctcttttctgttgtttttcctcaggaattcagaattcacaatagccttggggtttttgtctgtctttgttttgaccatttctgcacttcaggcatttatgaacgtgaataaagaaaaggtctgatgcccatcagcagtaacgagcctttttgtcattcaggtcataattacacatagtcctctgtgtgacccaacatcaatgccaaattagcaaacccagttcctgggtatcaatgcatccttataattttttaaaaatctgtggagttgtatagtgcccatttgtattgcagaatatacaataaaggtattacaatgggttaggaatctttatttttgccttttattaggaaaacgtgatgctttgtaataattagtgaattcaacatttttgaatctgagtgattacaatagctatgtcaaaggctttgctgaggtagttggatatgcataattgtttctgtgaagatttagaagctctatatttaactcaggaaagcagctatgccaattttaaatttaattgttattatttttgtcaaaaaaatgcaatgtataaaatatggaacaggttttaatttataagattgtagagaaaatattacttaactaaatttttcttagrtaatgttggtttttaaaaatttaagaatatacaagtatttttcatattttagacttgatactatcctgctgtccattataataataccaataattaggaattcaaaatggtgagaatggagagatcaataaatctaatattaagagatcaagtattcatagatgaagagaaaacagatatataattcttcaaaaatgtcttttgataaaattgggtctctgaaccagacctcttcttattatttgagaattatcttttcaaatgtcaatgatttacatgactttctcattcttaaaatggctatgaaatgcctgggcttctgtctgatgacaggtctcctgaagtagttcctgaggaggaaaataacaaatga

SEQ ID NO: 715086 - DNA, 2877 bp, Homo sapiens
gcttttggctactagtaatgatacaacagagaacattgttttcacaataaagagaattattattatagaacacaatgtcctaaggtggagtacctaccttaattcagtaccatatctttctataactccactttgcaatttgactttattagtgggaaatcttcttgagtgtcctcaaagagtcagtgtcatctcattggaatgcctaggatacatacccctacctaaacccatttatagaaggagaatgaaacaactatgaccagtctgctttatgctgcatcagtgaggttggaatgaagtccacttttctcaccatttagcttcttgggtgagtgccaacaccctaatcaatctttgctttgatagcaaagaggaagtgtgggagggtggggggatagtcaggaatagattccaggaggcaaacgatgtattttactaaaggtataggcatgtaagtaatagtagatgtctgcaattaggtgaaaatgtccatcgagaaaattaagagcaacaggaaattcaagagtagaattaaaaggactgacaacatttaaagatagacgtctagaatgggaaagtcaggaaaatattcattttctggggtaatgtaatttaaacaatcctataaatattgtattgcgttatatttcaaaataaaaaattatcttaatacaaaattgtcctaaaaattcaattcctaattataggaattaaattgagcaacatcttagcagctggagatgctagtgattctcaatgggctgatgacggtaacaaaatctcatcgtggggagtctgagagattcttatactcccttaagaaagatttagaaatgttcatgacagatgaggcgtagaaaaaaactaaagtggcgtagccattagaagagagaacctgggcaagtggtattgtgggagctaggtcaaaagattttcctcaaggaaggagaatgatagattcacatgctgatagtgttaaaatgtaacggacacatcatcagtcagctagcaactgagagaatgggaagggaaggggatagaatgatatctttggtcttcggtctgcctcctatgtctctgaagcctgtgtcttacccatgtttagctgaaaacagagacagcccaagatggtccctaaattttgaaactgaacagcctcgatattctctacaaagggaagccctaggcagtatggctcaaagccctgtatgtctaaagataattttagtaaaaatacataataacaaatgagagacagagagaggctcctaaagatctatttggggccaaaaattaaactaaaaataatgatgatggttaaaattggtttgtactagctaatgtttggggtaataagttccgtaggtaagaaggatgaaaaccagatttaagtgcaaagaaagaggaagcagcaagtattcgtcactctctccagcttctaaatatggaaaaacttgagcatggttaggagccgagggatgtggtttaacacaggttaagaaattgatgatatataattcaaagaattatataacaggcagggaatagaaatgatggcaaagatgggatcaagagcattggtggacaggtttgcatgggatagagggattaacacatacactcaaacaggaagaaaaaacaggtgaagctatagatgtttttatagccaggaaaaggggaagtagatgagttggtttctacctgttgacttctgtaggaatcttggttacatgctctattcctttgctagggccactgtaaccaagtatcactaactgagtggcttcagaaactttaatgtctcatggttctggaggctagaagttgagatcaaggcgttggcagggccatgctccctcagaaggggctagggaaggatatgttcaaagtctcctcctggtttctggtagttccttgtcttgtagtagcatgactccagtctgtgtggggcattctccctatgcatgtgtctgtttcttttcctcacattcttttatgaagacaccagacatatgggattaggggcccattctactccactatgacctcatcctaactacttcttcagtaactctagttccaaataagatcagattctgagagactggggattagcatttcaacacataaaatcaggggcacaattcaaactgaatcagatgttgaacaatggacgtagagagtttggaaaggcagctgcgggaaatgggaagaggagttgacaatatgtcattttttttttagaaatgacaatatgtcattttttttttagttgacaatatgtcatttttttctcttcaatacattaagagaatcttatcaataaataagtaaaatcacacatggacacaggaaggggaatatcacactctggggactgtggtggggtcgggggaggggggagggatagcattgggagatatacctaatgctagatgacacattagtgggtgcagcgcaccagcatggcacatgtatacatatgtaactaacctgcacaatgtgcacatgtaccctaaaacttagagtataataaaaaaaaaaaaaawaaataagtataatcaacctttctctaaatatatctgtttttaccagatatattgagttcagcaataacatgagaatccaaactattccaatgatttgattgtttatctctgtctctttcacatgcacatttatctcattacacacacacaagaagaaagaaagctatatcatattatataatgaggaaagttaacacagaaacataataaacagaagacttgtgtgaagatttgtaaaaatcacacatatgacaaacacttaaaagtatataattcagagtaaaaatatgtaagggtataagaaataacatgaagaacttgaaag

SEQ ID NO: 715087 - DNA, 2877 bp, Homo sapiens
gcttttggctactagtaatgatacaacagagaacattgttttcacaataaagagaattattattatagaacacaatgtcctaaggtggagtacctaccttaattcagtaccatatctttctataactccactttgcaatttgactttattagtgggaaatcttcttgagtgtcctcaaagagtcagtgtcatctcattggaatgcctaggatacatacccctacctaaacccatttatagaaggagaatgaaacaactatgaccagtctgctttatgctgcatcagtgaggttggaatgaagtccacttttctcaccatttagcttcttgggtgagtgccaacaccctaatcaatctttgctttgatagcaaagaggaagtgtgggagggtggggggatagtcaggaatagattccaggaggcaaacgatgtattttactaaaggtataggcatgtaagtaatagtagatgtctgcaattaggtgaaaatgtccatcgagaaaattaagagcaacaggaaattcaagagtagaattaaaaggactgacaacatttaaagatagacgtctagaatgggaaagtcaggaaaatattcattttctggggtaatgtaatttaaacaatcctataaatattgtattgcgttatatttcaaaataaaaaattatcttaatacaaaattgtcctaaaaattcaattcctaattataggaattaaattgagcaacatcttagcagctggagatgctagtgattctcaatgggctgatgacggtaacaaaatctcatcgtggggagtctgagagattcttatactcccttaagaaagatttagaaatgttcatgacagatgaggcgtagaaaaaaactaaagtggcgtagccattagaagagagaacctgggcaagtggtattgtgggagctaggtcaaaagattttcctcaaggaaggagaatgatagattcacatgctgatagtgttaaaatgtaacggacacatcatcagtcagctagcaactgagagaatgggaagggaaggggatagaatgatatctttggtcttcggtctgcctcctatgtctctgaagcctgtgtcttacccatgtttagctgaaaacagagacagcccaagatggtccctaaattttgaaactgaacagcctcgatattctctacaaagggaagccctaggcagtatggctcaaagccctgtatgtctaaagataattttagtaaaaatacataataacaaatgagagacagagagaggctcctaaagatctatttggggccaaaaattaaactaaaaataatgatgatggttaaaattggtttgtactagctaatgtttggggtaataagttccgtaggtaagaaggatgaaaaccagatttaagtgcaaagaaagaggaagcagcaagtattcgtcactctctccagcttctaaatatggaaaaacttgagcatggttaggagccgagggatgtggtttaacacaggttaagaaattgatgatatataattcaaagaattatataacaggcagggaatagaaatgatggcaaagatgggatcaagagcattggtggacaggtttgcatgggatagagggattaacacatacactcaaacaggaagaaaaaacaggtgaagctatagatgtttttatagccaggaaaaggggaagtagatgagttggtttctacctgttgacttctgtaggaatcttggttacatgctctattcctttgctagggccactgtaaccaagtatcactaactgagtggcttcagaaactttaatgtctcatggttctggaggctagaagttgagatcaaggcgttggcagggccatgctccctcagaaggggctagggaaggatatgttcaaagtctcctcctggtttctggtagttccttgtcttgtagtagcatgactccagtctgtgtggggcattctccctatgcatgtgtctgtttcttttcctcacattcttttatgaagacaccagacatatgggattaggggcccattctactccactatgacctcatcctaactacttcttcagtaactctagttccaaataagatcagattctgagagactggggattagcatttcaacacataaaatcaggggcacaattcaaactgaatcagatgttgaacaatggacgtagagagtttggaaaggcagctgcgggaaatgggaagaggagttgacaatatgtcattttttttttagaaatgacaatatgtcattttttttttagttgacaatatgtcatttttttctcttcaatacattaagagaatcttatcaataaataagtaaaatcacacatggacacaggaaggggaatatcacactctggggactgtggtggggtcgggggaggggggagggatagcattgggagatatacctaatgctagatgacacattagtgggtgcagcgcaccagcatggcacatgtatacatatgtaactaacctgcacaatgtgcacatgtaccctaaaacttagagtataataaaaaaaaaaaaaaaaaataagtawaatcaacctttctctaaatatatctgtttttaccagatatattgagttcagcaataacatgagaatccaaactattccaatgatttgattgtttatctctgtctctttcacatgcacatttatctcattacacacacacaagaagaaagaaagctatatcatattatataatgaggaaagttaacacagaaacataataaacagaagacttgtgtgaagatttgtaaaaatcacacatatgacaaacacttaaaagtatataattcagagtaaaaatatgtaagggtataagaaataacatgaagaacttgaaag

SEQ ID NO: 715088 - DNA, 595 bp, Homo sapiens
ggaaattaaaagtatggaacacatgttggcattcattatgtgaatgctaatagaatatgcttctgctttgaaaatatccaaggtgaaacatggataaaacagaaggccactatttggggtaatgatagaatgatttgcatgaatttcacaaattaattcttaagcaaacaaggtgtaaaccagagcgctaattgatatgaataaaaggagagaccaaaaaaagtactaaatgacttcttaacccagtttctcctgtgtctccttgtctctttgttcactgccaagaagagttaggatgttagacactcattgaatttcttactctttttcagggttggggggcagtttctataagacagtcaaattaagtatagcatgtggccatgaatgtccaagtaatgacaaagagaagagtgaaaggactttctggatgctggctcattccagttccagcatttggagcatgacagttgacttctgcaactgtaaagaaaacattatagtgcaagaactatggtacacyaccagtaaaagtggtatgcactggcagctaacagaatccactgagcttttttttgtcaggggcatcaggcca

SEQ ID NO: 715089 - DNA, 630 bp, Homo sapiens
atggagtcttgctctgttgcccaggctggagtgcagtggcgcgatctgggctcactgcaacctcygcctctcgggttcaagcgattctcctgcctcagcctcccgagtagctgggactacaggcacatgccaccacacctagctaatttttgtgtttttagtagagatggggcttcaccatgttagccaggatggtctcgatctcctgacctcctgatccacccgcctcggcctcccaaagtgctgggattataggcatgagcccccacgaccggccactccagctcctatttaaaaaaaaaaaagtttataattaacacgtaattgtacatttatagggtacaatgtgatacttcaatacctgtatacattgtataatgatcaaatcaggatagttaacatgtccatcacctcgaacctttatcatttcttgatggtaataactttcaagataactagaaaagaggatcttgaatgctatcaccagcccctattttacaaataataaactgaagccttgaaaagctatgttctgggctacaaacaattgtcaataatgttgaagaacctgggtcatacaaactggggactcttactacagtgcagtcacattataaattaataacaaaa

SEQ ID NO: 715090 - DNA, 889 bp, Homo sapiens
tctggcatttttatattacatggggactgtcttttgctcactctaccattctagattggcaattctcttagtaatgtttaaaagataaagagggccgggtgcggtggctcatggctgtaataccagcactttgggaggccgaggcgggcggatcacaaggtcaggagattaagaccatcctggctaacacggtgaaaccccgtctctactaaaaatacaaaaaattagccaggtgtggtggcgggtgcctgtagtcccagctacttgggaggctgaggcaggagaatggcgtgaacccaggaggcggagcttgcagtgagccgagatcgcgccattgcactccagcctgggcgacagagcaagactcccgtctcaaaaaaaaaaaaaaaaaaaagataaagagtaacctctgctaccagatgacagaatgctgtcctcctcctcctccttgtcttcttcatctctgtttgcttaattgtcagttgggtatcagatgagaatggcaaaattggtattcctgttttagtgacaaaattatttgtaaaggaaaaagtttaaagagaagcttatatatgaacattctgttttatagctgttaaatgcttcaataaacattttttcttttctcagcttgaaaacggcaaaatatattaatgatacatgttacatttatatatatattatatatacttayatgtgtgcgtctgtaatatataaatatgtatacatatatcacatatacatatgttagtgtatatgtgtatggattttacacaccaaagaacagagatgattttgtgtaatcttatgttgattgcatttttagaatggggtctcacaatatttagccagtctctggagtcaccacagtgttcaggaaccagcatca

SEQ ID NO: 715091 - DNA, 889 bp, Homo sapiens
tctggcatttttatattacatggggactgtcttttgctcactctaccattctagattggcaattctcttagtaatgtttaaaagataaagagggccgggtgcggtggctcatggctgtaataccagcactttgggaggccgaggcgggcggatcacaaggtcaggagattaagaccatcctggctaacacggtgaaaccccgtctctactaaaaatacaaaaaattagccaggtgtggtggcgggtgcctgtagtcccagctacttgggaggctgaggcaggagaatggcgtgaacccaggaggcggagcttgcagtgagccgagatcgcgccattgcactccagcctgggcgacagagcaagactcccgtctcaaaaaaaaaaaaaaaaaaaagataaagagtaacctctgctaccagatgacagaatgctgtcctcctcctcctccttgtcttcttcatctctgtttgcttaattgtcagttgggtatcagatgagaatggcaaaattggtattcctgttttagtgacaaaattatttgtaaaggaaaaagtttaaagagaagcttatatatgaacattctgttttatagctgttaaatgcttcaataaacattttttcttttctcagcttgaaaacggcaaaatatattaatgatacatgttacatttatatatatattatatatacttatatgtgtgcgtctgtaatatataaatatgtatacatatatcacatatacatatgttagtgtatatgtgtatggattttacacaccaaagaacasagatgattttgtgtaatcttatgttgattgcatttttagaatggggtctcacaatatttagccagtctctggagtcaccacagtgttcaggaaccagcatca

SEQ ID NO: 715092 - DNA, 536 bp, Homo sapiens
ggatatttatttaccttcatacttaggttttctctgtgttgtatagattgtggtagagaatttggatggttgttgaatttagagtttattcttaaattcgtagttcagatttttggtttagaatatagaggctagtaaatattctgatcaagtcaaggttattttccattcagactagkttgtctgcattgcttagatacttcgtttccgctacctagaccaagttgtctaggtctagttttttatttttcaaaacttagcacctgctgatgaatttggaagaacttttattagctacacaggaagtaaatgagaagagacctaatattttctgagtacctaccatataccaagacttacgttacataatttctcggacaatcttccatttgatgtggatatttttattcctgctttattaagggggaagctgatacttacagagttaaagtaacaagccttggatccatagacaatgaagagatttctttgtagaatgtggcttggctgggaatgcagggaatgacacaatatct

SEQ ID NO: 715093 - DNA, 1382 bp, Homo sapiens
tgacccattctgcttcatgtgtatctaaaagctgaaytacttcagggaagtaaagtagagaatggggctcagcccttgggagatgtagccccacacatagaaaaagtactttgttgcttgtagtaaacttggaaagcacagaaaagtataaagaaaataaaaataatctcgaatcctcctacccaaaaggaacgcttaatcttggtgtactttttggtttttcagtcacacacattcacatcaatataatttgtcccagttgagattatcccacgtattgaatttggtgtcctccttttttcacatacaattataccatgatcactaaaattcctcttacatgtatttgtgatggctcattgttgcagattggttccccaggagacagactctgagatgcagactggcaaggaggatgcttatgagggaccacccttgaaatcaacatctgccaaaaggaagagaagaagcagggttagacggagggagaggctgagctgtgatgtaggccttacccaaccccatgggggaactctggaattggggtggccctctcagctgtcctagactggggcaaaggggccagacctttatacctcctgatggacttctctttggtttcaggctgccccagaagaacacatgctcttgggtgaggcagtctccaaagagagttcacagctgatgtccatttggggcagcagtcccatcatctgggagaatagtcccttcattcctgaagtgggatcagagcagcatgtcacagcctccaccacactcataacactacccataacactcataacataacactcataacataacactcaacgctatgcactgtagtgcatagtgtagtttactgtgctttcaataatggctgaaattgaggacttactttacagcagcgttgtgctgggtgatctcacttagaccccagaactgcccaatgagatgattgctaatgctatctccttttactgatgtggaaataagactagacactaagtgggtcccacagctgataagtgcgggaagccaggacttgaaccctaagccctagctctatttgttttagtaagtacctaaaagaatgtttctaggtaagagtttcagtttctatgcaaaaacattactgcatattaaatgaaaagatgtatactatactgcattttcctttcatcttcagaacagactagaaagatgattttcagaatggtaaaaataatcattgctagtccaaggtgaattagaaaacttaaataactacatgagggcatattttcaaaagttgtgaataaatgacaataggaactgcaagggtttactgataacacctttgattcaaactgatatattcaaaacacaaagcagcaactgca

SEQ ID NO: 715094 - DNA, 599 bp, Homo sapiens
aagcagaacataacatcttgcatagagtaggtgctcaagaaacatgtgttggcaacacacaaatcctaatgtaatgagcctggatacaggaattctatcagaacagctgcagtcagtcatagcgttgttggggtgcatgttttaggccttatgtaatttcctgtctcgggatgaaaaaaaatggactaacagccaaggctggcaagctgttcctggctgaatgtgaaccaggctccagttccacatccccaaaaaccctcctatgctttcccccttttgagtaaattaatttttatctgcctgctctgagtttgtaagagctattaagaatgggtcagtgctaccttcagaacagatttaacaggatccctatgcctttgcaagatttctaaaacctggtccaggctagggataccaagacactatcttgaggttctttggaaacgtgtcttctctcctttcttccttcctgttgctgtaggtaattttctcagggctggattgatccagcctgctgactaggcttcctcctgggatactcctcttccattctacccactgtgtcctcacaaccttcttcgtccatatgaggtygttcg

SEQ ID NO: 715095 - DNA, 1345 bp, Homo sapiens
tgaggaatgcagacaccacgtcaaaaagcagaaagagagcacactgaccagaacaaatagcactctccaaacaatgctaggaaataaatctccagatccaccaacagaagctttgataagacctctcctaagtcactagagattggcaaacactatgagtctaaaaacagccagttgtttgctgctacccagaagttcaggaaaaacacagctccatctctctctagctggaagaatattgacctagcaaagtcaagtatcaagatatttgtgtttatgagccccattaagagcaggaccacagagaatggctttcagaacaagagcccccagaaactggaccctgttgagcagggtcaggagaatatggtggtgactgaatagccagttggagctatagaatagcggctggagaatagtaagttggagctttattggacccctgtgcatagagcaggtcaggatgggaaacaggccctgaatacacccactagtgcctcaggtgtctggccccatgactacagccatgaccagggccctagttgttaatgggaaaggtacgaggcagaggttgcagtgagctgagatggcaccacagtattccagcctgggcaaccagagtgagactctgtctcaaaaaaaaaaaaaaaaaaaaaaagagaaatccaaagtgctttgagcacagccgctgctgaaaacagcaagcttatgctactcagtgccattggcagtgccttctgttgtgcacttgactttatttattttatatagcattcaacaaatgacagcaaaagagaaagcactagaacagcagaagctaccagaaactttgtgaatactttcatacagtttcagaaatctattattgtagtagtcaatggcccagccattaggctaagcgcatctatattgcctctttgcaatgtggtctgtactaatgaaaaggcttggtttccaccgctctttactatctttggacagaatccagatggctgttctaccattgtttcctaaagtaatggaaggggcatttgcaaatgagatattgctcagtgggcagaagatgaccacacaggaagcctgtggtaaaggtctggtagcccaggtattttggcccgggaccttcacccaggaagttatgatttgaattacggagtttgcctcatgtaatccagttgtgcttgaggaatcygaagcccttgtgtgccgcaacatgaagatggagttggagcaggccaatgagagggagtgcaaagtgctgaagaaaatctggggcttggccaaactgatggactccatgttaaagtgcttgcagaggaaaattgatgagttgtgaccgttaagc

SEQ ID NO: 715096 - DNA, 1345 bp, Homo sapiens
tgaggaatgcagacaccacgtcaaaaagcagaaagagagcacactgaccagaacaaatagcactctccaaacaatgctaggaaataaatctccagatccaccaacagaagctttgataagacctctcctaagtcactagagattggcaaacactatgagtctaaaaacagccagttgtttgctgctacccagaagttcaggaaaaacacagctccatctctctctagctggaagaatattgacctagcaaagtcaagtatcaagatatttgtgtttatgagccccattaagagcaggaccacagagaatggctttcagaacaagagcccccagaaactggaccctgttgagcagggtcaggagaatatggtggtgactgaatagccagttggagctatagaatagcggctggagaatagtaagttggagctttattggacccctgtgcatagagcaggtcaggatgggaaacaggccctgaatacacccactagtgcctcaggtgtctggccccatgactacagccatgaccagggccctagttgttaatgggaaaggtacgaggcagaggttgcagtgagctgagatggcaccacagtattccagcctgggcaaccagagtgagactctgtctcaaaaaaaaaaaaaaaaaaaaaaagagaaatccaaagtgctttgagcacagccgctgctgaaaacagcaagcttatgctactcagtgccattggcagtgccttctgttgtgcacttgactttatttattttatatagcattcaacaaatgacagcaaaagagaaagcactagaacagcagaagctaccagaaactttgtgaatactttcatacagtttcagaaatctattattgtagtagtcaatggcccagccattaggctaagcgcatctatattgcctctttgcaatgtggtctgtactaatgaaaaggcttggtttccaccgctctttactatctttggacagaatccagatggctgttctaccattgtttcctaaagtaatggaaggggcatttgcaaatgagatattgctcagtgggcagaagatgaccacacaggaagcctgtggtaaaggtctggtagcccaggtattttggcccgggaccttcacccaggaagttatgatttgaattacggagtttgcctcatgtaatccagttgtgcttgaggaatccgaagcccttgtgtgccgcaacatgaagatggagttggagcaggccaatragagggagtgcaaagtgctgaagaaaatctggggcttggccaaactgatggactccatgttaaagtgcttgcagaggaaaattgatgagttgtgaccgttaagc

SEQ ID NO: 715097 - DNA, 941 bp, Homo sapiens
atcctcaaagcgtaacccagccacagtaaaaacaaacaaacaaaaaaaccaaaaaaccatagcctagaactgtccactaaatcagggatgtagtagtttcaacacaaatgccaaactacactttgttgagaaagattctgaagtcacatctgagatcaggaagaaaaaggacccatgacaatatctgacctgaaaataagaaggggaggactcattcctatttgtcattcctgtgccagctggagcacatcctctgtggcgagactgagaactccactacaaggctgtgagtttcctgagagctaaacgttgtcctattcatttctggcacttatttagaggctaataattgtacatgagagaaaaattttatatggactccctccactgagaattgtcactaggaaaaatctttgtgattaaaatctatcccacattttttgaataaatgaaaaaggaattgttgggaattttcttagaaaatgagacatatcaccccactcttcattaccacatgatcaaattgtgcctttctagtttatatgatgtctttagttgcattggtattttgatactattatcgtctaaatttatactccacccaggaaagatggcagtgctaaatacaagaaaattaaagtagaccaaattggcaagatatgacaaacatgtaataaaagggggacattttttcttctactttttkggtgacatggtctcaacaatccaagtacttgtatgataaaaattcatggaataaagagaaataagaaaaaatatatacactagtactctaataaaccatgtgcaactcattataaaacccccaaattctttttttttttttttaagacagaatctagctctatcacccaggctggtgtgcagtggcgtgatcttggctcactgcaacctctgcctcccaggttcaaatgattctc

SEQ ID NO: 715098 - DNA, 941 bp, Homo sapiens
atcctcaaagcgtaacccagccacagtaaaaacaaacaaacaaaaaaaccaaaaaaccatagcctagaactgtccactaaatcagggatgtagtagtttcaacacaaatgccaaactacactttgttgagaaagattctgaagtcacatctgagatcaggaagaaaaaggacccatgacaatatctgacctgaaaataagaaggggaggactcattcctatttgtcattcctgtgccagctggagcacatcctctgtggcgagactgagaactccactacaaggctgtgagtttcctgagagctaaacgttgtcctattcatttctggcacttatttagaggctaataattgtacatgagagaaaaattttatatggactccctccactgagaattgtcactaggaaaaatctttgtgattaaaatctatcccacattttttgaataaatgaaaaaggaattgttgggaattttcttagaaaatgagacatatcaccccactcttcattaccacatgatcaaattgtgcctttctagtttatatgatgtctttagttgcattggtattttgatactattatcgtctaaatttatactccacccaggaaagatggcagtgctaaatacaagaaaattaaagtagaccaaattggcaagatatgacaaacatgtaataaaagggggacattttttcttctactttttgggtgacatggtctcaacaatccaagtacttgtatgataaaaattcatggaataaagagaaataagaaaaaawatatacactagtactctaataaaccatgtgcaactcattataaaacccccaaattctttttttttttttttaagacagaatctagctctatcacccaggctggtgtgcagtggcgtgatcttggctcactgcaacctctgcctcccaggttcaaatgattctc

SEQ ID NO: 715099 - DNA, 739 bp, Homo sapiens
tgccttatcttcatcacagcttaaggaagttttgacttcttttgtattccctctactgttttcttttagagyccagattcccctggagtttggaaaaacaaacaagcaaacaaacagaaagctagtcttcatgtaaagcggaatgcatgacctctgactggttctgggagagatacacaattgagagaactgctatcataggtgatattaaccatgtttactgcccccactgtacagataatagaattgacgatcttgtgtgataaagctctgtcttctcaatagggcagcctataaaaaccattttcttgtctctgaatcccagggttgggtaaactgtgaaataattactataaatattggaatttttaaaaaatttcagacattctcaaactgtaggaaaaaaactatttaaaatgctgattacaggatattgtggtataggaaaaagatcaatgaattagaaatcacaaaaaaagagccttagtcttaaatctgtctctatgtcacattgtccaggtccttttcttccctgtcctccatcttctcattgaataaataacgatttagactagaaaatttgaaggtccatttgagttctaatgatctatttaggagagagagctctggagatagaaaacctgcctcctagatatagttccactatttcgtgctaagtgagtcttggcaagttatttaagtctctgagcctccattgccttatttttttttgagacta

SEQ ID NO: 715100 - DNA, 739 bp, Homo sapiens
tgccttatcttcatcacagcttaaggaagttttgacttcttttgtattccctctactgttttcttttagagtccagattcccctggagtttggaaaaacaaacaagcaaacaaacagaaagctagtcttcatgtaaagcggaatgcatgacctctgactggttctgggagagatacacaattgagagaactgctatcataggtgatattaaccatgtttactgcccccactgtacagataatagaattgacgatcttgtgtgataaagctctgtcttctcaatagggcagcctataaaaaccattttyttgtctctgaatcccagggttgggtaaactgtgaaataattactataaatattggaatttttaaaaaatttcagacattctcaaactgtaggaaaaaaactatttaaaatgctgattacaggatattgtggtataggaaaaagatcaatgaattagaaatcacaaaaaaagagccttagtcttaaatctgtctctatgtcacattgtccaggtccttttcttccctgtcctccatcttctcattgaataaataacgatttagactagaaaatttgaaggtccatttgagttctaatgatctatttaggagagagagctctggagatagaaaacctgcctcctagatatagttccactatttcgtgctaagtgagtcttggcaagttatttaagtctctgagcctccattgccttatttttttttgagacta

SEQ ID NO: 715101 - DNA, 3139 bp, Homo sapiens
caccaaccaaagtaatgatcctttaaattataaaaataaccataactttaaaatattgactattaaataactttctagctacagaaactggttgagggattaagaacaaattctttgagggggaaaagggggcaaagttcaaaacatttacaaaaaatactctaaaattgaagtgaataaatgtgatatagatattcgtttcaatctaatattcacaaaaataatgtgaatcttgaaactatccagatataatttaaaatccactactattgacacatacactcaagttcaaatgtaattgccttggaaaaaaattacttccttctcaactctgacccaacctctcatatctctatttgttttctgaaccaaacatccaaaaatctttgaaagacttcagcacagagtataaatgttttcttggtgtgattctggctgtagaagtgcttgcatttgtcaatttaggaagctgagaggactgaaaattggatcaactgttttctacagaaataaattctaagaaattgctttagcaggattcagcattcagcatgtctataaagtaaacctgatcttcatcttacttttatgctgactcaactggtgtcaatttacagaaatgatcatcacctttaaaaatgaccattcagtaatgtagaattcaccatttatttgatttggcatgatttagttgacatcaactctgacaacttccattgtttttttattttacttttgcctcttattatgtaatataaatttaaaattatcactacaaaatgtctaatatgaaagatgtgtgtggttcatcttttgtgcattcagcactctcttttgaggtgcacctgaaaagtggaagaaagaaatagaaaacatttaaaacaaacagagtcttaattgttctcagcaatccaaaaacttgatcagcttgtaagacaggcttccatgagagaacagaggcccttcttttgtagatgagacacctctgaaatgaccactcactgtttgaagctgccccaaatcaagctgacctcattgagtgtgaagatcaatgtaattcctgtaatacaccttgagtaagacacaagctctttgagtctctggttttcttatctgtaaaatgggcatgttaagacttccatgaaagtataatttgtagtgaaatacagcaagatatagaacaatacctgctacaaagtaagtgtttaatatagtaactaaaaacagttaataagtaaacattccattaatcaactttttggatgcatcagcttcatataaacagcctcatatactgggtagtaaatgtaccgattttatttgaactgaaagttgtttaaagtattttataaaaagcttaagtacatccataagctgtgagggcaatgtgacattacaaaagagagagaagacggcaatttgccctcctcaccctaccaacattgataaaatcgatcattgactaatcaatagcatttctgacagccttagggcacttcaacacctgatctacctcctaactaacttgtcagctgctrctgcagggcctctatttctctgctacagagacagttatagcatgattcctaacctttcattctgacccttagctggatgttgttgtctttattatagtgctgataataaatctgatttttcttcataattattacttgcacatcagaattacaatttttgttttgaagaccactttttagttcaagaaattgcatgatctctcatggattatgggtagctttgattatccttgagttaagataggtaatccaaaatgtttaccacagattttaagattattttgaatttaacattataaatcataacagtatctaccatacacatttgaaagctatctgttaaaaggtcatcatgttgtacaacacacattcacacatgaacatctgtatatataaaggctctttgtcaagacaatgggttcaaaggtcttttgcaactaagagagctcctcacctctaggtcctcacttgacagtttgggtgtgtgcatttaaacaacaagaatctcagagaatctaaaataatgtctctcatctacttttctctagaagcagtttggaaatcggtgaacataggttgggttgtgaacaagacagaggtgctatgccacttaggctgttggagtatgagatgtcagatgccctgaacattaatagacagtttcacacaatttttatttttaccaggcactcttgtatgtaaatgacctgtttaaattgatctcattctgagatattgagtccatttaatatataaattcaaagtatttagggcaagttcttaatatatgctgaagtttccaaaaatgtatcatcatgtaaaaaaaaaggaagattgtattttgttttattttaaatattaccaagagctcaccaatgctttttaccaacagtttatcttttgaataacaggtgattaaaggcaaagttgtgcataataataaacatacatgtatcagtcatcatctgtaactgccatattcatggtatttagacatataggtgctagcttacaactacttagttatgtcttccattctagttatgaccaagcttttgcaaattaaaatatatttgttaattaaatattattttctattgcatgcctcctgtacagttaatacattattttttgtttaatcatgtgtattggtaagtgaaaatatgtatgaattttatttcagaataataggagttattatgaagtaattataaaaatgaaatgttaggctgaaaccactgttctagagcaaatggcattatttccaattatagttttataattaacaaagcttctcaggtttgtctgatccagataatttacatttgtttcatcaaaatatggatgctcagagcccatccttgtccagacacccatttgccttttgctcaaacaggagtgagttggtgtctgaagagacaggaatggaggggttctttataaactcctgcaatagcatcctccgataatagggtaacttagtcttaactagtagggtatgcacagatgtttccctacctgaggacgaaggtaaatgaatcaaatgagtagctggttatgtgacactatgctattaatacactgtattaataatgtaataa

SEQ ID NO: 715102 - DNA, 605 bp, Homo sapiens
ctgcctgtaccccctgctggstctctccccaccacagccaggggatccttttcaaatttcggtcagatcatgacgcttccctgcccaaactttcctatggcttcccatctttctcagagtaaaagccacagtcctcacagggcctcacagtccataccccacctgcccagccccaactctgaaatctcgttgacctcatccactgctctctctctcactcactctgcttcagccatgctggtctctgtggtttattcgttcagtttggtcagtaagtatttgagtgcctattctgtgctaggcaccactctcaggactagaaatataatggtgaagatataaccaaaaacatacacctatgccgtattgtaattagtctacttaaaccactgtctcccacatgacactattacgtctgttttcgtctatgtatctttgtgcctagcactatgcttggcaagtaagtgtttgagcggagaatgaaaagatggagatggatggatggatagatagatagacagatagatagatagagacagacagacagacagacttcacctttgctggaactgaggcatgtgctgtgagattctcccaggtagtat

SEQ ID NO: 715103 - DNA, 605 bp, Homo sapiens
ctgcctgtaccccctgctgggtctctccccaccacagccaggggatccttttcaaatttcggtcagatcatgacgcttccctgcccaaactttcctatggcttcccatctttctcagagtaaaagccacagtcctcacagggcctcacagtccataccccacctgcccagccccaactctgaaatctcgttgacctcatccactgctctctctctcactcactctgcttcagccatgctggtctctgtggtttattcgttcagtttggtcagtaagtatttgagtgcctattctgtgctaggcaccactctcaggactagaaatataatggtgaagatataaccaaaaacatacacctatgccrtattgtaattagtctacttaaaccactgtctcccacatgacactattacgtctgttttcgtctatgtatctttgtgcctagcactatgcttggcaagtaagtgtttgagcggagaatgaaaagatggagatggatggatggatagatagatagacagatagatagatagagacagacagacagacagacttcacctttgctggaactgaggcatgtgctgtgagattctcccaggtagtat

SEQ ID NO: 715104 - DNA, 1659 bp, Homo sapiens
tctgagtacaggccagccagggtgggtttaaatagcctcgggcgcagcctatcagcggaaagggcggagcttcactcctcctttccatcagtcacccccaactttcccaggctacacctcgtaggaaactgttctcctgctttgatttcatgcgccacctttgggacaatctaagaacttacaggttttcttggccagatttattaggaattgtatgcactgaaacactgaaaaccaactagtggttctgtgcttcccacgttgtggttttgacaccagcagcatccttgccacaatcaaaccccggagatccgcagatctgtgttgtaacaagacctccccctgaccctgaagcatggcagttgaagaagtctttccgtgtaagcgaaaagactttgaagaaaaggtggagatatgcgttgtataaacattcttttgctctggaaccacgtagagacttgggagccagttgggtggagcattcgttggatgagggtgctcgggttaggaatatcaaggtgtttctccagataatccaatcatctaattaagattccagttatgctcatctgttttaaaattccgtttgggtaaattcttttagtcagactgagaatggcaaagcctcaaccccaatttccagggagggtggagagcctcaggtggagttgatcaccaatagcctatggtttaacccatcatgcctatagaatgaggtctccatcaaaacccaaaaggactgggttcagagagcttctggataacacttccwggaaggtagtgcgcccctccccgcatggcgggccccacatttatttctgaactttgtgcaatgtccgctaaattacaacggcaaatgtaagtgtttccctgcgtgctgtgagctcttccagcaaatgaatgcaactaaatctgggagtggtggcaacctgatttatagccagttgctgagaagtacaggtaaaacaacttagggcttcccattgttattggtgtgggaggcctgtctggcgggactcggccctttggaatctaatgctatgtcccggtagatagcgtcaccattgaattagaagacacacatatgtggagaataatctttctggtcatttgctgcatgtcttatttacaatatgtaatcaaattctttatcctgaccttatggcacctgggtttaggaccatgatttgaaccaaacgttggtctgtcactttctgagtttgaaactttattttgcctttagcgttttgctattgctttttcgttttcttttgtttcgtttcgtttctaagttctggggtatatgtgcaggatgtgcagatttgttactaaggtaaacgtgtgccatggtggtttgctgcacctgtcaacccgtcacctaggtattaagcccagcatgcagtagctgtttttcttaacgctctgcctcccgaaaggccccagtgtgtgttgttccccttcctgtgtccatgggatctcacttttcagctcccattataagtgagaaggtggcgtttggttttctttccctggattagtttgctgacgataatgaccacacatcaccactgtttttgttttttagtataaagagtagtattttattgaataagatttgctcacagaaaaataagcttaaatctacaatgaatgccagac

SEQ ID NO: 715105 - DNA, 1659 bp, Homo sapiens
tctgagtacaggccagccagggtgggtttaaatagcctcgggcgcagcctatcagcggaaagggcggagcttcactcctcctttccatcagtcacccccaactttcccaggctacacctcgtaggaaactgttctcctgctttgatttcatgcgccacctttgggacaatctaagaacttacaggttttcttggccagatttattaggaattgtatgcactgaaacactgaaaaccaactagtggttctgtgcttcccacgttgtggttttgacaccagcagcatccttgccacaatcaaaccccggagatccgcagatctgtgttgtaacaagacctccccctgaccctgaagcatggcagttgaagaagtctttccgtgtaagcgaaaagactttgaagaaaaggtggagatatgcgttgtataaacattcttttgctctggaaccacgtagagacttgggagccagttgggtggagcattcgttggatgagggtgctcgggttaggaatatcaaggtgtttctccagataatccaatcatctaattaagattccagttatgctcatctgttttaaaattccgtttgggtaaattcttttagtcagactgagaatggcaaagcctcaaccccaatttccagggagggtggagagcctcaggtggagttgatcaccaatagcctatggtttaacccatcatgcctatagaatgaggtctccatcaaaacccaaaaggactgggttcagagagcttctggataacacttccaggaaggtagtgcgcccctcccygcatggcgggccccacatttatttctgaactttgtgcaatgtccgctaaattacaacggcaaatgtaagtgtttccctgcgtgctgtgagctcttccagcaaatgaatgcaactaaatctgggagtggtggcaacctgatttatagccagttgctgagaagtacaggtaaaacaacttagggcttcccattgttattggtgtgggaggcctgtctggcgggactcggccctttggaatctaatgctatgtcccggtagatagcgtcaccattgaattagaagacacacatatgtggagaataatctttctggtcatttgctgcatgtcttatttacaatatgtaatcaaattctttatcctgaccttatggcacctgggtttaggaccatgatttgaaccaaacgttggtctgtcactttctgagtttgaaactttattttgcctttagcgttttgctattgctttttcgttttcttttgtttcgtttcgtttctaagttctggggtatatgtgcaggatgtgcagatttgttactaaggtaaacgtgtgccatggtggtttgctgcacctgtcaacccgtcacctaggtattaagcccagcatgcagtagctgtttttcttaacgctctgcctcccgaaaggccccagtgtgtgttgttccccttcctgtgtccatgggatctcacttttcagctcccattataagtgagaaggtggcgtttggttttctttccctggattagtttgctgacgataatgaccacacatcaccactgtttttgttttttagtataaagagtagtattttattgaataagatttgctcacagaaaaataagcttaaatctacaatgaatgccagac

SEQ ID NO: 715106 - DNA, 1659 bp, Homo sapiens
tctgagtacaggccagccagggtgggtttaaatagcctcgggcgcagcctatcagcggaaagggcggagcttcactcctcctttccatcagtcacccccaactttcccaggctacacctcgtaggaaactgttctcctgctttgatttcatgcgccacctttgggacaatctaagaacttacaggttttcttggccagatttattaggaattgtatgcactgaaacactgaaaaccaactagtggttctgtgcttcccacgttgtggttttgacaccagcagcatccttgccacaatcaaaccccggagatccgcagatctgtgttgtaacaagacctccccctgaccctgaagcatggcagttgaagaagtctttccgtgtaagcgaaaagactttgaagaaaaggtggagatatgcgttgtataaacattcttttgctctggaaccacgtagagacttgggagccagttgggtggagcattcgttggatgagggtgctcgggttaggaatatcaaggtgtttctccagataatccaatcatctaattaagattccagttatgctcatctgttttaaaattccgtttgggtaaattcttttagtcagactgagaatggcaaagcctcaaccccaatttccagggagggtggagagcctcaggtggagttgatcaccaatagcctatggtttaacccatcatgcctatagaatgaggtctccatcaaaacccaaaaggactgggttcagagagcttctggataacacttccaggaaggtagtgcgcccctccccgcatggcgggccccacatttatttctgaactttgtgcaatgtccgctaaawtacaacggcaaatgtaagtgtttccctgcgtgctgtgagctcttccagcaaatgaatgcaactaaatctgggagtggtggcaacctgatttatagccagttgctgagaagtacaggtaaaacaacttagggcttcccattgttattggtgtgggaggcctgtctggcgggactcggccctttggaatctaatgctatgtcccggtagatagcgtcaccattgaattagaagacacacatatgtggagaataatctttctggtcatttgctgcatgtcttatttacaatatgtaatcaaattctttatcctgaccttatggcacctgggtttaggaccatgatttgaaccaaacgttggtctgtcactttctgagtttgaaactttattttgcctttagcgttttgctattgctttttcgttttcttttgtttcgtttcgtttctaagttctggggtatatgtgcaggatgtgcagatttgttactaaggtaaacgtgtgccatggtggtttgctgcacctgtcaacccgtcacctaggtattaagcccagcatgcagtagctgtttttcttaacgctctgcctcccgaaaggccccagtgtgtgttgttccccttcctgtgtccatgggatctcacttttcagctcccattataagtgagaaggtggcgtttggttttctttccctggattagtttgctgacgataatgaccacacatcaccactgtttttgttttttagtataaagagtagtattttattgaataagatttgctcacagaaaaataagcttaaatctacaatgaatgccagac

SEQ ID NO: 715107 - DNA, 1659 bp, Homo sapiens
tctgagtacaggccagccagggtgggtttaaatagcctcgggcgcagcctatcagcggaaagggcggagcttcactcctcctttccatcagtcacccccaactttcccaggctacacctcgtaggaaactgttctcctgctttgatttcatgcgccacctttgggacaatctaagaacttacaggttttcttggccagatttattaggaattgtatgcactgaaacactgaaaaccaactagtggttctgtgcttcccacgttgtggttttgacaccagcagcatccttgccacaatcaaaccccggagatccgcagatctgtgttgtaacaagacctccccctgaccctgaagcatggcagttgaagaagtctttccgtgtaagcgaaaagactttgaagaaaaggtggagatatgcgttgtataaacattcttttgctctggaaccacgtagagacttgggagccagttgggtggagcattcgttggatgagggtgctcgggttaggaatatcaaggtgtttctccagataatccaatcatctaattaagattccagttatgctcatctgttttaaaattccgtttgggtaaattcttttagtcagactgagaatggcaaagcctcaaccccaatttccagggagggtggagagcctcaggtggagttgatcaccaatagcctatggtttaacccatcatgcctatagaatgaggtctccatcaaaacccaaaaggactgggttcagagagcttctggataacacttccaggaaggtagtgcgcccctccccgcatggcgggccccacatttatttctgaactttgtgcaatgtccgctaaattacaacggcaaatgtaagtgtttccctgcgtgctgtgagctcttccagcaaatgaatgcaactaaatctgggagtggtggcaacctgatttatagccagttgctgagaagtacaggtaaaacaacttagggcttcccattgttattggtgtgggaggcctgtctggcgggactcggccctttggaatctaatgctatgtcccggtagatagcgtcaccattgaattagaagacacacatatgtggagaataatctttctggtcatttgctgcatgtcttatttacaatatgtaatcaaattctttatcctgaccttatggcmcctgggtttaggaccatgatttgaaccaaacgttggtctgtcactttctgagtttgaaactttattttgcctttagcgttttgctattgctttttcgttttcttttgtttcgtttcgtttctaagttctggggtatatgtgcaggatgtgcagatttgttactaaggtaaacgtgtgccatggtggtttgctgcacctgtcaacccgtcacctaggtattaagcccagcatgcagtagctgtttttcttaacgctctgcctcccgaaaggccccagtgtgtgttgttccccttcctgtgtccatgggatctcacttttcagctcccattataagtgagaaggtggcgtttggttttctttccctggattagtttgctgacgataatgaccacacatcaccactgtttttgttttttagtataaagagtagtattttattgaataagatttgctcacagaaaaataagcttaaatctacaatgaatgccagac

SEQ ID NO: 715108 - DNA, 654 bp, Homo sapiens
ataagagaaactcaataaatgtctgacagattaattacaatcctttccatttagttacaaggcctcttgcaccgccaatgatttattgaaccattttatcartcatccccatttgacttaattttacaaccttaatacatttattcatcataaaggcagctaatgtttggggaatctagaacaaaaactatctatctctgccagatacagaagggactggaaatcagacgtttgcagttacaaacaaatacacacctcttggtgtgcaaattcatttacacttggcaaatcattgcttcttgtttgttgactaaaagctctttaaaaggctcaaatagcttctttggtatcaactaacttgaaaaaacaccattctgattctttaaatttaaataaataaaaaacacatgggttaaatttctcttaaaacacaaatggtttttaaaatgagagaaaaaggtgcttagcaaaagacagcttgggctttattgaacccagagcttttcaaaaatagtttatgctacttaatgagcccaaaccatggttatttaaaatataatttttaaaggtgaagtctaaaaaaagatatttaataaaaatactctaattctaaactttctataaaatactgctaataaacagttttactttgaa

SEQ ID NO: 715109 - DNA, 621 bp, Homo sapiens
ttacttctgatttcaggcaccttgtggcaacatgtctggcccataataggaactccataaatattcakcaaatatagttttgggatgaatttgtattgtgggacacttgaaggagacatttaatctgaagaatccatctttattttcataagctctcctaccctttatttacccttctacaatcccaataatgaggtaaagtctcccaatttgtatagatcctatggtaatctccacaatccaaatggttgaaacagtatctctgtgcctcattgtttttattttttctactcagggtcatccagtggcttcatttattcaaataagcatcctttaaagcaattattcattctgagtaactgaatggagctcagtgtagcaaagcagtctacaatctgcttcgtgattacctatgacatttcttgggcaaaataaactacatttcttttttcatgaaagtggctacatcagcaaagacccagagcagtcaactcactgatgacagtcacgtgatttcctgaatttcacaaataagttgtcagttaaaaacaaaacaaaacaaaacaaaaaatgtctatggggaccttacaatttctaagcttttattcttccaggaaatga

SEQ ID NO: 715110 - DNA, 583 bp, Homo sapiens
ttggacacaggaaggagaacatcacatatggggcctgttgaggggtggggggaggggagagggatagcattaggagatagacctaatgttaaatgacgagttaatgggtacagcacaccaacatggcacatgtatatatatataacaaacctgcaagttgcgcacatgtaccctagaatttaaagtataataaaaactataaaaaaagagagttattggaatttgcttcatattgtgcaaccccaatgatggcctctatatttcccacttgataaagttaaaattcctatatttgtgatatagcactgtgataagcacgcttaccaaaaggaagagtgttgtggaaataattagggtggagatgggagcaatttacttttgagtggtcagggaaggccattctgagaatacratgcttatgattagttatagaaggtgaggctattcagacaaatgtgtagagaggctgaggtatgccaaaaaaaaaaaaatccaaggaaaggggtaaggcatgtaaagttcttaagaggagagagatagcttggagatttaggaagcctgaataagagcagtgtgacagaca

SEQ ID NO: 715111 - DNA, 554 bp, Homo sapiens
tggagaaagaatggttctttcaaaatacaaattttgtcatgccatcttcagactaaaaactaattatttctcttctagttttcttggaatgaaaaccaacaacctctamggctcttggtgatgtgtttccaggctttaccccaagtccttttttaagattttgttgttaacttttcttcctgaatcagcgttttccctggtctcacagcaaatggtgggtttcctgccctatgctccctctgttccatgtaatttttcttcagagtattaccagggtttgaaataacatgtatatcttttaatattacttatgcttatttgtgtcactagtctaataagattcacaagggaaaagactatgcttttctaacacaccattatacctccaaagtgtaacacagtgcctggtttatggaagaaattcaatattttaaattgatttatgtattagtagatggatgaatgaactttaaataaagtgatatgacttttctttcagagggaggttatcatgggcacaattatacagaatacctctttatacaagatgccat

SEQ ID NO: 715112 - DNA, 1155 bp, Homo sapiens
tccttaaagcaatattttattccaaaacagaatggagtgacattttyaggatatatattagttttactaagcaatggtgtcttacaagaaagagtggaacagacaataaaaatgcagtgcctcatggaacattgattttatccactctttagaataagctgtcgataaataagaaagatataaagaaactttattatatgttatgaaaatgaacattaaaagtatttaaaatagaggaatgattgttggagaggaggatggtagaacagaatataaatgttatagtcttcaatatgaataaataaaacaatttataatttatagatattggctagagtaaaaaaacatagaatgggttgttttccaaatattaacttggggtaaacttttattgtattactgcaataaatcttttaacagtaaaataataataataataataatttcaaatcagatattcagatctcatggaggtagagagtagaatgattgttatcagatgttcagaagaatagcgagaagtggggaataaagaaaggttgaataatgggtacaaaaacacagtgagatagaaggaatacaatctagtgttcagtagcaaaatagggcaactattgttagcaataataatttgtatatttcaaaataactagaagagtgaatttagaattttccaaacacaggaaaataaatatttgaggagatagatatctcaattatcctgatttgatcattacacattgtatgagtgtatcaaaatagcacatgtaccacataaatacatactattatgtacccccaaaaattttcaaaaatgtaactgtaaatgtgctttaaaaaaatcagaaagagaaagagtggaagaagacattactatgtaaaaatctattaattcccattcagccaatatacagtatgtatgcaacaggtatgtttcacatttgtaacttcaatgtcacttttttctttttgctctattatttcccacatgtaagttaaatggttttaaaaatataaaaccataacaatttcatttttattcaattttcaaatcatcataatacaaaatatgctatactcgtatatttttgtgacatatagactgctcacttctcaggctaacttaaaaatatttgttaaacctttacttaaaaa

SEQ ID NO: 715113 - DNA, 594 bp, Homo sapiens
tttccccattgatttagcaaaacgtttaaaaagccataatgccagaaaagttatattgattggtattaggtatctaggtatttgttsttgttgatatgtaagcaatcaacttctaggacttttttttaaaataaaataactgcctctctgaggtacagaggtgtttgttgcagtaaattttagactatttatccctttcttttggtagtatgttaagtttatcaacgtatagtatttgtataattggggagaaaaggattttctttaagatgagggaaaataaaaaatgagatacaactgaaggatcaaacataaaatcttaggaaaatgaaagaataaatgaagaacaactctgtcatggttaattttatgggtcatcttgacttggcacaacatgcccaaattaaacattacttctgtgttaatttttttcatgagattagcattcatttgacggaatgagtaaagcagattgtcttctccagtgtgggtgggcacgatccaatctgttgagggcccgaatagagcaaaaggagaaattagcacctttttttcctgccttcctgattgagctgggacagctcatctcttctt

SEQ ID NO: 715114 - DNA, 594 bp, Homo sapiens
tttccccattgatttagcaaaacgtttaaaaagccataatgccagaaaagttatattgattggtattaggtatctaggtatttgttgttgttgatatgtaagcaatcaacttytaggacttttttttaaaataaaataactgcctctctgaggtacagaggtgtttgttgcagtaaattttagactatttatccctttcttttggtagtatgttaagtttatcaacgtatagtatttgtataattggggagaaaaggattttctttaagatgagggaaaataaaaaatgagatacaactgaaggatcaaacataaaatcttaggaaaatgaaagaataaatgaagaacaactctgtcatggttaattttatgggtcatcttgacttggcacaacatgcccaaattaaacattacttctgtgttaatttttttcatgagattagcattcatttgacggaatgagtaaagcagattgtcttctccagtgtgggtgggcacgatccaatctgttgagggcccgaatagagcaaaaggagaaattagcacctttttttcctgccttcctgattgagctgggacagctcatctcttctt

SEQ ID NO: 715115 - DNA, 1330 bp, Homo sapiens
acaagacagagtgaactcaggaatcctttttgagaattgcctctcacgctctaatgtctaagcaggtctaagtcacgctggaaccttcttcccaaatccttctcttcccttcacagcctcctaaatctcttcctccctttcttccctgctcttatcactctcctggcctttaaaatctaaactgacagtaggtgcaggaaaacaatgagagtggaaaaaccgatcaagtcagggatggagacccccgttcccttcgccgcgttgcccgacagtcgccaccccacacccgaggggtcggtgagcagcacggccccttcctctaacgtgtctgtctggttccggctccagagtaacgccagcctcagaatgaggtgggaagtgcctcctcttggcttctggaagagtctgtgtaaaactggtgtggtggagttcatgaagtcatttgggcctgaagttttctctgcaggaagattgctagttactaattcctctaatagatacagtgttcattgtgttttgacgtttatgtcttcggtagtcgatgtcctttagaatgtgtttatgtccttggtagtcgatgtcctttagaatgtgtttatgtctttggtagtcgatgtcctttagaatgtgtttatgtctttggtagtcgatgtcctttagaatgtgtttatgtctttggtagtcgatgtcctttagaatgtgtttatgtctttggtagtcgatgtcctttagaatgtgtttatgtctttggtagttgatgtcctttagaatgtgtccatttcatccagctggataacatatcagcayaaaggtgtctgcgggtcctttgctatcctccagcatgcgcagaaccagatggcgtcccctctctcgctcgtgacctgggccatgtgcgtcgtctcttttttcctgaccattctggtgggaagtttatcaattttgttgatcctttcaaagaaccggcttctgattgcaaatatcataaactctgatatttattatttttttacatttgcttacttggaatttcattttcattatctagatttttaaggtaaactctgaggtcatcgatctgaaactttcttctcttctgatataggcacgtagtgttataaggtgcccttcatactgctttagctccatcccacaaatgtggtttgttttcactttattaaattcaaaatcctttctaatttccacttgactgcttcttcgacctactgagaagtgttgagttttcaaatatttgggaatttccaggttttctaacttaattccattattgttcagagaatgcactttatatgattttggtttttatatgcat

SEQ ID NO: 715116 - DNA, 623 bp, Homo sapiens
ggaccttccagccgcgactgaaaaactgcactcagccacaggctcagtcctgaccgggaagggctgtttcaacataagtctcttgggatttttggttttcaaaagggggcaggcggagctgcaggactgccaggctccagctgagcgtgcctcacttgctacaagggaagctctggtgtgtccccttccaaacacagctgctgctgtccgggtgggagtggggagctgtccgggtgggagtggggagctgtctgggtgggagtggggagaaactcgggtttcttgatgctcagagctgagctccgggctggggccccagacctcccccagacaccaaccagatgacctgcaggctacagcaaggcgtggcccgccggagcagaagctccccaggagggacccagcgtgagcacgtggcgccaacaaccgcacactgctgccaccacccgccrccgccaccgcacgtctgtgaaccaacattgtatccccactccagagaagcagcgctgagctgccagggcctgtttcccggaccccggctccaaggtgtctgggctttcttcccaggtccctacttttctagccccttccgccgactttggagaaagatcattcaaaccgga

SEQ ID NO: 715117 - DNA, 611 bp, Homo sapiens
ggttcttgacatttgattggctstgtatttgcctaatttccatcttcttccctgctctgttatccctatcccaaacaggtttagccacctacaaatctttaaaacactgatccactaagacatggatctcatcacccaatgtatttacaataaagcttccaacctccttttcagacggaggaaaaaagaaaacaaacaaacaaaaaaaaaacacttgaaacagtagagcattaaaaatgtgttgtaaatagacaactatttccactttagccgtccaaacggattcggttttctggggctatgccaataggcaaataattgacttactgttgctttttttaattccattaatataagaaacaaatcatttattagccttctttgtctgagtaagtggctgagtgcatatattttcttcatgtgtgggtgaaagagcatagaagataatgctaataattcaattttaagaacttctgttgatttcttcagtctattctgccttcttcgtgtgacgagaagaagaataccaagcaagctgtcccttgaattaaagaggagcagtttataaaaatgatactacaggctaaggagcgaaacttaggttttagcct

SEQ ID NO: 715118 - DNA, 450 bp, Homo sapiens
acacatgtggaacccatgcatatgcccagctcactgtacccaatattatttctattgttatttttagtcaagtgttaatgaggaagaatttgctttaaatgtctaaaaattctaacgctgttagtctaagcaatatttgcccatttattttcctcttacgatcttctagatgaatcattttctatggagatctttaacttaatctgctccaattcttttaccttcaggaagtggctggtgttgccaagtcattggggctcatgtctattctcacttacaagcctcagctcagaagacttcccttgcctcctttatctccttgcctttytacaccacacttgcttccacccacaccatacataccagtggtccatcttcctgtaactgaaaattgtttaagtgtgagtattttgtccatctactctcagcacctaggacatgactgataaa

SEQ ID NO: 715119 - DNA, 2268 bp, Homo sapiens
ttcttttcttttctttcttgagacagagtctcactctgtcacccaggctggagtacagttgcgtgatttcagctcactgcaatctccacctcccagattcaagcaattctctgtctcagcctcccgagtagctgggattacaggtgcccgccaccatgcctggctaatttttgtatttttagtagagatggggtttcaccatcttggccagggtggtcttgaactcctgacctcattatccacccacctcaacctcccaaagtgctgagattacaggtgtgagccaccatgcctggccagttttaacctctttaagtatccttactaagaaacagatcagtagtagcacctatctcataggttttatttttttggtaaatattaggtgatttatagaaagctcctaatatttacaccccaaacttttcactaaaaaattgttagcctgcagttttttaaaggaattaatgacaacacagtagtcttccagattcattgttttgttgccatttctatttttacagatttgaaattccagctaccaatatctacatgggatatttcaaatctcatgcctagtaatatagttagaaaatagaaagtattgacactggtactaactgtaaaatacaatgtaattgaaattaagaactttggttaaaatgagagacacctgatatggtttggatgtttatcccctccaaatctcatgttgaaatgtgatctctagtgttggaggtgggacctagtgggaggtgtttaggtcatgggggcagatccttcatgaacagcctggtgtcttctctgctgtaatgagtgagttctcactgtattaattcacatgaaagctggttttttagaagagcctggcatctccctcttgctccctctctcatcatgtgacatgactgctcctcatttgcctttgaccatgattgaaagcttcttgaggcctcaccagaagctgagcagatgctggtgccacgctcatacagcctgcaggactgtgagcaaaataaatctcttttatttataaattactcagcctcaggtacctttttctagcaatacaaaatggactaatacaacacacaacttggactacaagataagaagatgaggaaattcttggttcatgcaactataaattctccatttcctccccttctttcctctttgctgtcttcattctcagggagaatggaaagatggttacaaacaattccaagtttagattatcctgacaggtaaccatcccagtgaagaggatccagtgtaattatggattatgtataatcaaaagaatatgtctagttagcttaattgaagtctttcgtcaacatcctagaaaggtgtatgtgagcactcaytggcaaaaggacagcctaacttaaaccatgtgactgacctaagaatgggggaggggtggttttccaaagagagtgggcagacagaaacctgctcacttcatagagtctacccaaggctaatagacttcaaaactgactgattcatcatgagaacttgctgtttgtgtatattatcaaaataaagacccaataaaataggtaaaagttatatagcatttgtcaatatgtcagatagcattctaagagtttacttatagtaacccatttaatctttccaacaacaagaggtaaattttcatttttcagatgagaaaattaaggcacaaatacattaagtaaagtggcaaaactaggatttgaatccaggagtctggctctagaattcgtgcctttaaccattatgccatttattattccttctctgaggttgagaggaaacattaagatgaagtaatgaaaggtgaaatttagcttatctgattaacagctgtgctggttatctgcagttgccactccagatagtggtctccacttactagccctctctgtcttgggttctcccactgctccctcccatcgctactgcaagcatggaagtaatatcttcttaactgtactaaactcaaagtgtttcactatcccttgttgatgctcctaattttgtctcaaagctttgtagagtccttctattaagttcatcaatagtaagcatggtggtgccatctctttcttgcttatttccaggctgatacaatagacacaattctgttattagttatttgaatttgaaagaggatatccatcacagagctcaaaaatagcttttctccttgaatggaaagatatatcatttttatacacaatgggaaaaagctaattttacaaatctaaagcagaa

SEQ ID NO: 715120 - DNA, 1143 bp, Homo sapiens
tgaagtgatcagacttagtaggaaaagattgaggagaaatttggtaaacattatcgaatccaaaaaatgtggtaaactggttgagaawaggtttgtgcacaatttggaaccaaagtaagaataaagtctactgagtcaaaattaagcaaaagaagactagatagtaataaagctttgtggtcatggtgtggtatgcagaacaatagttctcaaaattgttcatgtccaatccttggaacctgtgaatgttactttctatggcaaaaggaattttgctgatgagataaagattaagaactttgataaacactacatgctctcactcacatgctaaagctaagagaaggttgatctcacagaagtaaaaagtaaaacagaggttactagaggctgagaagagtaggaggagataggggatagggagagatttgttaaaggacacaaaattacagctagataggatgaatggattctagcatttcatagcactgtaggatgactagagttaacaataatatattatacattttcaaacacctggaagagcatattgaatgtttccaacacaaagaaatgatacatgtttgagatgatggatatgctaattatgctgatctaatcattatgcattgtaggtactgaaacatcactttataccctataaatatgtacaattattatgtgtcaattttttttaaaaaaaaattaagacctctgagataggaagaatatcctggattatccaggtgggtgcaatccaaaaacatgaatccttaaaagaatgaaacctttcccagttatgttcagaaagatgtgaagctgaaagaaggtcagagagagatacaaaaaacattgctgactttgaagtcaaggaaaggggccatgagccaaggagtgtgggagctggaaaggagagtaaagggtttctcccccagagcttccagaaagaaaggcagttctgccagtaccttgattttcatccagtgagcctcatgtcagattcctaacttacacaactgtatgataataataaattcatgctgtttttcagcgactacatttgtggtaaatttgttatggcagaaacagaaaactaacctgcatgattaacctgcaagagttctaagtattcctactgatgta

SEQ ID NO: 715121 - DNA, 1143 bp, Homo sapiens
tgaagtgatcagacttagtaggaaaagattgaggagaaatttggtaaacattatcgaatccaaaaaatgtggtaaactggttgagaaaaggtttgtgcacaatttggaaccaaagtaagaataaagtctactgagtcaaaattaagcaaaagaagactagatagtaataaagctttgtggtcatggtgtggtatgcagaacaatagttctcaaaattgttcatgtccaatccttggaacctgtgaatgttactttctatggcaaaaggaattttgctgatgagataaagattaagaactttgataaacactacatgctctcactcacatgctaaagctaagagaaggttgatctcacagaagtaaaaagtaaaacagaggttactagaggctgagaagagtaggaggagataggggatagggagagatttkttaaaggacacaaaattacagctagataggatgaatggattctagcatttcatagcactgtaggatgactagagttaacaataatatattatacattttcaaacacctggaagagcatattgaatgtttccaacacaaagaaatgatacatgtttgagatgatggatatgctaattatgctgatctaatcattatgcattgtaggtactgaaacatcactttataccctataaatatgtacaattattatgtgtcaattttttttaaaaaaaaattaagacctctgagataggaagaatatcctggattatccaggtgggtgcaatccaaaaacatgaatccttaaaagaatgaaacctttcccagttatgttcagaaagatgtgaagctgaaagaaggtcagagagagatacaaaaaacattgctgactttgaagtcaaggaaaggggccatgagccaaggagtgtgggagctggaaaggagagtaaagggtttctcccccagagcttccagaaagaaaggcagttctgccagtaccttgattttcatccagtgagcctcatgtcagattcctaacttacacaactgtatgataataataaattcatgctgtttttcagcgactacatttgtggtaaatttgttatggcagaaacagaaaactaacctgcatgattaacctgcaagagttctaagtattcctactgatgta

SEQ ID NO: 715122 - DNA, 1143 bp, Homo sapiens
tgaagtgatcagacttagtaggaaaagattgaggagaaatttggtaaacattatcgaatccaaaaaatgtggtaaactggttgagaaaaggtttgtgcacaatttggaaccaaagtaagaataaagtctactgagtcaaaattaagcaaaagaagactagatagtaataaagctttgtggtcatggtgtggtatgcagaacaatagttctcaaaattgttcatgtccaatccttggaacctgtgaatgttactttctatggcaaaaggaattttgctgatgagataaagattaagaactttgataaacactacatgctctcactcacatgctaaagctaagagaaggttgatctcacagaagtaaaaagtaaaacagaggttactagaggctgagaagagtaggaggagataggggatagggagagatttgttaaaggacacaaaattacagctagataggatgaatggattctagcatttcatagcactgtaggatgactagagttaacaataatatattatacattttcaaacacctggaagagcatattgaatgtttccaacacaaagaaatgatacatgtttgagatgatggatatgctaattatgctgatctaatcattatgcattgtaggtactgaaacatcactttataccctataaatatgtacaattattatgtgtcaattttttwtaaaaaaaaattaagacctctgagataggaagaatatcctggattatccaggtgggtgcaatccaaaaacatgaatccttaaaagaatgaaacctttcccagttatgttcagaaagatgtgaagctgaaagaaggtcagagagagatacaaaaaacattgctgactttgaagtcaaggaaaggggccatgagccaaggagtgtgggagctggaaaggagagtaaagggtttctcccccagagcttccagaaagaaaggcagttctgccagtaccttgattttcatccagtgagcctcatgtcagattcctaacttacacaactgtatgataataataaattcatgctgtttttcagcgactacatttgtggtaaatttgttatggcagaaacagaaaactaacctgcatgattaacctgcaagagttctaagtattcctactgatgta

SEQ ID NO: 715123 - DNA, 1143 bp, Homo sapiens
tgaagtgatcagacttagtaggaaaagattgaggagaaatttggtaaacattatcgaatccaaaaaatgtggtaaactggttgagaaaaggtttgtgcacaatttggaaccaaagtaagaataaagtctactgagtcaaaattaagcaaaagaagactagatagtaataaagctttgtggtcatggtgtggtatgcagaacaatagttctcaaaattgttcatgtccaatccttggaacctgtgaatgttactttctatggcaaaaggaattttgctgatgagataaagattaagaactttgataaacactacatgctctcactcacatgctaaagctaagagaaggttgatctcacagaagtaaaaagtaaaacagaggttactagaggctgagaagagtaggaggagataggggatagggagagatttgttaaaggacacaaaattacagctagataggatgaatggattctagcatttcatagcactgtaggatgactagagttaacaataatatattatacattttcaaacacctggaagagcatattgaatgtttccaacacaaagaaatgatacatgtttgagatgatggatatgctaattatgctgatctaatcattatgcattgtaggtactgaaacatcactttataccctataaatatgtacaattattatgtgtcaatttttttwaaaaaaaaattaagacctctgagataggaagaatatcctggattatccaggtgggtgcaatccaaaaacatgaatccttaaaagaatgaaacctttcccagttatgttcagaaagatgtgaagctgaaagaaggtcagagagagatacaaaaaacattgctgactttgaagtcaaggaaaggggccatgagccaaggagtgtgggagctggaaaggagagtaaagggtttctcccccagagcttccagaaagaaaggcagttctgccagtaccttgattttcatccagtgagcctcatgtcagattcctaacttacacaactgtatgataataataaattcatgctgtttttcagcgactacatttgtggtaaatttgttatggcagaaacagaaaactaacctgcatgattaacctgcaagagttctaagtattcctactgatgta

SEQ ID NO: 715124 - DNA, 627 bp, Homo sapiens
tgccatattagtgaaaattattttccaatttccacatgttaaatattggcttatattgtaccaaacactttcctatattttctaattattttttctagtattttacaatggtttagtgtgctaaccttttttttttttagttaaagaatacattttccatgttgttatctaggtcatgaatgaaaatgttaaacagaactgggccaagtctctacagagcatttcttattatgtcttccattctcaccctgaactgttgataataatattgtagataagccacgtacacactccttctataactagttgtgagtcgaatagttcacttgaatagtttgaattttcccaatgtattgataaacatgtgaaacaaaataaaaaatcttgctaatataaaagtctgttgtacctattattgtccttgtattttccaaagccattatttaggatgacaaggctttttaatttttgaaaaaaaaaattctaagacctttwtttccagattagaaaatctttctggatattttgttgttgttgttaattaaggcgcaaacacaatacatacataaatatgtagtttttaatataaacttttcattgttttttattttaactttaaaagactct

SEQ ID NO: 715125 - DNA, 1082 bp, Homo sapiens
ttatttgctatttgatatagttgggctatgttcccccccaaatcttatcttgaattgtagttcttataatccccatgtgttgtgggatggacccagtgggaggtaattgaatcatgggggcaggtacctccatgctattgtagtgacagtgagtgtgctatcacaagatctgatggttctataaaggacttttcccctgcttggatctgcacttctccttgctgctgccatgtgaagaaggacgtgtttgcttccccttccacaatgattgtaagtttcttgaggcctccctagtcatgctgaactgtgagtcaattaaaactctttcctttataaattacccagtctcaggtatttcttcatagcagcataagaatggactatgctgctatttaaagggactcagcagtaaaaaatataatccagatctaagagcactaagcataattccctcagggaacaattgcacagcagccctccatcttggtcttgcattttaatgttattctgtttttattattttttaattctacattctctgaactatttttcctacaattgcaaagattacagtgtccagtgaatggatactatcccacattatttgtggagcaaaatattgctttctatacttctcatttagggagatcagaagctacaaaataatttgacaaggagtaaatgccagatgtgatctttcctaatcgattaatagacacacacctgcttctcttaagccacaagaagtattaatgtagacttaccagatgcttatagtggatgaaggttagtgaagcagcaaagcaaaaggttccatmagctgattcctccctaggtaacagctaaagatatttttgcctcaggactttcataggaagaaaaaatgccatgaaggaaaaagaatttgagaaattagaagaaaaaaaatataaaaaaaagaaaaaaggtaggaacctgtttgtgatgaacatgagctgtatatagagagttattctttttttaaaataataatattttcctctctaaatagaaaagatctttccataattcctaggcattaatggtatagtccagaatatgtc

SEQ ID NO: 715126 - DNA, 939 bp, Homo sapiens
gttggtctcataaaatttttactggctgttttcttctttacttttctatcactaccttatttggcttaaaagtgctccatgtttcactcaatgtgacaataaattagatgtggttgatgcttttagatttgcagggggctttgtttgtttgttttaaggcccattccacctctgccactgctgacctagtcctcaacacaggaatcggattttactctgcttgtagccccagaacccagcattgaagggtatagaatactaccatggattaagtgtgcacgtcccacttaacccaatgtcacctttgagagctacggccttattcccattttaggaatggttactcctgactcagtatcccatatttaagtggcaaggccaatgctctttgtaacatgccatggtgactttgtctgggagagaggtggaaaaggagaggggaagaggaaggggaagagagagaagaggacaatgatttggcctggatattgactaacataaagagtagggggaactctagaatgagattgttgaactggagttgagagagtgggtggagtggaagtaaaagtgaattattttactaagaataaaaagaaatatcagcaacagcaaattaagctcagtttcaaccatagaccctggttgaattatttcccttcctgamggcaaaacacttacagagactgcctgaaaatctgaaatgaaaagtatagctttgccattcaacagtcatttgctaaagtctgttatgtggggcatgagtctcctgccatacccagtggagaaattctgactgccttcccctccaagaggtgacccactcagattaatacctgggatacggtacagacagagctttcactagttttccacatttttactaactcagagttttatgttcctctttaggctcatgcccagtctaactacgctagc

SEQ ID NO: 715127 - DNA, 608 bp, Homo sapiens
caaattgttagctagtcttattacaatatatgtccaattttccartatttcccatcccgtgtaccttttgtttatttatacattcaacaactatttattgggtgcattcaagtgccaagcattaagacaaacattcctgaaccttacagtttggctcatgaaacatgactgaaacattaaaataaaagacacccaaactgtgtaagatgcatagtaagctctctgttctatggaaacctttgtgaaggagtctggataaaactggcccagaagggtagataaagtattgcaaggtggagaagcggacaatgatgtcacagaaagatttcccaggataagcaaaaacatggagggatggctggagaactgatattcattaagtgccaactgtattttaagctttgttgtttgttacacataacttaatctcacattagttctgagcccacttaaatatgaagctgaagcccaaaaagctcttctcatactgttgataattggttgagtcagaatcctaaactttttctttacaatactccagagcccatgcatcaaaacatacaagaaactaagctcaccaaaacacagtttgcttttagaagttgtgg

SEQ ID NO: 715128 - DNA, 608 bp, Homo sapiens
caaattgttagctagtcttattacaatatatgtccaattttccagtatttcccatcccrtgtaccttttgtttatttatacattcaacaactatttattgggtgcattcaagtgccaagcattaagacaaacattcctgaaccttacagtttggctcatgaaacatgactgaaacattaaaataaaagacacccaaactgtgtaagatgcatagtaagctctctgttctatggaaacctttgtgaaggagtctggataaaactggcccagaagggtagataaagtattgcaaggtggagaagcggacaatgatgtcacagaaagatttcccaggataagcaaaaacatggagggatggctggagaactgatattcattaagtgccaactgtattttaagctttgttgtttgttacacataacttaatctcacattagttctgagcccacttaaatatgaagctgaagcccaaaaagctcttctcatactgttgataattggttgagtcagaatcctaaactttttctttacaatactccagagcccatgcatcaaaacatacaagaaactaagctcaccaaaacacagtttgcttttagaagttgtgg

SEQ ID NO: 715129 - DNA, 1749 bp, Homo sapiens
agaataagcattttggagaagacatgaatgtccactatacatcaaaatatactcaatctcaataataaaaacaaaatttaagaattagtgagatagtttttcatttattagataagcaaagattgtcttttttttttttttttttagatggagrcttactctgttccccaggctggagtgcagtggcgtgatcctggctcactgcaacctccacctcctgggtacaagcaattctctgcctcagcctcccaagtagctgggattacaggcgcccaccaccatactcggctaatttttatatttttagtagagacggggtttcaccatcttggccaggctggtcttgaactcctgacctcatgatccacccgcctcagcctcccgaagtgctgggattacaggcatgagccagggtgcccagccaagattgtcttttaaaaaggcaatacccactgttggtaaaagcacaggcaaaagagaattctgaatcattcatggtaagaatgtaaattggtacctctttctggagagcaattagatgattcttaaccaaaccttttgttatggtggccaaaagttagcaacaggctaagtgtcagcaagggactggctaacaaaccatgatgtgcaatgcaaccaccaaaaataattatgcaaaattataattatacaaaaattcaaaatatgtaattaaagtttttttagaaaactgttttaatacacactatgcaaaatatcctactttgagttttacaaactgcaaatagctatatgtaaaactgtttgtaaatatataaaacgtatttgtgtatatatgtaatgcctagattttgagtattcaccaaaatgttgtcatgtctactctgcacagctggattaatggtgatatttaggtatgttttgctgtgaaacaaaccaccccaacacttagtgacgtaaaatagcaacttctattatttgttattttttcaccattttgtgggctggcctggcagttcttcagtaggtctcacctaggttttctagtgtggcagcaggcagccagctgtggggttgtctgggtcgggaggacaaagccccctcacatgcctcacagctggttgatgctggctgttatttgaggctcctattctccctttctcaaatcttcaatgttctgaacaggaatccccatgattcctgagacaatggagtggtaagtcaaaatgacaaagaaaattctggagaggatacttgaaaaggaggttttgaaaattgactagatctctttgggaaaagagttctgaaaaggagactttctacgacacttattaatgatttatatattatcttacatgttaacattttgtgagcacttacagtatacagaccctctttgaagtgcttcaactgtattatataatttaatcctcacaacaaccttatgaggtaggaactactactgtaatccatttatacacaagaaaattaagtatagcacagagaggttaagaagccatgcatcctggctcataattattacactatattgttacatggtttgtgattccattatgcatttatatttttcacaaataatatataaacaccccaacgtcaggctggttctttatctccagtattgcttcagtaatggacaggttgatcaattggtgaaaatgcccaaagttataaagaaaaagaggtggaggaagggatgtcatgcaagtgggaagaaagccacaaaagcctgagaaaggaagtttccaa

SEQ ID NO: 715130 - DNA, 1749 bp, Homo sapiens
agaataagcattttggagaagacatgaatgtccactatacatcaaaatatactcaatctcaataataaaaacaaaatttaagaattagtgagatagtttttcatttattagataagcaaagattgtcttttttttttttttttttagatggagacttactctgttccccaggctggagtgcagtggcgtgatcctggctcactgcaacctccacctcctgggtacaagcaattctctgcctcagcctcccaagtagctgggattacaggcgcccaccaccatactcggctaatttttatatttttagtagagacggggtttcaccatcttggccaggctggtcttgaactcctgacctcatgatccacccrcctcagcctcccgaagtgctgggattacaggcatgagccagggtgcccagccaagattgtcttttaaaaaggcaatacccactgttggtaaaagcacaggcaaaagagaattctgaatcattcatggtaagaatgtaaattggtacctctttctggagagcaattagatgattcttaaccaaaccttttgttatggtggccaaaagttagcaacaggctaagtgtcagcaagggactggctaacaaaccatgatgtgcaatgcaaccaccaaaaataattatgcaaaattataattatacaaaaattcaaaatatgtaattaaagtttttttagaaaactgttttaatacacactatgcaaaatatcctactttgagttttacaaactgcaaatagctatatgtaaaactgtttgtaaatatataaaacgtatttgtgtatatatgtaatgcctagattttgagtattcaccaaaatgttgtcatgtctactctgcacagctggattaatggtgatatttaggtatgttttgctgtgaaacaaaccaccccaacacttagtgacgtaaaatagcaacttctattatttgttattttttcaccattttgtgggctggcctggcagttcttcagtaggtctcacctaggttttctagtgtggcagcaggcagccagctgtggggttgtctgggtcgggaggacaaagccccctcacatgcctcacagctggttgatgctggctgttatttgaggctcctattctccctttctcaaatcttcaatgttctgaacaggaatccccatgattcctgagacaatggagtggtaagtcaaaatgacaaagaaaattctggagaggatacttgaaaaggaggttttgaaaattgactagatctctttgggaaaagagttctgaaaaggagactttctacgacacttattaatgatttatatattatcttacatgttaacattttgtgagcacttacagtatacagaccctctttgaagtgcttcaactgtattatataatttaatcctcacaacaaccttatgaggtaggaactactactgtaatccatttatacacaagaaaattaagtatagcacagagaggttaagaagccatgcatcctggctcataattattacactatattgttacatggtttgtgattccattatgcatttatatttttcacaaataatatataaacaccccaacgtcaggctggttctttatctccagtattgcttcagtaatggacaggttgatcaattggtgaaaatgcccaaagttataaagaaaaagaggtggaggaagggatgtcatgcaagtgggaagaaagccacaaaagcctgagaaaggaagtttccaa

SEQ ID NO: 715131 - DNA, 1749 bp, Homo sapiens
agaataagcattttggagaagacatgaatgtccactatacatcaaaatatactcaatctcaataataaaaacaaaatttaagaattagtgagatagtttttcatttattagataagcaaagattgtcttttttttttttttttttagatggagacttactctgttccccaggctggagtgcagtggcgtgatcctggctcactgcaacctccacctcctgggtacaagcaattctctgcctcagcctcccaagtagctgggattacaggcgcccaccaccatactcggctaatttttatatttttagtagagacggggtttcaccatcttggccaggctggtcttgaactcctgacctcatgatccacccgcctcagcctcccgaagtgctgggattacaggcatgagccagggtgcccagccaagattgtcttttaaaaaggcaatacccactgttggtaaaagcacaggcaaaagagaattctgaatcattcatggtaagaatgtaaattggtacctctttctggagagcaattagatgatwcttaaccaaaccttttgttatggtggccaaaagttagcaacaggctaagtgtcagcaagggactggctaacaaaccatgatgtgcaatgcaaccaccaaaaataattatgcaaaattataattatacaaaaattcaaaatatgtaattaaagtttttttagaaaactgttttaatacacactatgcaaaatatcctactttgagttttacaaactgcaaatagctatatgtaaaactgtttgtaaatatataaaacgtatttgtgtatatatgtaatgcctagattttgagtattcaccaaaatgttgtcatgtctactctgcacagctggattaatggtgatatttaggtatgttttgctgtgaaacaaaccaccccaacacttagtgacgtaaaatagcaacttctattatttgttattttttcaccattttgtgggctggcctggcagttcttcagtaggtctcacctaggttttctagtgtggcagcaggcagccagctgtggggttgtctgggtcgggaggacaaagccccctcacatgcctcacagctggttgatgctggctgttatttgaggctcctattctccctttctcaaatcttcaatgttctgaacaggaatccccatgattcctgagacaatggagtggtaagtcaaaatgacaaagaaaattctggagaggatacttgaaaaggaggttttgaaaattgactagatctctttgggaaaagagttctgaaaaggagactttctacgacacttattaatgatttatatattatcttacatgttaacattttgtgagcacttacagtatacagaccctctttgaagtgcttcaactgtattatataatttaatcctcacaacaaccttatgaggtaggaactactactgtaatccatttatacacaagaaaattaagtatagcacagagaggttaagaagccatgcatcctggctcataattattacactatattgttacatggtttgtgattccattatgcatttatatttttcacaaataatatataaacaccccaacgtcaggctggttctttatctccagtattgcttcagtaatggacaggttgatcaattggtgaaaatgcccaaagttataaagaaaaagaggtggaggaagggatgtcatgcaagtgggaagaaagccacaaaagcctgagaaaggaagtttccaa

SEQ ID NO: 715132 - DNA, 2376 bp, Homo sapiens
tccttattattctagcagattttgtgcagaataatataagacttttaatttcacttttaggaaagaggacaatctcaaattcagagtagttcactgtttgggcttggaaaaagatttaaacaattgttacttttcccacttaatacactttaaacagaatctcatttaataagagatcaagcaataacataagagatctttactcagtaatttctatgtttaaataaatagtgctgccaactggaaggcagtaagtaagcaagtataaaagtgcagaattgccagtggctagtgtgtgagcagagaaagatcactgtatcagaaaagtcagaatgacggcatgttagctccaggaatgccgtttgtactatgaacttygaaggatatcaattaagtgcacaggcttctgttttctctaccttctctaactccttatcgactgaggaaatcaaatgagatgatatagcgtaaaaacaattttcttggctaggcgtggtggctcacgcctgtaatcccagaactttggaaggccaaggtgggcggatcatgaggtcaggagattgagaccatcctggctaacacggtaaaatcctgtctctactaaaaatacaaaaaaagagctgggcatggtggtgggcgcctgtaatcccagctactcgggaggctgacgcaggagaatcacttggacccgggaagtggaggttgcagtgagcccagatcacaccaccgcactccagcctgggtgacagagcgagactcctaaaaaaaaaaaaaaaatttcttttttggagacacatctcattcttgtcaacccaggctatagtccagtagcatgatcacaactcaattaagccttgacctcctgggcttaagtgatcctcccacctcagccttcctagtggctgggactataggcgtgtgccatcatgcctggctaattctttttttttttttttaaattgagacgggggtcccactacgttgcccaggctggtcttgaactcctgggctccagtgatcctgctgccttggcctcccaaagtgctgggattacaggcatgatgagccactacacctggccaaaacaaagtcttttaatgcaaactgtgaacactattgtagtaattaaaggtaagtactcagaatcaaagcccaagttctacctccgcatctgtaaaatgtcatggaaatgaagcctgaaaaaattggtggggattaagatttagaaaataatcagtaagcctgattcatacatttgactctcttaattttaaattgaaatgaaggaaaaccataggttgggaattagttatatctgaaaatagacatacatacactttatttcattgtgttttgtgatttttagtgccttaatcagaaatatacattgtcagtaaaaatggctgaagtacacaaggtatttaagaagtgctgacaatatcttttttttgtgttggactgtattcattcatttaatatttatactaaacacctgttttatttaaaatgctgagttaagttctaaagacatgaaaagaatttttaaaatctcaactttctctcacattccagtggaagagaaacataaaattaactgcaacctagggtagggctgataataatgatacatactaagggctgtgataattgctaaaatggaagactttagggtcagtgaggtgtcggccaacaatatgtggaagcaaacaaaggcagacactgagtggctcctatggcaggggtgataaggagaaatgggatgtatggaaggagaaagtgggtggaggtcttacttgtatatgagggagtcaccaagatgtccttcagtaggtgaattaataaacaatctgtattgtatctagaaaatggaatattagtcagcattaaaaataaatgtgccatcaagccatgaaaagactcaagaggaaacttaactgcatattgctaaggaaaaaaagccaatctgaaaaggatacagacttcattcatctgactatatgacattgtgacagtaaaaagatcagtagtttccaggaattagagggagacaggggatgaataggcagaacacagaggatttttaggatgtgttctgagacccccagtggatacctgaaacctcaaatagtattcagccctatacgtactatgcttttttctatacatacatacctatgataaaagtttaatttataagttaggcaatttataaattatggtaaaagattagcaacaatacctaataataaaatagaacaatcataaaaatatgccagcatcgctactcttgagctttagggctttaagtaaaacaagggttacttgaacacaagcactgtgataccaacaacagttgctttgataatcaagattgct

SEQ ID NO: 715133 - DNA, 2376 bp, Homo sapiens
tccttattattctagcagattttgtgcagaataatataagacttttaatttcacttttaggaaagaggacaatctcaaattcagagtagttcactgtttgggcttggaaaaagatttaaacaattgttacttttcccacttaatacactttaaacagaatctcatttaataagagatcaagcaataacataagagatctttactcagtaatttctatgtttaaataaatagtgctgccaactggaaggcagtaagtaagcaagtataaaagtgcagaattgccagtggctagtgtgtgagcagagaaagatcactgtatcagaaaagtcagaatgacggcatgttagctccaggaatgccgtttgtactatgaactttgaaggatatcaattaagtgcacaggcttctgttttctcyaccttctctaactccttatcgactgaggaaatcaaatgagatgatatagcgtaaaaacaattttcttggctaggcgtggtggctcacgcctgtaatcccagaactttggaaggccaaggtgggcggatcatgaggtcaggagattgagaccatcctggctaacacggtaaaatcctgtctctactaaaaatacaaaaaaagagctgggcatggtggtgggcgcctgtaatcccagctactcgggaggctgacgcaggagaatcacttggacccgggaagtggaggttgcagtgagcccagatcacaccaccgcactccagcctgggtgacagagcgagactcctaaaaaaaaaaaaaaaatttcttttttggagacacatctcattcttgtcaacccaggctatagtccagtagcatgatcacaactcaattaagccttgacctcctgggcttaagtgatcctcccacctcagccttcctagtggctgggactataggcgtgtgccatcatgcctggctaattctttttttttttttttaaattgagacgggggtcccactacgttgcccaggctggtcttgaactcctgggctccagtgatcctgctgccttggcctcccaaagtgctgggattacaggcatgatgagccactacacctggccaaaacaaagtcttttaatgcaaactgtgaacactattgtagtaattaaaggtaagtactcagaatcaaagcccaagttctacctccgcatctgtaaaatgtcatggaaatgaagcctgaaaaaattggtggggattaagatttagaaaataatcagtaagcctgattcatacatttgactctcttaattttaaattgaaatgaaggaaaaccataggttgggaattagttatatctgaaaatagacatacatacactttatttcattgtgttttgtgatttttagtgccttaatcagaaatatacattgtcagtaaaaatggctgaagtacacaaggtatttaagaagtgctgacaatatcttttttttgtgttggactgtattcattcatttaatatttatactaaacacctgttttatttaaaatgctgagttaagttctaaagacatgaaaagaatttttaaaatctcaactttctctcacattccagtggaagagaaacataaaattaactgcaacctagggtagggctgataataatgatacatactaagggctgtgataattgctaaaatggaagactttagggtcagtgaggtgtcggccaacaatatgtggaagcaaacaaaggcagacactgagtggctcctatggcaggggtgataaggagaaatgggatgtatggaaggagaaagtgggtggaggtcttacttgtatatgagggagtcaccaagatgtccttcagtaggtgaattaataaacaatctgtattgtatctagaaaatggaatattagtcagcattaaaaataaatgtgccatcaagccatgaaaagactcaagaggaaacttaactgcatattgctaaggaaaaaaagccaatctgaaaaggatacagacttcattcatctgactatatgacattgtgacagtaaaaagatcagtagtttccaggaattagagggagacaggggatgaataggcagaacacagaggatttttaggatgtgttctgagacccccagtggatacctgaaacctcaaatagtattcagccctatacgtactatgcttttttctatacatacatacctatgataaaagtttaatttataagttaggcaatttataaattatggtaaaagattagcaacaatacctaataataaaatagaacaatcataaaaatatgccagcatcgctactcttgagctttagggctttaagtaaaacaagggttacttgaacacaagcactgtgataccaacaacagttgctttgataatcaagattgct

SEQ ID NO: 715134 - DNA, 2376 bp, Homo sapiens
tccttattattctagcagattttgtgcagaataatataagacttttaatttcacttttaggaaagaggacaatctcaaattcagagtagttcactgtttgggcttggaaaaagatttaaacaattgttacttttcccacttaatacactttaaacagaatctcatttaataagagatcaagcaataacataagagatctttactcagtaatttctatgtttaaataaatagtgctgccaactggaaggcagtaagtaagcaagtataaaagtgcagaattgccagtggctagtgtgtgagcagagaaagatcactgtatcagaaaagtcagaatgacggcatgttagctccaggaatgccgtttgtactatgaactttgaaggatatcaattaagtgcacaggcttctgttttctctaccttctctaactccttatcgactgaggaaatcaaatgagatgatatagcgtaaaaacaattttcttggctaggcgtggtggctcacgcctgtaatcccagaactttggaaggccaaggtgggcggatcatgaggtcaggagattgagaccatcctggctaacacggtaaaatcctgtctctactaaaaatacaaaaaaagagctgggcatggtggtgggcgcctgtaatcccagctactcgggaggctgacgcaggagaatcacttggacccgggaagtggaggttgcagtgagcccagatcacaccaccgcactccagcctgggtgacagagcgagactcctaaaaaaaaaaaaaaaatttcttttttggagacacatctcattcttgtcaacccaggctatagtccagtagcatgatcacaactcaatkaagccttgacctcctgggcttaagtgatcctcccacctcagccttcctagtggctgggactataggcgtgtgccatcatgcctggctaattctttttttttttttttaaattgagacgggggtcccactacgttgcccaggctggtcttgaactcctgggctccagtgatcctgctgccttggcctcccaaagtgctgggattacaggcatgatgagccactacacctggccaaaacaaagtcttttaatgcaaactgtgaacactattgtagtaattaaaggtaagtactcagaatcaaagcccaagttctacctccgcatctgtaaaatgtcatggaaatgaagcctgaaaaaattggtggggattaagatttagaaaataatcagtaagcctgattcatacatttgactctcttaattttaaattgaaatgaaggaaaaccataggttgggaattagttatatctgaaaatagacatacatacactttatttcattgtgttttgtgatttttagtgccttaatcagaaatatacattgtcagtaaaaatggctgaagtacacaaggtatttaagaagtgctgacaatatcttttttttgtgttggactgtattcattcatttaatatttatactaaacacctgttttatttaaaatgctgagttaagttctaaagacatgaaaagaatttttaaaatctcaactttctctcacattccagtggaagagaaacataaaattaactgcaacctagggtagggctgataataatgatacatactaagggctgtgataattgctaaaatggaagactttagggtcagtgaggtgtcggccaacaatatgtggaagcaaacaaaggcagacactgagtggctcctatggcaggggtgataaggagaaatgggatgtatggaaggagaaagtgggtggaggtcttacttgtatatgagggagtcaccaagatgtccttcagtaggtgaattaataaacaatctgtattgtatctagaaaatggaatattagtcagcattaaaaataaatgtgccatcaagccatgaaaagactcaagaggaaacttaactgcatattgctaaggaaaaaaagccaatctgaaaaggatacagacttcattcatctgactatatgacattgtgacagtaaaaagatcagtagtttccaggaattagagggagacaggggatgaataggcagaacacagaggatttttaggatgtgttctgagacccccagtggatacctgaaacctcaaatagtattcagccctatacgtactatgcttttttctatacatacatacctatgataaaagtttaatttataagttaggcaatttataaattatggtaaaagattagcaacaatacctaataataaaatagaacaatcataaaaatatgccagcatcgctactcttgagctttagggctttaagtaaaacaagggttacttgaacacaagcactgtgataccaacaacagttgctttgataatcaagattgct

SEQ ID NO: 715135 - DNA, 2376 bp, Homo sapiens
tccttattattctagcagattttgtgcagaataatataagacttttaatttcacttttaggaaagaggacaatctcaaattcagagtagttcactgtttgggcttggaaaaagatttaaacaattgttacttttcccacttaatacactttaaacagaatctcatttaataagagatcaagcaataacataagagatctttactcagtaatttctatgtttaaataaatagtgctgccaactggaaggcagtaagtaagcaagtataaaagtgcagaattgccagtggctagtgtgtgagcagagaaagatcactgtatcagaaaagtcagaatgacggcatgttagctccaggaatgccgtttgtactatgaactttgaaggatatcaattaagtgcacaggcttctgttttctctaccttctctaactccttatcgactgaggaaatcaaatgagatgatatagcgtaaaaacaattttcttggctaggcgtggtggctcacgcctgtaatcccagaactttggaaggccaaggtgggcggatcatgaggtcaggagattgagaccatcctggctaacacggtaaaatcctgtctctactaaaaatacaaaaaaagagctgggcatggtggtgggcgcctgtaatcccagctactcgggaggctgacgcaggagaatcacttggacccgggaagtggaggttgcagtgagcccagatcacaccaccgcactccagcctgggtgacagagcgagactcctaaaaaaaaaaaaaaaatttcttttttggagacacatctcattcttgtcaacccaggctatagtccagtagcatgatcacaactcaattaagccttgacctcctgggcttaagtgatcctcccacctcagccttcctagtggctgggactataggcgtgtgccatcatgcctggctaattctttttttttttttttwaattgagacgggggtcccactacgttgcccaggctggtcttgaactcctgggctccagtgatcctgctgccttggcctcccaaagtgctgggattacaggcatgatgagccactacacctggccaaaacaaagtcttttaatgcaaactgtgaacactattgtagtaattaaaggtaagtactcagaatcaaagcccaagttctacctccgcatctgtaaaatgtcatggaaatgaagcctgaaaaaattggtggggattaagatttagaaaataatcagtaagcctgattcatacatttgactctcttaattttaaattgaaatgaaggaaaaccataggttgggaattagttatatctgaaaatagacatacatacactttatttcattgtgttttgtgatttttagtgccttaatcagaaatatacattgtcagtaaaaatggctgaagtacacaaggtatttaagaagtgctgacaatatcttttttttgtgttggactgtattcattcatttaatatttatactaaacacctgttttatttaaaatgctgagttaagttctaaagacatgaaaagaatttttaaaatctcaactttctctcacattccagtggaagagaaacataaaattaactgcaacctagggtagggctgataataatgatacatactaagggctgtgataattgctaaaatggaagactttagggtcagtgaggtgtcggccaacaatatgtggaagcaaacaaaggcagacactgagtggctcctatggcaggggtgataaggagaaatgggatgtatggaaggagaaagtgggtggaggtcttacttgtatatgagggagtcaccaagatgtccttcagtaggtgaattaataaacaatctgtattgtatctagaaaatggaatattagtcagcattaaaaataaatgtgccatcaagccatgaaaagactcaagaggaaacttaactgcatattgctaaggaaaaaaagccaatctgaaaaggatacagacttcattcatctgactatatgacattgtgacagtaaaaagatcagtagtttccaggaattagagggagacaggggatgaataggcagaacacagaggatttttaggatgtgttctgagacccccagtggatacctgaaacctcaaatagtattcagccctatacgtactatgcttttttctatacatacatacctatgataaaagtttaatttataagttaggcaatttataaattatggtaaaagattagcaacaatacctaataataaaatagaacaatcataaaaatatgccagcatcgctactcttgagctttagggctttaagtaaaacaagggttacttgaacacaagcactgtgataccaacaacagttgctttgataatcaagattgct

SEQ ID NO: 715136 - DNA, 2376 bp, Homo sapiens
tccttattattctagcagattttgtgcagaataatataagacttttaatttcacttttaggaaagaggacaatctcaaattcagagtagttcactgtttgggcttggaaaaagatttaaacaattgttacttttcccacttaatacactttaaacagaatctcatttaataagagatcaagcaataacataagagatctttactcagtaatttctatgtttaaataaatagtgctgccaactggaaggcagtaagtaagcaagtataaaagtgcagaattgccagtggctagtgtgtgagcagagaaagatcactgtatcagaaaagtcagaatgacggcatgttagctccaggaatgccgtttgtactatgaactttgaaggatatcaattaagtgcacaggcttctgttttctctaccttctctaactccttatcgactgaggaaatcaaatgagatgatatagcgtaaaaacaattttcttggctaggcgtggtggctcacgcctgtaatcccagaactttggaaggccaaggtgggcggatcatgaggtcaggagattgagaccatcctggctaacacggtaaaatcctgtctctactaaaaatacaaaaaaagagctgggcatggtggtgggcgcctgtaatcccagctactcgggaggctgacgcaggagaatcacttggacccgggaagtggaggttgcagtgagcccagatcacaccaccgcactccagcctgggtgacagagcgagactcctaaaaaaaaaaaaaaaatttcttttttggagacacatctcattcttgtcaacccaggctatagtccagtagcatgatcacaactcaattaagccttgacctcctgggcttaagtgatcctcccacctcagccttcctagtggctgggactataggcgtgtgccatcatgcctggctaattctttttttttttttttaaattgagacgggggtcccactacgttgcccaggctggtcttgaactcctgggctccagtgatcctgctgccttggcctcccaaagtgctgggattacaggcatgatgagccactacacctsgccaaaacaaagtcttttaatgcaaactgtgaacactattgtagtaattaaaggtaagtactcagaatcaaagcccaagttctacctccgcatctgtaaaatgtcatggaaatgaagcctgaaaaaattggtggggattaagatttagaaaataatcagtaagcctgattcatacatttgactctcttaattttaaattgaaatgaaggaaaaccataggttgggaattagttatatctgaaaatagacatacatacactttatttcattgtgttttgtgatttttagtgccttaatcagaaatatacattgtcagtaaaaatggctgaagtacacaaggtatttaagaagtgctgacaatatcttttttttgtgttggactgtattcattcatttaatatttatactaaacacctgttttatttaaaatgctgagttaagttctaaagacatgaaaagaatttttaaaatctcaactttctctcacattccagtggaagagaaacataaaattaactgcaacctagggtagggctgataataatgatacatactaagggctgtgataattgctaaaatggaagactttagggtcagtgaggtgtcggccaacaatatgtggaagcaaacaaaggcagacactgagtggctcctatggcaggggtgataaggagaaatgggatgtatggaaggagaaagtgggtggaggtcttacttgtatatgagggagtcaccaagatgtccttcagtaggtgaattaataaacaatctgtattgtatctagaaaatggaatattagtcagcattaaaaataaatgtgccatcaagccatgaaaagactcaagaggaaacttaactgcatattgctaaggaaaaaaagccaatctgaaaaggatacagacttcattcatctgactatatgacattgtgacagtaaaaagatcagtagtttccaggaattagagggagacaggggatgaataggcagaacacagaggatttttaggatgtgttctgagacccccagtggatacctgaaacctcaaatagtattcagccctatacgtactatgcttttttctatacatacatacctatgataaaagtttaatttataagttaggcaatttataaattatggtaaaagattagcaacaatacctaataataaaatagaacaatcataaaaatatgccagcatcgctactcttgagctttagggctttaagtaaaacaagggttacttgaacacaagcactgtgataccaacaacagttgctttgataatcaagattgct

SEQ ID NO: 715137 - DNA, 531 bp, Homo sapiens
cactatgttgttatggtaactstaccttggaggtcagttagagtctggacaggaacagaaacctgagcatcgcttcctgtaactacatcgcctggatttcataagaaaaaataattagatttcataaaaaggaaataatcaacttcacttttcttttatactgaatgttctaatactttaatcaaattactaaaaatatagtacaaaagaaaataatgcacaagcttagaaaaatataaaatattttcaaagaaaataatctttaagagcatgttttctagaaatgttttgtgtttgtttttcttaaagaaaacacaaacaagtttcaactagagtataggaaacttcagcaatcaaaagattttgctgagcatatttcatgatgctacaaatattagtgtgattttatattttccctttcatccaaaagtaagttatatgtcatttatttaaaaataggcattcttttgaaattgatttcctcctatatcagacaaaatttatttttaactaacttgaaaccaacttctt

SEQ ID NO: 715138 - DNA, 759 bp, Homo sapiens
ctagtttgtattccttagaagtgaagcagctgggtgagagactgcaagcctagtggcccactttctcaaaacaactgtaatgcaccaacgaatgctgtgactagtgaagcccatggtaccggaacttctcattttggattcctttctagtgagaagcattactatacaaagttagcagagaacacagtcaactgatctcaatttctgtgttgtgttaattcatgccatcatactgtatgggcatctacaggacaaagttgcaagtatactaggatataaatgttaaaaaaaaattacctcataaaatattcttaagaccaacacggtatctagtattccaactttayataacatatttaaaaagtaagttttgcattaatttctattctaggagattggttcctcacaggcaggtgaagaaatcccaggctacaccatgaatgttttctttagatttactagtattttttcctacctttgttcaattgcacaggcatgctttctgatttcatcagcctctgctgctgctgttgctgttgcaagtgatggcttggggcctctgctgaggtcctggtaggaattacaacagaggaggagctactgctgttgcctccaggtacagggccacctgcactgcctggagccattgctggggaaatcaactttcttccaaaattaatcaggctattagagaccttatttatattcaggggagcacctttggcattggtcctgttaaaaaaagaaatggagaagcat

SEQ ID NO: 715139 - DNA, 631 bp, Homo sapiens
gcaaatatttttcctcatttgcagatcgactacattcttaatgttacttttgttcaaaaaattttttgaatgaattaaaaattgcgaatcttttttcttttataattaaaaaatataaatatatatatataatatatatttataaataaattaaaggttgctgcccaggcattagaagtagagcagcactcctgaatggctcaagctggtggccagaggtataggagcatctctcccacttagcagactgggtcccctgctttcctgtggctttcsgtaaacagaccattcacgcatttgcctgtgaacttaaaataacccacatcccacatgctatttccttatacatattgctagtttcctctctctctctgcctgattctttattcctgcatcacatgacccaaggatggaggactgccctcttaacgcattgcaacatccctgcccaggatctgaaagtaaaagtattttaacttgttttctattacgatggtgtattgaatttgtgccttccatatttcgaaccaggggctacctcaggccaaacttgcttcagaacatgggggtgagatgggggttcacaaagttatgctcctagtgccagagtgatggtcaggcagatctgaac

SEQ ID NO: 715140 - DNA, 403 bp, Homo sapiens
taactgtggctatgtgagttaggaaatatacactaagctaaatagagataaaggggtatgacatcctgtacttacaagtggttgtgtgtgagagaacgattgacaaagcaaatatagtaaaatgtaaacaatkgaacaattggtgaatctgggtagaatatagataggaaagtcataattttggtgggttttttttttctttctttctttctttctttctttcttttttttttttttttttgagatagggtcttgctgtcacctagacaggagtgcatgatcttggctcactgcaacttctgcttcctgggctcaattgattctctcacctcagcctcccaagtagctacaggcatgaggcaccacgcccagctaatttttgtatttttttgtagagatgggg

SEQ ID NO: 715141 - DNA, 1212 bp, Homo sapiens
agtagagatggggtttcaccatgttagccaggctggtctcgatctcctgacctcattatccacccgcctcggcctcccaaagtgctaggattacaggcatgagccaccatgcctggccagcctactaatatttaaagttttttttttggtagagacagggtgtccctacgttgcccaggctggtcacgaactcctgggctcaagcagtcctcctgccttggcctccgaaagtgstaagattacaggtgtgagccactgtgtctggcctaacatctgacattttataaaaagcacctcctataatagtaatactatgcaaagctatatggagatactgataaatcttaagacataaatgaacagagattttttttttattttcttactagcaagtaatggattaattagctttattttttcactcgtctcagggtttttactgggtaacaatttgtaataagttatttattaggcaaaaaccactggtcaggaactgtatatgcattttaaaaaatcctcagtatctaggccgggcatggtggctcacacctgtaatcccagcactttgggaggccgagctgagtggatcacctgaggaaaggagttggcgaccagcctggccaacatggtgaaaccccgtctctattaaaaatacaaaaaattagccaggcatggtggcgtgcacctgtaatcccagctactcgggaggctgaggcaggagaatcgcttgaacctgggagtggcaggttgcagtgagctgagatcatgccactgcactccagcctgggcaacaagagcgaaactccatctcaaaaaaaaacaaaaaaacaaaaaaaaaccgaaaaacaaaaacaaccacctcagtatccttaggagttacaattggcgtcttacagatgagaaaatcaaggttagaaagagttaatgtcatttgtccagatcatacagctacaaacagtaggatcaggattcaaatccaggtcagtttgactccacagtccttgctcatttcactagagccagctatttaatttttatggtttttttgtttctgttttttttttttttttgctgtaactgtctattcactaatttcacttcttcccttgggtgaaactgaaatttatgtagcacatagttccaactgctttgaaggagctaaatttagtattaatagactgacaaactaagttgatacaaggttactgtaga

SEQ ID NO: 715142 - DNA, 1026 bp, Homo sapiens
gaaaaagaataaacaaattgattataaattggctgccaaagtttgcaagggttttggaattcaattactgacatatttaacataaacaagagggaagccaaaaggcaaaaacaccacctggagattagcagcaagaaggccatgaaaacagcaaagtataaaactttactacatgaggatcatgatttttgtgtggaaaatgtttggattccccctctcccccacctcactaaaaaacaaaaatataacaaaaatcctatgacagatattcctcaatgccacagtgagtgatacaggactattataaactgacatagcatcaggaaaaaacagatatagagcctaaccagaaagaatgaaatacacataccaaaaacaccagcacgataaattcagaaacaaatggcttaatgttctcatggttaccaaaaagcaaattaccactgatcttgtaaatttatacaaratcctctctcagaacagctaactttcttcatattcatcattaatattcttctttcaatctgtacttagtcaaggtagttagcaagattttagaggagagttattagtttagggaactaatattctggagagaatcagttaggcaaatccttacccagaattagttgcctctcctaacacctgatcctcagtttgtccattaatgcgacaagtttatgtatggcaccactaagcctaatactgtcataagcacctgtgatgcaaaaaggaataagacctggctgggcttggtggctcatacctgtaacaacaacaacaaaaatttaaagacttttccttcttccttatgagactgaaaaatgactcccaacaaggtttagtcctaaaaaataaaaatgtaaagaactgaaggaagggcagctaacaaagaaatatgaaatagcaatgaactcaagtctgatattttaaagagacacccctagactccctagccattagttaagtagaagtatcttcagtgaatagtaactgctgttcttgtttaatctccacctggccaag

SEQ ID NO: 715143 - DNA, 638 bp, Homo sapiens
aatacttccaaagcatggtgactgccaccattcttaattcagggtgtttgttatctgctgctcaaatagcaagtaaggtatcattttatactactctatttatagctctttaattcatcatttaactttccacttgacaataagctttatcttcccaaactataacttcttaaaagtacctggactatgtcttaaacattattttatatgtggtagaaagttaaaaatatgtactttttggttttggctaattttatcattatgggataccacagttgtgamgagcttctttaccctttcctgagttacgcgttccatttcctccctagcttggtcaaatggtcagtgaacaaaatcacactaacaactaatgagttttaaagataagttcttaatcattatctccagtaagtatagatcatacagtgaaacgctctcttcacttgcagacatgaaaaaatccaaagcagtgctcttttgaagagtgaagaagattaacctgaacctaaggggattttttagggtaaacaagttgaacaatcactgacaacaaatattctgaagtttgtaatccttttaatgttaaaacatttaatattattaattacttttctaagatagccatccagcttgtccaa

SEQ ID NO: 715144 - DNA, 1677 bp, Homo sapiens
ttcacaactccttgaaggcaaatagtcctataaattactcacaatcaagaagataatcactagaacatctcattaattaacaccagtcttagcttttctgactccaaatccaatgttctttccactatactactctctcttttaaaaatacacttgaaactattcacaacagcaaagacttggaaccaacccaaatgtccaacaatgacagactggattaagaaaatgtggcacatatacaccatggaatactatgcagccataaaaaatgatgagctcatgtcctttgtacagacatggatgaaattggaaatcatcattctcagtaaactatcgcaaggacaaaaaaccaaacaccacatgttctcactcatagatgggaactgaacaatgagaacacatggacacaggaaggggaacatcacactctggggactgttgtggggtgaggggaggggggagggatagcattaggagatatacctaatgctaaatgacgagttaatgggtgcagcacaccagcatggcacatgtatacatatgtaactaacctgcacaytgtgcacatgtaccctaaaacttaaagtataataataatttttttaaaaatgcaaaaaaaagaaacaaaaaaaaatacacttgaaattaaaaattcaagtcattttccttcattttttgcccatcttcactaccttggtggggaaactcttaagaaaaaaattcattttaaccttcatatgttaatgagatcaaacagggatcctctttatgtactttggtggaattttattaatagaaaatcatttgaaataaggcattgttcagatttttaaacttttatttcacagatctgttgtaactagagtcaaactgagtagttctgtttaaaagaaggggaaagcacattaaaacactacaccaaatatttacattatatcatccagaaagacaaaacttccctatactaaaagcttgtaacaatcccatctccaaaaaaaaaaaaaaccgtaacttcttaaaaatttattcactgttatattttatgacttccctcagaagaaaattttacaagccaattttgtactagagtttccttttattagttctaaatttagttttatttgtatcatctgctgttctcctattatggaaatgtcttaaaaatggaaaacaatctgttttccagcattcaaaatttataactttacagcctccccatttttacaaaaaaaaaaaattgcttgcagcagaaattgttttacaaaactatcagcaaaatcctttaggtgcgttttctcgtttttgtgattaaattctttaaatgttctcttgcttttgtgattaaattcttctttaacctgaatataacaacataaacattatccatattctaattttaaatgttgcaaccatgagttgcatattccgtttaagctacagcaagaaataatgcctgagaatatttttagcatgaacatgtcataactgactcatgaagtctcaaattaattgcatttttttcaaatatttagaaatgctggagcatcttgtacaacactgaggtattatggaattaggaattctcatcaccagattgtaaaatgtttctaactggaaaaatacttccaataaaaatgtttctaaatcatccataacactcttctaaaaataactgca

SEQ ID NO: 715145 - DNA, 938 bp, Homo sapiens
tatagtaaacataattttacgttttcttgaggactttaggctgtcactatgaacaccttcactctactgtaaatgaagcataaatggcggcagatacagttctactactgtgttggtacccagcacagcagacacccgatccctgggagtactccctgtgttctgtgatggttccacttttcttcttccaaactctaactactggtgtgttccaaggatctgtcctcagttctatattacaaccccactgtgcagtttacttgcctcaaagattcagcctccacagagggcttccaaatcctaaacttccaaaggatagattgcaaactaaatcattaccattatccctataacaagccaatctgcctgactaccctgttcctcttgcctccaactcctaccatttccaaagtgtatgctaatagctatctacattttcccgggaaagaaatattggcatcatctttgacccttctttattttcactgaaactgcctattctgatcttcaaagtctgtcttcttctattttcatcatcactactgttatttaagctattattaactttagatcaggttagtataaaagcctcctttctcctagattcctcctactacaatagctgtgtttctgaacctctttgtccactgtgtactctgggagcttttatatatacagatgtctgtgttccacaaagttccaaagattatactgatgtggaaccaaggckaagaaccgctatgttagtgggtttattttccattaaacaatcaaggaatctgcaacaatgcttttggtttctagtgtatcttttcaactgcaaaaagcccctaaaacgataccttgtcacaaagaacactaataataacaaaatcaaatagctaaacactaatgtacattgtatacctacatgcccttcattgaactgactatataaa

SEQ ID NO: 715146 - DNA, 617 bp, Homo sapiens
taggcctggtccccaattccagggattccctttctttgtttgaggaagatctgttcccatagctttacattagcattactccagcatattttccaagcttcggtttgaagccctaaaaggaaaactagatctgagggacccagaggcagttgacagtggaagactacagcacagtggaggtaagcatgactacccctgctgastaggccttcccacttcatgggtggagctcatcctcatatttatggtatgagccccatgagttcacccatggtgccagtaccaggtactaagatttggaggatgcctcaaattcaaaatgagaaagggagagaccaagggatatgttttatcccctctcacttttcaaatgggtagcaaactattctcagcctgcactcctcttgagtgcattctgaatcactgggactcctttgaccttcagactctgaagaaataatgccttatattcctttgtacaatggcttggccaggttataatttgcagatggaaaagcctggcctctggagggagtaacaattttaatactatcctgcagctcaatcttttctgtaaacacaagggcaaatggtccaatgtcccatatgcaggattt

SEQ ID NO: 715147 - DNA, 1551 bp, Homo sapiens
cctctggaaatattgggccaatattgccaaagcagttctagcattacaagaaacttatttaaggaaatttctatctgcaactgccaaaggatgcaaggtaaatttatggttccaccatggcctcagaatggaaaccaatggaaatatgtacacttgttgagcacataggccctgaaaggagaatcacacctggccctgtggcctattaggtacctaactatgggcagattggttagctcctctaggcatcatttttttaatgtgttaaatggagataatattaagacttacctcataaaatccttagaaggattaaatgaagtaattcatatacagcccttacgaacaaatgacatttgtgtaggtcagaaccaacttactaaagataccagagaaactatttaaaaaaaaaataaagacttcatatattattggtttttcttattttaataattgcaaaaacaattcaaagtctgcgtttcagccatcatctgggaacttctttggaaatcaatgcatgtcatctctcaccctgaaaagaagcaagggtcatttgcttaccttgacatcgtgcaacttcatctagagaggtaaagcccatgtatgagttagtgatcttttgaaaatgctgcctaagagaagcaccaaaaagaaagtcagaagggtccattagcatctttctagcatctgaaacaggacacccacaaaagtatttcagaatcttttaaaatgcaggctttgcaaaaggttccacctataataatgcctacagagactgcaaaaccatcatgctatcctacatattcatggaatgaataaaagcaactgggtggatttgattgagcaaagactggagttgtaagcagtatctggcacatagtaagttctcaataactggaagctaaggtgatggtaacaaagataacagatatagcagaagggaaagcacatcttaagaggaaaacaaaaaagaaattcagttagatattgtttgtcaatgacaatgtagataataaaaaaattgttcatcctaccataaaaaaaaagtatgacttcaaaagtgatagaataaatttgcctttgcaaaaaagcagtagtgttgctcagatttgattgtaagacagtccgagatctagaagtttatgtcactgactagttgtattaataatagccaaaagaaaaggagcagcattgattgctgaactaattggatgtttcttgaaacttggctgtgccaagcctggctcctctcagagagagagagaccaaacaccagcataatagctttactattccctttgggttgttataagcagaatcaatatgtactaatgactgcagcaataaatttggtcatagttcacagggtaacattctgcacttacccagttgttggtttgacatagagtaatagaatttacccttttaagttgtaaattacgatgaaaatgctgagcctaacacaaaatgcatttggggatgtttttaagcataggaaatattggtaatacttccactaagcataytattaaaataaataaatagtattta

SEQ ID NO: 715148 - DNA, 1774 bp, Homo sapiens
tggaataactatagctaattattgaatgttgaaaacatagattstaattgtggaaagttttagtcacaagatatcttaaagttgaagacaaggaaatcttttatttgtaatgatgtgtcttgcacatggtagtcattctatgcagctatttgagtggaattgattgtaaatgaagacaaaaatactacacaggctatcttcatgcataaaaatcagttttctgctagtgtgctatcattctgtttcatatcactgcttcattctattcaaaatatttttttattctagaaagaaactaaatcataaaaagaaaaaataatcattgaaagagtagattctgctttattttttggatagaatgatattatcaccatatctagtgataattttagcctttcttcatagaatgtaatttgttgaaaatgtagcctccaattgaagtatttctgattacaatgtacatgtttctatgtaatttggtatctttcattatttctgtgtatacttgaaaaacaatttctttaaagttttcatttcttttgagttgcttgattgatttttatagattcttcagtatcagaaagataaaaagataaaaatcccaaaccatttctaggtttgctgaaattatttttattggcaatgacatggtatccagttgtggttctatattatttgttttcaagtaaagttcccatcaatggaaccttttaaataccttattattgttattaaaaacaaacatttaaaatatagtactttctgtgagtcacctgaaacatatttatcttacattactaccaaagaaagcgaataaaagagaagtttgtgtcaaagacctgtagaggagcttccgctgaggatttcctgttactagtttaattactaatttagggtcaatggaaaaatctacctctattaacccctgtatttatctttaattttctttcacatcttctcccctataaaaattatcactaaattttagcagaattgttattttcctagagaataatgatgagacctaatgagcatataatgatttagaattcataaaattcttttcacaaacagaatgtcagttctgtgagattggtggaacagagtcttacgtttattgccttcatgaggaaaagacttggaagttaaatgacttcagtaatatatgattttcctttcatgctcaggaaaatgacagaaggagcttattgagtaagggttagagagacatgggtgaaagtaaggagctagcaagagctatgccaggagcaaacactaggagagcaatttagtaagaattgctaatgtaatttaaaataaaaggtactttttcaattacagagaaaaataacaccctggaaccttatttgtttacttctagtttatgattttagcttcaatatttttcactaaatgcaatatccaaaagggtatgttggtttaataaacattttcttcaaatcagtttgcatcttctcaaagactttataaatgattaactagtgaatgagaaaaaaatcacaattctctgcttttcaatttataagagggataataattgatacatataacatcttcaagaaatcaaaataaagaaaagtgcaaagaatgataagaaaatattagtttttccactgtcgtgaatttaaaactgtcaagctgctcatacttaccctatcttttgttaataaaggttaataaagatatttcagataatgctgaaatgaccattgacaccactcccagtcatatttttctttttttcttcttcctc

SEQ ID NO: 715149 - DNA, 1774 bp, Homo sapiens
tggaataactatagctaattattgaatgttgaaaacatagattctaattgtggaaagttttagtcacaagatatcttaaagttgaagacaaggaaatcttttatttgtaatgatgtgtcttgcacatggtagtcattctatgcagctatttgagtggaattgattgtaaatgaagacaaaaatactacacaggctatcttcatgcataaaaatcagttttctgctagtgtgctatcattctgtttcatatcactgcttcattctattcaaaatatttttttattctagaaagaaactaaatcataaaaagaaaaaataatcattgaaagagtagattctgctttattttttggatagaatgatattatcaccatatctagtgataattttagcctttcttcatagaatgtaatttgttgaaaatgtagcctccaattgaagtatttctgattacaatgtacatgtttctatgtaatttggtatctttcattatttctgtgtatacttgaaaaacaatttctttaaagttttcatttcttttgagttgcttgattgatttttatagattcttcagtatcagaaagataaaaagataaaaatcccaaaccatttctaggtttgctgaaattatttttattggcaatgacatggtatccagttgtggttctatattatttgttttcaagtaaagttcccatcaatggaaccttttaaataccttattattgttattaaaaacaaacatttaaaatatagtactttctgtgagtcacctgaaacatatttatcttacattactaccaaagaaagcgaataaaagagaagtttgtgtcaaagacctgtagaggagcttccgctgaggatttcctgttactagtttaattactaatttagggtcaatggaaaaatctacctctattaacccctgtatttatctttaattttctttcacatcttctcccctataaaaattatcactaaattttagcagaatwgttattttcctagagaataatgatgagacctaatgagcatataatgatttagaattcataaaattcttttcacaaacagaatgtcagttctgtgagattggtggaacagagtcttacgtttattgccttcatgaggaaaagacttggaagttaaatgacttcagtaatatatgattttcctttcatgctcaggaaaatgacagaaggagcttattgagtaagggttagagagacatgggtgaaagtaaggagctagcaagagctatgccaggagcaaacactaggagagcaatttagtaagaattgctaatgtaatttaaaataaaaggtactttttcaattacagagaaaaataacaccctggaaccttatttgtttacttctagtttatgattttagcttcaatatttttcactaaatgcaatatccaaaagggtatgttggtttaataaacattttcttcaaatcagtttgcatcttctcaaagactttataaatgattaactagtgaatgagaaaaaaatcacaattctctgcttttcaatttataagagggataataattgatacatataacatcttcaagaaatcaaaataaagaaaagtgcaaagaatgataagaaaatattagtttttccactgtcgtgaatttaaaactgtcaagctgctcatacttaccctatcttttgttaataaaggttaataaagatatttcagataatgctgaaatgaccattgacaccactcccagtcatatttttctttttttcttcttcctc

SEQ ID NO: 715150 - DNA, 1082 bp, Homo sapiens
  misc_feature 434, 435, 436, 437, 438, 439, 440, 441, 442, 443, 444, 445,446, 447, 448, 449, 450, 451, 452, 453, 454, 455, 456, 457,458, 459, 460, 461, 462, 463, 464, 465, 466, 467, 468, 469,470, 471, 472, 473, 474, 475, 476, 477, 478, 479, 480: n = A,T,C or G
  misc_feature 481, 482, 483, 484, 485, 486, 487, 488, 489, 490, 491, 492,493, 494, 495, 496, 497, 498, 499, 500, 501, 502, 503, 504,505, 506, 507, 508, 509, 510, 511, 512, 513, 514, 515, 516,517, 518, 519, 520, 521, 522, 523, 524, 525, 526, 527: n = A,T,C or G
  misc_feature 528, 529, 530, 531, 532, 533: n = A,T,C or G
ttaccctgatagagaacttggttggtggatcacctgctgcagtagcagccacgtccactcaaaaacctggagtcccaagggccatcaagctgcaatagtaacctgagctgcctaactggggtcgtagggaaagctaaggaaacttgccccctggttagaattgcacctagcccactgaggaggtgaagccttgagagattttaccaactcctaacgcgtattcgtcattcaataagtatttattgaacgtctttcggcgccagtaccgtacagctgggtacaaaatagacagggcctccgttcttgcagagctgtctgtcattctatttcacgcgctcttagttcagccggcgctttcagaaacatcatattgttggattctcgcaagcataytacggttagggccggaattattatcttcataacatagatgnnnnnnnnnnnnnnnnnnnnnnnnnnnnnnnnnnnnnnnnnnnnnnnnnnnnnnnnnnnnnnnnnnnnnnnnnnnnnnnnnnnnnnnnnnnnnnnnnnnntcataatcttcttttttatatttcattaaattaaaaataaagtatttaaactggcaagagttaacattcaagagatagagaatggaagtcatgctctaaacattttatctgtgtgtgtctatcatccttttcctggaaaagtttcctaatgctggcaaagcagtcatgttaacctcttagtgctgtatgatccacttcggcagggagactacaaaaaaattttttaattctctcccacttcccaatccaaaatatcatattcatctacagtgtgtccctgatacaaaacttatttataaatgttttcttttttatctactaactaccttgtgttgaaatctagcaatttaatgatatctttgttgactcaggagtatgttgcaagtgagggtgaagaagatccagaagttgaatttttaaagtcactaacaaccaaacaaaaacagaaacttctcaggtaatttagaagtatatatttaatagatttattttttccttagtattcatctcagtatcgtattcaactctgatcctaagagctcatgaagg

SEQ ID NO: 715151 - DNA, 1322 bp, Homo sapiens
tgtggctaatatgtagagaatctgaatgaaaattttagcaatggagtaactaggaaaacaatagcattttaatcacaattcgtgagcctgcaactatacatgcacactggaatctagctgataacttgctctttaggttttgctaattcaagttctgatcaacatttcttaaaatagtatgtaagaaagtcttgtttcttaagcagatatttcatgtttctgtagagaagaggcaagaaaaatcaagaggaagagagtttgagagtataatgaaaagtagagaaacaaaaaagaaaagatgaaggggtcaaggagttatgacattttgagaactaaatgagtagatttggagacttctctgaacctccgaacttctgatcacttatctgtaaagtgggaggcttagactaggtgatctccattcttgcatacagtgttcaragaaacataaaacaccatatgtattttccatctgcagttgattgaatgtgcagatgtggaatctgtggatatggagggctgactgtactacccaattttatataaaagacttgagcattcataaattttgatatccaaggggaatcctggaaccaatcccttctaggtacagaaggccaactgtattatgtgttataagtaatcaagaaactatttgaagtatacaagaggatgtgtgtaggttacatgcaaatacaatggcattttattgcaaggaacttgagcatctgtggattttgttttcttcaggggtcctgggaccagtccctcaagtataccaagggttgactgtacagagaaacctattacagttgttgttttactcaagaaataccatataagacaagaagagtggtttggtggcagaaacatttgtctgagattcagaaaagatagattctaatactggctctcctaccaacttgttgatcatttcacctttctggacctcagtttacccatttataagaagtctcagtttactcacctatataaagtgcatcaagtgatctgtaaggttgtttcaactcttcctagtctctgattctagaattcttaaatggatgtatgtttttgccctaaaaaaacaacaaaaattagcccagaatgtcatcagatctgcacactggaatcatataacatgggaaaagcccaccaaaggccaaagaagaaacataaattatgacagtatgtggtctcttcaagttagtccatcccagttgttactgcttactaaatttatcaaattctttaactctttaggtattattagatttgtacagaaaacagaaacacataccaccctttctgatagggttttt

SEQ ID NO: 715152 - DNA, 595 bp, Homo sapiens
ctgaactggttcttcctgtctttgccactagagaaaatgatgatgacggctctcatggactgagcatttactactccatgccaggttctcatttaagtactttacatgtatcatctcatttaatccccaaaacagcatcaggagctaggtactattattatcctccgtttacagatgagggtcttgctgtgctgagaggttcagtcacttgccccaagccatrcagctactaaaagatggaattaagtttccttcccaggttgtttgaatccaaagctcaaactcttaagcactattccatattgcctctttaaaaaatcagtaatttggctgggtgcaacagcacatgcctgtaatcccagaactttgggaggccaagacaggaggattgcttgagcccaggagttcaaggctacagtgagctatgactgcaccactgcactccagcctgggtgacagagtgagaccctgtctctacaaaaaaaaaaaagaaagtaatttatattaatggttaattgattttgacaacaaagcacaggaaatttaactggaaaaatgatagtcttttgaataaatagagctgggacaatatggt

SEQ ID NO: 715153 - DNA, 633 bp, Homo sapiens
aaactttataattaaataggtaaaaggtataataaaataggtacaagatctaatgtacatcttgcacactgaaatggaaaatcctgtgccatgctgtcttcaatttaaaataaaacacctcttttttcatcattccttcatgtactggaaaactgtattgggagctactcccaaatatatttatatgaaaacaaatatgacaaattcctcccttatgccattgctttcagggctgcactaagtctgtgctgctgctaggccatcatagagaaatctcatagtgggagaattcaggtaatatgtttcctttctgcgtagtatcttatgaagcagatgcctcattaatatcaaakgatgagccaacaactcccctttgacttcctgtaggagccactatccgggtccacactcacctaacagagcgtccccccatgggaaactgataaaatttatcacaataatggattttcttccaatatgacatttgtaccttggagcgaagtgactatagatcatcttgatgttctttttcaattttactaggtaaatactgaaccattgatgatctaatatttcagcaatccttcttttacaagtccttgtaggacactgagtatcacactcccaagatga

SEQ ID NO: 715154 - DNA, 633 bp, Homo sapiens
aaactttataattaaataggtaaaaggtataataaaataggtacaagatctaatgtacatcttgcacactgaaatggaaaatcctgtgccatgctgtcttcaatttaaaataaaacacctcttttttcatcattccttcatgtactggaaaactgtattgggagctactcccaaatatatttatatgaaaacaaatatgacaaattcctcccttatgccattgctttcagggctgcactaagtctgtgctgctgctaggccatcatagagaaatctcatagtgggagaattcaggtaatatgtttcctttctgcgtagtatcttatgaagcagatgcctcattaatatcaaatgatgagccaacaactcccctttgrcttcctgtaggagccactatccgggtccacactcacctaacagagcgtccccccatgggaaactgataaaatttatcacaataatggattttcttccaatatgacatttgtaccttggagcgaagtgactatagatcatcttgatgttctttttcaattttactaggtaaatactgaaccattgatgatctaatatttcagcaatccttcttttacaagtccttgtaggacactgagtatcacactcccaagatga

SEQ ID NO: 715155 - DNA, 633 bp, Homo sapiens
aaactttataattaaataggtaaaaggtataataaaataggtacaagatctaatgtacatcttgcacactgaaatggaaaatcctgtgccatgctgtcttcaatttaaaataaaacacctcttttttcatcattccttcatgtactggaaaactgtattgggagctactcccaaatatatttatatgaaaacaaatatgacaaattcctcccttatgccattgctttcagggctgcactaagtctgtgctgctgctaggccatcatagagaaatctcatagtgggagaattcaggtaatatgtttcctttctgcgtagtatcttatgaagcagatgcctcattaatatcaaatgatgagccaacaactcccctttgacttcctgtaggagccactatcygggtccacactcacctaacagagcgtccccccatgggaaactgataaaatttatcacaataatggattttcttccaatatgacatttgtaccttggagcgaagtgactatagatcatcttgatgttctttttcaattttactaggtaaatactgaaccattgatgatctaatatttcagcaatccttcttttacaagtccttgtaggacactgagtatcacactcccaagatga

SEQ ID NO: 715156 - DNA, 1840 bp, Homo sapiens
tgcagggtgtcctttaggggcatatagcccaaggatctgattcatcctgagaaccacgtctcctccactccctagataggctctgtgagggcaggcatctgtgtgtcgtttctccctgtttccccagcacagcgtctactgcatctttgtgaaatccatgaacacatgaaaaaatgacagaaaaagtgcctggccgtgctttacagggatgaccgagtcagtcgcagtgtctaagagttcacaaactgagacgcaggcaacatccgaggcagcaaatccatcagcagggccaggacagccaaccagtcctccctggaaggcactgaaaaggagggggactgctgtgctcctctcttttgccctgagaatggtggggttaggtaacgaagtcagacagaaggtcacctgtagcaacatgtctcaggaccagtcctgtgtcctctattcttcagagagcagttacagacattgctgccaaaagaaacagctcagcaagggccaaaggaaaggctattgtcaagcataaggtggagatatgggaagggaggcaaagtaagagactatgaagaaaaatgaagctaattccaggcacagaaccaaatcaggtcctgcttccttcttttcagctaaagaaatcctcatggttagaccgtcagctccaatttagccattgctcattacctcatcacccatttcctataattatgtgttggtagcctctttttcctctaattgtaattagttgtcagatatgaaatgagtattgatggtattttctgcttctctctcatggaggtccttctttgcatattttcatcatccaggtgttaggatgaagcttttatttgtaaatgagccttaggtctcactaatcctttgagattattaaaaacatagaaacgagagagtatatcaagaaggcaaagctgtatatttaccctgcaatggaaaatttygtcaattaggcaaattgaattgactcacaaaactctgagcatacctcatgccatagaaaaagctgggagaatttcagttttcaactatggctaccaatgacatagaaagggctcagataagccaaataagtaggggaaggcatcccagatccaggaatatgttttcttcttaactattcatggtggtcatctgcttattacctcagccactatttcccctctttagctaagagttctttaattttcttttgagaatgaatcacttccctactcccagaatgcagtttggatggatttaaagtacccttccccagtgtcagggtgggtcttgagagactgaagtctttgatgattggctcagggatggatacataaaccaaccagagccaatgggatgtgaggcatgaagcttctgcagtcctcttgcctatttcaggacagcttgagaatagaacaaacctgcagctcacagaattcacagtttgatccccagataaacccatatgggtccactgtccaggtgagcctagaaattctttcatgtgggcctagaaatttgtgtttttgctagagctgacgtcttggcttgctttgagctgggttttctgttggcttactgtggaaggtttctgattcattcatactcaatacgcctgaaaagaactgagactttatttcttcttcattcagctgaggcccttaaggcattcctatgaatgtctgcacagtcatcctcggtgcattggcccctggagggtcattcagccacgtacactgcactttcagagatgactgcctgcagccctgtgctctcctcacctgggcataccagaggcaggcacagacacagcacagccccactccactggcagacaggattcaaa

SEQ ID NO: 715157 - DNA, 1326 bp, Homo sapiens
caaagagtgaaactgttgctcatcatcccctttgaacggatcaccaggtgagctttatgcacagatgcattcgttgagattttgggggcacagagaactgctccctactcagaatgccacctcccagccctcccaggtttgccagataaaatacagaatgcccagttaaatttgaatttcagatcaatcacggatacattttttaatataagtatgcccaatgtattgcatggaagacacactggaaaattattcacggtttatctgaaatccaaatttaactgggcattctgtatttttatttgctaaatttggcaaccttatccattccatcttttctgtgataactgcacatcctagagcctttcatttcacaaacaggatttaggtttaattgcataaaatcaaacatatatacaaacaaaaccctgaaagcagctttgaggaggaaaggggacattgtttgtttggagtttgggatagggaaggagatcctgtagggaaattctgcaacctcaaatttttgtcttgtgtattttttaaaatatcttccgatttcagaaatagaaaaaaagaaaagatctctttgctttgtaaatgaatttgtgacagagttcctttgcatttctggcttatttgcctgcagcatgcaaggcagggagaaggggaaagaaaaggggttaaacactgggcccctctcagtcctgcacaatgttgctgctatagccatttccatttggcaatttgttaagaaaaatgaaaagtctcctcaaaattgccagctactaaaacagtaccagctgcaatttttgaattatcaatttttggttggaaggatagagggagattgctttttcatattctccaaacaggtttttctgtgaataaaggatgtgtgttaaaatagattactcggccgggaacagtggctcaagcctgtaatcccagcactttgggaggccgaggcgggtagatcatgaagtcaggagatcgagaccatcctggctaacacagtgaaaccccgtctctactaaaaatacaaaaaaaaaaaattagctgggcgtagtggccagcgcctgtagtctcagctacttgggaagctgaggcaggagaatggcgtgaacccaggaggtggagcctgcagtgagccaagattgcamcactgcactctagcctgggtgacagagcgagactccgcctcagaaaaaaaaaaaaaaaaaaaaggtagattactctgagatgccacttgcagggaggtgaattgttagcggcactaattattcatgcaaaggacttttatgaactacaaaactctctgaaattttc

SEQ ID NO: 715158 - DNA, 832 bp, Homo sapiens
ttatattatgtgagtatattcccaacttgtaatgaacaattgtttgcacagcataagagtctgataaaaatgtgtcattctaaggagacctctgtttttttggtccaataaatacattgaaaattgaaaattaagtggtcagattacataattgtgtttatatcagttctcatttagtcagcgtcaatcaaatacaagacaattggttctattcaaaattggaaaataccaagtattggctaattgagtcattttacttgtaaaacacaagtaatgccacctaaaaaagcataatttattatggggaattaattttccttaataaatgggctcttatttctgaggctacaagcttctaaaagttttaaaagagtagtaaagttcactataaaaattgcaaagtgagggaatacagttaagtttttctacagtataartaattctggtgtctgtgtacttactcattgaaacatacaatcagcttcaaaagatggctctttataattgtcacatttctgttctgcgtcatcttctcaaatattttatatctataataaagatatatgatactaaaattattttctgttcttcagtatttataataaggaaactatttaaaagattatttttgtgatcaattcactgtgccagttgattattgaaggcttcatcaaggactctagactttcataatctttcataattggtgtaaatgtaatgttaagaaataaataatactgcctagaaatgagccagatgtaaccaaatttcaattattttatgagatttttagaagaataataatttaaataagaccttcaaacattttagg

SEQ ID NO: 715159 - DNA, 1361 bp, Homo sapiens
tatatatatatatgatgcattagtatatttcttacccaaagtatctaagctcagataaacagaagtttttaaaaatccatctatctcactgacatgaattagcacttaattaagacaaatgcagtgatcagtactgatccagaagtcaatacattggctgtgtgaaatctactccttctgtgcatatagacatggtttaacattactttccggtaaataacatgtaataaatgtaagaagttccagcaaagtaagtgatcttctcctattaaaaacaagcaaattatcttctattattaaaaatataaacacattttccttctctctgaattcaaagacatcgatatatacatattagaagttatggttgaaacaggtgaattttgtaaaaggaataattaaaactatgtatatattttatatattttaaacatgatcatatatcagtttcatccaagtattttcatctcttggccccatcaacctactaacctactttctctacrttttaacaattattgacaaaagattaatatgagtatgtttcatctcctgtggacttgtgtacacacacacatgcacacacacttgcatgagtgtgcacacacataggaacctgaacacatgaaacaatcattgtaatacttgaggtcaaaaacaccatttaacaaagacagtttttcttttcttttaattaattgtgtaattttcccatttcagtttccatatatatataaaggaagcctaactatgtgcttatacttatcgttcaggctagaatccattactttaattatcttagaatgagcagaaaaatctaatgtattggtaaatgtagttctcttaacagaaaagcagattttaaaggcattttcattttcaaactaagctggacattccatgttttctatgtacaaccgctgtttcattttgaatcactttggcacactgcgaagcgtatgcactattacaagaggtcaagttttactcagtgaatcgattcaacagaagaagcagaaatttccacagagggaaggaaattgccttaaagtcagctggcatcgttttgtttcagcttctggctctgaatggtgggaccaagtacatacagtgctctgtgctactttgaagagcaggaggcttgaagggctgttagaaagagtaatgatggaattgtaactgacgcactctctgtctggtgagactactcagaaaagactaacaagattgcaatgactaaaaggcctttgttgtctaggtaagaatgaaagttttttttcttttttagttctttgctcaaatgctgagcttaaattcataaaagccaaagattcagagtgacttactgcctttgatcagat

SEQ ID NO: 715160 - DNA, 660 bp, Homo sapiens
ttttttcacttaaattttgtgtaatgatgagaatagttgtgtaggttaaaatactgcaaataataaaaacgaatctagtaatctaaatacatattatagatatgtgatgaactataatattgcaaagaaatgaaaactgcagtatacacagccatattttgtctcttgattgtcacaaaaataaggcactcttaaaaggatatggctgaattttatgatggtatcagtaatagtgagaacaagttgacacaatgaaaataactgaaatgttattcctcatcttttagctaatacttycagaaaattccaaaataattagaaaagctcttgaaaataatgagacctactaggagaaagaaagtacatttgttgccttacagaactattaatgaatttaatagttcagaaagggttcagaaaggggtgaaagctgaagagaacctctgccaggatgttatccctcaaatttaaatagaacaggcattttctatctataatatgtttataagttgatatttctgctttaaatttcaacttgtttttcttctatggagctactaacatatttaacatttaaaataaattttaatttaaacaaaaattaaagttgttacttgtatgtaaggtatacctgtcaaaccagaaatgagtccttacttt

SEQ ID NO: 715161 - DNA, 2172 bp, Homo sapiens
ttatgaagtcagacagttctgttgattacctatttttgcaaatgccacaggttaccattgggagataaggagttaacacaaacacatgtgatgttgctgattgtgtgagtactaaataatatgtatgcagtgacaatttgataggctttcgtagaagtaactggtcactgatcatcatgcacatctattatttaattactgatttgtggaccaaagagttaccactgaagttcattctttatgcaattactcactgctaatggtgatgggaattgaactgtgatattggaggacttktgctatttattgaattaaactgtggtaactgaaatctgcatatcagaccatgcaaaaagagattgcctatacattgtaatattttggaaaattaagaatagtagccaaaacagaaagatccccaaatatcaatgaacttaataaaataaaggtttatttgtcattcttatatcaattaagattgggattattttttatgggcccataatttgtcctgagagtcttcaaacaacaacgttcatttattttcctgttatgtgttcatcatggtctgctcttcaaattactcaagaacactagctaatagatatctaccatattgaacaggagctgaagaatctcacacttagaatttaatgccctgatccagaactaaaacacataacctttgctcatagctcatacacactagaactagacccatggctccaaggagtaaaattcatcacaggtgtatgctaagtgttcaaaaggaagaatagggagtactcagcaaatagcattaatgactaccacatttatgtgaagtgagcctttttctctatctgatacacatacaatcagggacatatggcctccaatgtctctacaacagaacaagagaagaatgaagcaggggaggctcaccacttctttcttaatggccacatcctgacactacacaccacctctcctcatggtccaatggccagaactcattgcatatcttaagcctgcctgggtgcaagggaggtaggtatatgtagggaaatacatgcacacatcctagaatggtgattctccattagaggggcctatggtaacttattttataacgagcttttcagatatttataatgatcaggcaaagttgaggtactcagttacagaaaatcacaataatgggaagaatatattatagaaaaaatacacaagaagcctttaggcatttaactgagtattacctagatgtagttgatcttttctccagactaactaaactctcatcaactctcaataaatatgttccatctcttatacaagaaccagaggtacgggtcttttctacagcctattagtataaatccagagtaaagcacgtgcaatttttagatcaaactttaggaagaaataagatataaggaacgtcactaacaatgtaggacaaataactactgaaaggcaaaggtatagaaaaaacgttttgttaaaaaaaaaaagaaagaaaaaacattttgttttatgcttcgctctcagtgtccattacatttccaagccagcttttataattctgctcaattcagcagaaatctcatatgcactaactagtattttaaaattaaagccatttatttagcagatgagaaattagagttattacttatctcatacataattctaccagtcatcctggtagcaatcatttctgtccataatatctccttaaaaaaagtcaataatcttttcacagtggataataacttacacagcgaatgtgaaaagagtgttcaactcctttgtgcaatcaacccatgtcttttgttaagtatgtatgacttcgaatcagtgtaaaatggcaggctagcagttaaacagtgtgccttgctggatctaattaattctactattttatgccaaaaattccattagttttgattaaagcccttggatgtagtgcagactcctttatgttttgtagttaaaacaatcaaacttcatttcacattaaggattatattgcagaaccaaaggaatgctagtgtggatctctaccactgaataagttattcacttttaacaagatactctgaacgtgagttaactgcaaaattgttacctcataatatatcaacaagatatttaaatccacagggaaaaggcagctggcaaaaggca

SEQ ID NO: 715162 - DNA, 1801 bp, Homo sapiens
gcagaaggggttgtgagaaatcaatgaagggcatgtcttcaggagctggtacccagtgggagagtaggctttgctgtttttggagacctgagagtagttcattccagtcttggactatagtagrgaaggtgtggtgagcaaaggccagatagtgagtgaacttacatacatttgaataaactttagaccctattatgagggcaacagagagcatcttggtgctgtttttaaaaaatagtattttaaaattcagattacaaaagttttacctgttcatgaaggcaaatacagaaaagcctaaaaaaaaaaaaaaatgaaaaccccatagtccttttacccagaggtaaatattgttattttggtgtgattttattcatgattaggatcatatattttgttcccttttgttgttattacaaacattgtatattcatcgtataaaggtaaagaaaatacatataatttaagacacaaaatgaaacacaccaaaattttctttaaatggctacatttttttttgtttgtttgttttactttaagttccgggatacaagtgccgaacgtgcaggtttgttacatagatgtatgtgtgccatggtggtttgctgcacctatcaacctgtcatctaggttttaagtcccgcatgcattagctatttgtcctaatgctctccctccctttgttccccaccctccaacaggcccaagtgtgtgctgttcccctccctgtgttcataacatagccacatttataaatgtttatatatccttctgaatatatattcttctcaatcttctctgtatgtctctctgtgtcttattctcaatctctgtttgtcaatcgctttttaatgtttttttaacctatacgttctattaaatataccaggagaatatttctataacaataaaatttcagcataggctaattaataatgaccaaataaagttatattgtataacaaaatttatttacccaacctcctatggtgaacatttatgcttctccaaattttcattccaaatacaatatggtcataaaagtttcatagctaaacttttcacagatctctaaagattttcatagaataaaacattagcagtggcatttaaggtatttaaagattttgatacatctattgttatattgcccaccgacaagcagttccaccatttctcctggtctgtatcctgaccaccttaaccactgagtatcatcagagttttataggtacaacatggcagttcattgttgccaatttgcattcctttactaaataatgaaattaaacacattttcatgtatctgttggttaattttcttttctcttgcaaactgtgttgatgatctttgccatttgttatatgaattcttttcttaccaaatcttacattaaggatattttccttttcatatataatgaatgtatttttgttagtaaatagcttttggttggattgtgttcattcatggctttttttgtaaataaaaataaaataataaaatataaaagctattgctaaaaagttttcaacatttttacaatgggatctattgatccttcccttcatgaattctgctcatagcatttggcatagaaaggcatcacccgctgtataataacgtggatactaacctgtgatttatcctggtaattgtaccatttctgtttttagttgtaatattttttgatccacatgaaatttagattcatataatacatgaagtagagttctaatagtctcctctcccccagatggctagccaagtgtcccaacccttcgtgttaaagaatgcagc

SEQ ID NO: 715163 - DNA, 1801 bp, Homo sapiens
gcagaaggggttgtgagaaatcaatgaagggcatgtcttcaggagctggtacccagtgggagagtaggctttgctgtttttggagacctgagagtagttcattccagtcttggactatagtagagaaggtgtggtgagcaaaggccagatagtgagtgaacttacatacatttgaataaactttagaccctattatgagggcaacagagagcatcttggtgctgtttttaaaaaatagtattttaaaattcmgattacaaaagttttacctgttcatgaaggcaaatacagaaaagcctaaaaaaaaaaaaaaatgaaaaccccatagtccttttacccagaggtaaatattgttattttggtgtgattttattcatgattaggatcatatattttgttcccttttgttgttattacaaacattgtatattcatcgtataaaggtaaagaaaatacatataatttaagacacaaaatgaaacacaccaaaattttctttaaatggctacatttttttttgtttgtttgttttactttaagttccgggatacaagtgccgaacgtgcaggtttgttacatagatgtatgtgtgccatggtggtttgctgcacctatcaacctgtcatctaggttttaagtcccgcatgcattagctatttgtcctaatgctctccctccctttgttccccaccctccaacaggcccaagtgtgtgctgttcccctccctgtgttcataacatagccacatttataaatgtttatatatccttctgaatatatattcttctcaatcttctctgtatgtctctctgtgtcttattctcaatctctgtttgtcaatcgctttttaatgtttttttaacctatacgttctattaaatataccaggagaatatttctataacaataaaatttcagcataggctaattaataatgaccaaataaagttatattgtataacaaaatttatttacccaacctcctatggtgaacatttatgcttctccaaattttcattccaaatacaatatggtcataaaagtttcatagctaaacttttcacagatctctaaagattttcatagaataaaacattagcagtggcatttaaggtatttaaagattttgatacatctattgttatattgcccaccgacaagcagttccaccatttctcctggtctgtatcctgaccaccttaaccactgagtatcatcagagttttataggtacaacatggcagttcattgttgccaatttgcattcctttactaaataatgaaattaaacacattttcatgtatctgttggttaattttcttttctcttgcaaactgtgttgatgatctttgccatttgttatatgaattcttttcttaccaaatcttacattaaggatattttccttttcatatataatgaatgtatttttgttagtaaatagcttttggttggattgtgttcattcatggctttttttgtaaataaaaataaaataataaaatataaaagctattgctaaaaagttttcaacatttttacaatgggatctattgatccttcccttcatgaattctgctcatagcatttggcatagaaaggcatcacccgctgtataataacgtggatactaacctgtgatttatcctggtaattgtaccatttctgtttttagttgtaatattttttgatccacatgaaatttagattcatataatacatgaagtagagttctaatagtctcctctcccccagatggctagccaagtgtcccaacccttcgtgttaaagaatgcagc

SEQ ID NO: 715164 - DNA, 562 bp, Homo sapiens
cacttcagtgctaagtgcttccacctggtggccaattcaaataaaaataggggccagcacagataagagatgcmccgccttcaagaggcttgcatttgtggaagaaaaaacacaccaagtatgcaaatgcaataaccaaaaggccaatgtgaaggacatgaaataaggcagtgggataaagaagtgtggcatgggagacaggcgggcttcttggttagatatgacaggaacagcctcttagaaaagtgatgtaaagtaaaaataaaggccctagccctccaggcaagacggaatagactctttgtggcaataagatagcaaattatgggctgggcgtggtggctcatgcctgtaatccagcactttgggaggctgaggccctcgttccatgtccttctatgttaaaccatcccccaaatggtgtgaagtccccagaatggctggccccgccatttctctattttgttttctctaacctcctgccctctctcttccacctccagtatatggcacggcacattggaggtgctcaaaaatgatttaataaatgaatggagaaagc

SEQ ID NO: 715165 - DNA, 1622 bp, Homo sapiens
gtttatcagtagaatgggaataatcatcatcatcacatctttctaaaggcatttttaaaatgagaatcaaatgaaataatatggtaaagtgactatcacagtatgtgaaacacagccctcaaaaatgtaattccttattataattgcgtgtctactactcagtgagttcttccaatgcaaaatccatggcacttaaacttgtatttaatgcctaatgatattcttatttatttaatgtacaaaagcttcacagagtaagaaacaattaattatggcctatattagttaggctaacactaaacaataacaaaactagaaaaaaatacgtgttaatttcttggctctgtaacattcttaacaagtgtttctgatcctcatgtacctctcctcaaaagtgtgatacagaaacgcagaatcctttcatcctgtcggttccccatcttcaacatagtttccaagatcatcatgcttgtctgtctgtagataataaaagaggacaaaaagtggagaaggcatacttattcttgaccaccctggcccagaaagaaaatacctcacttctgttgtcattccactgtaaaaaccatgatctttgccacacaactctatgacatgcrataggtaagcaagcatccatttctaatagcccttgaagaatgttaggaatttgatggaaagaagatgacagggaaggatactcctgggaaaagaaaagaaagtgaataatgggcaaagggaagtttaggattatagaatcaacacatttcacatttcaacggaaatgcagggtacatgatagggaagataagagataagagtgggaggttgaactcagtctgcacaccttattatgattgttcacttcacatcatacacagcctagggctctatacttcctgagcttgacattacatactgcctcacacttaagtgtaaaattagcaaatgggaaaatacctgagctcattagataatgactaatcatgatcattttaagcacagttgtcagatttgacaaataaaaacataggacattagttaaatttgtatttaggacaaaaatattttcatagtaggaataagccccatgagatatttgggacatatgtatattaaataagtatgtattgtttatctaaaattaaaattcaactgggctccctgtatgttattggggcaacactatttttttaagggcaagaaacgtatctaaataatttctctcctagtaataactgtaattctctgtactttaggtaaaattatagaaattttccctttccttgtcacatttttttctttcaagttctgcaccaaaaaattattctctggcaataatcgttctttcaagttgcttcaaatggtaaaaaatagaaattcattatgcagaatcacagttggttctgtgatgggaccatcatatgatgggactgcaagcagagactacacatttatcgacagttatttcctatggtatctacccttttaacagttaatactgatgactagttatagaggttcttcaaccatgtagcccatcaactagataaacttgttattgattccaaaccatttttttaaggaaggttctgttttgcttttagaccagactgtacctctaa

SEQ ID NO: 715166 - DNA, 1249 bp, Homo sapiens
tgaagagaaaatacatatatacaaatggtaataaagtaggaaagttcctaagagctgtggatgtaagaatttaggtctgggtaagagaaggaagtgagaattctgatatggaaggagaaaactgtgcgaagacctaaaagcaatttgggttatcatcaatttgtctagttagaggctctactctgagttattactctggtaccctagccactaaaatcacaaactccttgaactttttctagattcaaagtctgggcttctgtgttactgaattatgctacatcctacatccttaaaatggacacagcagatatagctgcacttgatataacttttcatatttgtttcacaaaatataagctartattgaatgtaactagcccataacaacaagcaacaacaataattcttcataagacaacttactccttcatcaatcactaacattcacaaaggttttctaatgtattgtctttttgtatcctttcagaaatccagggagtagaatacttcaattttaaaattaaaaaagaaagcatataacatggccagattataaatatacacatgaattatatcaagcctaaagtatctacttgtcttgcttctaaacctcacagatctcatgggtaaactttgagaacatactggttttgtagtaaagacatgtaatcatcaaaggaaaagctcagatttttatatgtggccacatgtgaaaactattgtaaagtggacagatcctgaaatagtattgagtaactggagctggatttgacacaaatcttatgtaataaaatgccagtctacttctgctcatactccaaccaccactggctcccttggcagtaatcaaagcaataatgacccagacaagtccttttatgcacagcttgacaggcagccagggggagtttctgaaaattatgaaatataaccctccattatgaagatcatggagtcatcccctcaatgtggctaagtagctttaattttgattgctgtcagattttacagctctcaacacttgcagctccttggctgacttaagataggtgtcttgcaaaattcttttttattttccacatctattgaacagaacttcatttcactggagccatgaaatatcttccattctgcaaccagtgggtctttgacttaagcagatgagttagttcactgatctgacagccaggttgtcttttttttttctgccccactgttaaatctctgtctcccaaaggtatctgtc

SEQ ID NO: 715167 - DNA, 1115 bp, Homo sapiens
ctaacagcgattactccggaaaagttcctacctagcccacctttataagaagtagagaacattttctgatagggactgttgagctacaaatctgtaaagtcgagttgggaaaggtaaccagctacagttaagcagtttaactttagactctgtcaatgtcataattttacatgtttccaaaagaatacgaccagaagtacaacatgtaggcagtttgggttaggttgaagacagtccctttagtctgcaagactctgcataactgcagaggaaaatgtgagtttgaagttctggatgtgaggccaaaattagagagataaagcaaagataaagtccatgaaaagaggcaacatgtggataataaaagtggactctgcagaggacacagacttctgtgtccccatatgcaagcaatatgaggatctaagatgatccttgggcctcaacaggacagctgagtaatataatcaagatggggagaccctacacagctatcttcatgacagtaaaacatagtccagcccttttgttctaataaaatggctgcatctttcgggtgcactgatatgttatgttctatgctaagcaaattacatgtcatcttatttcattctcataaaataaaattatatattttatttttcaagaagttgaagcttaaagaaattaagttccttgaccctctataatgctcacatttggatttttattctgatttaaaagatgagagaaaattttactcttaaatgatatatggtctatcttaattcatgtttactaatcatgtacaacactcacaaagaaatgaagagttgagctctaacacrtattccagaatgttggtccacgaatgttgataatttaagtgtattaagtttgcctggttagctttttttttttttcaatagcttaaaaaaaaaaaaatcctgccctcccaggatattggagaatgtgacctactatgcattatctaaacatagcttggaatgggcaaagatagcttgagagtaacccatgtaaaaaaaaaaaatcttaacttaagaaatcaccaattgagtctatgttataaataagcttgcaaaatgaactaattaaatgtaggcttcctaaataaa

SEQ ID NO: 715168 - DNA, 657 bp, Homo sapiens
ggcatgatcatgggtcactgcagccttgaactcctgggcttaagggatcttctcatctcagtctcctaaatagctgggactacaggctcaggccaccatgcctggtaagttaaaamaagttttttttagagacagggtctcactatgttgctgaagctggtccccaattcctggcctcgagccattctcctgcctcattttcctcagttgctaggattataggcgtgagccactgcacctggctctaatttttcttattatgagtgaaattaaacatctttttatatgtttaatagtcatttgtaattctctttctatgaactgtgtttttaatatattttgaccacttatccgatggattttcccctttggtttttaagagctcttagaaggcctatataaaaatttgttttctaagcttattttcctggtttgttatttctgtttgtcttttttttcctatgtagaaattattaatttttattccactggaatgagggatccttttcttttatagcttatggctttttagtggcatacttggaaaggccttccctgtgctgaggttaaaaaatttttttcattgtttctcatgtttttacagttctgtatttcattcatgtaaatctttcagcagtctggcatttatgttggtga

SEQ ID NO: 715169 - DNA, 657 bp, Homo sapiens
ggcatgatcatgggtcactgcagccttgaactcctgggcttaagggatcttctcatctcagtctcctaaatagctgggactacaggctcaggccaccatgcctggtaagttaaaacaakttttttttagagacagggtctcactatgttgctgaagctggtccccaattcctggcctcgagccattctcctgcctcattttcctcagttgctaggattataggcgtgagccactgcacctggctctaatttttcttattatgagtgaaattaaacatctttttatatgtttaatagtcatttgtaattctctttctatgaactgtgtttttaatatattttgaccacttatccgatggattttcccctttggtttttaagagctcttagaaggcctatataaaaatttgttttctaagcttattttcctggtttgttatttctgtttgtcttttttttcctatgtagaaattattaatttttattccactggaatgagggatccttttcttttatagcttatggctttttagtggcatacttggaaaggccttccctgtgctgaggttaaaaaatttttttcattgtttctcatgtttttacagttctgtatttcattcatgtaaatctttcagcagtctggcatttatgttggtga

SEQ ID NO: 715170 - DNA, 657 bp, Homo sapiens
ggcatgatcatgggtcactgcagccttgaactcctgggcttaagggatcttctcatctcagtctcctaaatagctgggactacaggctcaggccaccatgcctggtaagttaaaacaagttttttttagagacagggtctcrctatgttgctgaagctggtccccaattcctggcctcgagccattctcctgcctcattttcctcagttgctaggattataggcgtgagccactgcacctggctctaatttttcttattatgagtgaaattaaacatctttttatatgtttaatagtcatttgtaattctctttctatgaactgtgtttttaatatattttgaccacttatccgatggattttcccctttggtttttaagagctcttagaaggcctatataaaaatttgttttctaagcttattttcctggtttgttatttctgtttgtcttttttttcctatgtagaaattattaatttttattccactggaatgagggatccttttcttttatagcttatggctttttagtggcatacttggaaaggccttccctgtgctgaggttaaaaaatttttttcattgtttctcatgtttttacagttctgtatttcattcatgtaaatctttcagcagtctggcatttatgttggtga

SEQ ID NO: 715171 - DNA, 657 bp, Homo sapiens
ggcatgatcatgggtcactgcagccttgaactcctgggcttaagggatcttctcatctcagtctcctaaatagctgggactacaggctcaggccaccatgcctggtaagttaaaacaagttttttttagagacagggtctcactaygttgctgaagctggtccccaattcctggcctcgagccattctcctgcctcattttcctcagttgctaggattataggcgtgagccactgcacctggctctaatttttcttattatgagtgaaattaaacatctttttatatgtttaatagtcatttgtaattctctttctatgaactgtgtttttaatatattttgaccacttatccgatggattttcccctttggtttttaagagctcttagaaggcctatataaaaatttgttttctaagcttattttcctggtttgttatttctgtttgtcttttttttcctatgtagaaattattaatttttattccactggaatgagggatccttttcttttatagcttatggctttttagtggcatacttggaaaggccttccctgtgctgaggttaaaaaatttttttcattgtttctcatgtttttacagttctgtatttcattcatgtaaatctttcagcagtctggcatttatgttggtga

SEQ ID NO: 715172 - DNA, 657 bp, Homo sapiens
ggcatgatcatgggtcactgcagccttgaactcctgggcttaagggatcttctcatctcagtctcctaaatagctgggactacaggctcaggccaccatgcctggtaagttaaaacaagttttttttagagacagggtctcactatgttgctgaagctggtccccaattcctggcctcgagccattctcctgcctcattttcctcagttgctaggattataggcgtgagccactgcacctggctctaatttttcttattatgagtgaaattaaacatctttttatatgtttaatagtcatttgtaattctctttctrtgaactgtgtttttaatatattttgaccacttatccgatggattttcccctttggtttttaagagctcttagaaggcctatataaaaatttgttttctaagcttattttcctggtttgttatttctgtttgtcttttttttcctatgtagaaattattaatttttattccactggaatgagggatccttttcttttatagcttatggctttttagtggcatacttggaaaggccttccctgtgctgaggttaaaaaatttttttcattgtttctcatgtttttacagttctgtatttcattcatgtaaatctttcagcagtctggcatttatgttggtga

SEQ ID NO: 715173 - DNA, 788 bp, Homo sapiens
cttctttgggtaattttattttgtgtcaaaagcagaatgtggtgtccctgttgaggcatgcaaaagaatctaagaaaagcttgtggtctttattatttcacactgtttccgctgtccttatattgaagaacactaatttaagaaggagaaaaagggcacgaaaacttgtattgttatacatagcatgacatattgggtttttattctccaaaacggagagccaaatatatcatcaagacagtttgggtacatctccaaaaagaatacaccaaacacctctcagtgaacagaattagagctagcagtcttgacacctgccaccttcttctctccccacccaccaaccatgtgagcacaaagacctctccctccaccacctgccccacatgtccaaagattgcagaggtggatttaagagcattgtctgtgagtggcatctctgyggcttaggagaatacaactaggaaaaggaccacataaatctcatatctttgttgttcttttggttttttccctcttttctgaaaaacctatgggttattttgtacggttgcacaaaatagcctattgttcctcaagaagagaatggatatgagcctgtaatgttgcagtctccaaaaagagagccacctgtccctccaagctccaggatgtgagtggtggcaccctgaagcactaagagggcacaatcagggagacccggtgaacagttgaataaatagaagtgaattaagcaaaagcctgagaaatggaactggacaatcaagtggaataatacccttatttgg

SEQ ID NO: 715174 - DNA, 1000 bp, Homo sapiens
tgaatctttaggactaggacttctgccttagaggacaggctccaaatctctgaccaggatatctagacagtagacaattcttggaatttgggtgggttgttctttcataccaggaaatctgacttcgagctattgaggcaagtagaggattatgggaaataagatggcagaactccaccctttatatgtaatttaggctaggactttagtcttcaagggagtgtaggcatctaagcaacataatgcacaaaagctcagttgtacagctttggcttgcatggcaakgggggtcagaatttactctccacatataacctgcgtacccagaatgcatactagtaaccaaaaggctggtcttatttgttagtgataaaaacccatacaagtcacaagaaagttctacagctgttgctgggaccaggcccatctctaacatttgtgggtctggaggaagaatataaatatggaggcctaattccatatgtctaaatatttaagctattgtcaacataaacatctgttaaataatatgagcccaattgccatccttctatcttggcaaatgtttaaaatgtttttaaatgtgcaaaagattaaatttttatggctgaaagtcatcaaaatataaatactaaatctattatttcatgtatctagttggctaatatagtgatactttacacaaagaagacatacatgacttactgtacatttatactgaaactattaaatttatctttactttcagtctcacaatcagtcattatgttgttataatcagtatttccacaccactttgaatactgctgacaaaaatgccaaattacacaacttttttgagtcattaaaatttcgatttggagaacaattctgtaaaaacagaagcaactggagttgtcaataaaattttaagacaatggctttttaaagtgagctagaaattcattgaaatgatgttaatatgaagaaatataattgttgcaaattgataaaattttta

SEQ ID NO: 715175 - DNA, 557 bp, Homo sapiens
ggcggcatgcgcctgtagtcccagctactcgggaggctgaagcaagagagttgcttgaacctgggaggcggaggttgcagtgagcccagatcgcracactgcactctggcctgggcgaaaaagtgagacttcttcgccaaaaataataacaataataatagcaacaatttctaacattgccactcactgcctgccaggcacaggcttaactgctttacatatattggcttatttaatctcccaacatctcaatgaaggatgtactatattcttaatttaaaagtgaggaaactgaggcagagtgattaagtaacattcaaggtcccatactagtgagttataaacctcaaatagtcacagtaagtagcagaggtggaatttgaagactgtttccttgacctcaataactcaccaagccatgtgcccttgggttaatcactcattctctctgggccgtcgtgttttccataagctagggactaataaggacttccctgcctgtcacccagggcttcactgaggatcaagtaagcagtgcttgggaaagggctttgaaa

SEQ ID NO: 715176 - DNA, 557 bp, Homo sapiens
ggcggcatgcgcctgtagtcccagctactcgggaggctgaagcaagagagttgcttgaacctgggaggcggaggttgcagtgagcccagatcgcaacactgcactctggcctgggcgaaaaagtgagacttcttcgccaaaaataataacaataataatagcaacaatttctaayattgccactcactgcctgccaggcacaggcttaactgctttacatatattggcttatttaatctcccaacatctcaatgaaggatgtactatattcttaatttaaaagtgaggaaactgaggcagagtgattaagtaacattcaaggtcccatactagtgagttataaacctcaaatagtcacagtaagtagcagaggtggaatttgaagactgtttccttgacctcaataactcaccaagccatgtgcccttgggttaatcactcattctctctgggccgtcgtgttttccataagctagggactaataaggacttccctgcctgtcacccagggcttcactgaggatcaagtaagcagtgcttgggaaagggctttgaaa

SEQ ID NO: 715177 - DNA, 1380 bp, Homo sapiens
caactttacatgtttttaacctgcaaacacattgtgttaaaatatttattgtttcctaatctcactcaacactttaaaaaaattatccaggtagatttgtttcctcttactgctgaatattacttattttatggatctgccacattttacttttcttgtcttttaatgagggacacttgggttgcccccagtaaccctctgccacaaacaatatgtaaattaaccttccatttcatgtcctcttatgggtctaaatggaaatttcttggagatatatacccagaaatggcatcatttagttaaaaggcttctacatacagattacgctaaattgtatgagattgctttccaaaatgcctgtaccagtattcatttccaccagcagtacctgagagttctcatctccccatgtcattgcaatatttgtatgtatgatggttaatttcatatgtcaacttgactgggctaagggatgcccagatagctggtaaaaaattatttctgggtatgtctgtgaggatgtctccagaggagattagctttggaaccggtagactgagtaaagaagctctctcaccaatgtggacaggcattatctaatctgttgagacctggaatagaacaaaaaaggcaggggaagggcaaattctccctctgttttcttgtgctgggacatccatcttctcctgcccttggacatcagacctcttggttcttgaggtttccaacttacaccagtggcctcactccatactgagactgggagttataccatcagttyccccggttttcagtcctttggactcggactgaattacacccccagttttcctggttctccagtttgcagacggcatatcttgagacttaccagcatccataattgcataagccagttcccataataaacaaaccaacaaatctatacatatcctactgattgtgtttctctagaaaaccctgagaaatatagcatggattgtcttctgatgtttgccatgctgatgggtataaaagtaatattgttttactttccattactggttgctggtgaattttggcatatcttcatttatttattggtcatttgaacttttcctagtgggctacacaattaaaaagaagtgagatcatatttgtccatgatctgctgagtgtgttttttttttttttttacttctcagtatatttgggcatcttttgatgccaataaatatatctatgcaacatcattttaatatcctgcacagtatttcattttattaaaatgaaatgaaacaaattatgaaacaaatcataatttgtttaaccattctttgctgttggatgttaaggttattttggttttggggtgtgtgtgtgtgtgtgtgtgtgtgtgtg

SEQ ID NO: 715178 - DNA, 675 bp, Homo sapiens
taagagaagacaaagatgttaataaagctaatggaattgcttaacttggtgtattctccacaaaagatatttttatttttattttttgggacaggatctcattctgccacccagcctggtgtgctgtggtgcaattgcagttcactgcagccttgacttccccggctccaacaatcctcccacctcagccttccaagtagcggggaccacagacacgtgccaccacacctggctaatttttgtatttttggtagagactgggttttgccatgttgtccaggctggtctcaaactagtgagctcaagcaatctgcctgccttggcatcccaaagagctgggattacagaygtgagccattgcacctggcccaaaggagacagtatttctcaaggatgttgtacctctaaggttaagaaaatatgttatgaaaaatattcagagactggaataaacttttttacatgcttcaattttaggcaatatcaattgactggctgctataaaagataaggaaattaccattcttacacttccccttcctcccttcccccacttcccaaatattatgagtagtactgttcttttttttctatttttacctcttaatatgagtcattgtcagtgcatgtgatcaagatgaaatggtgcatgttatggagaaatgtgataacatg

SEQ ID NO: 715179 - DNA, 635 bp, Homo sapiens
ccgtggtgaaatttctatatttccccaaatgtgtcgtgttctctttcgtgcctttcactgttccctttgctctcactatcctttctcacctggttaaacttctactcaagctttaatctcagagaagattgtttcctttgaaaggtctttcttcctcccgcttgcagtataagttgaatcctctaattttatggttccattatggcctatatctcccttttggtaaaacaaaacaagacaaaacaaaaaaaacaaaaaaacacttacagtcccctcccctttaatacttgagtttcataaaaattgttatatccttaggaaaggggccttgtctttgtgttagtgctttatcttaggaattyagcacattgcttggcacatactagatgctcaataaatatttgctgagtgttggtggaattaagcttaccgatgatgcctgcagagaaatgaccatgctgtcttttgaaccaccctccccaactgtattttcatacagctatgtacgtagcatacacgccatgtctgaattccttttaataactgcagatcatggcactcctatgctgcagatcatggaactaaaaagctctgaaagactgagttggacttcgaattgcaatttaaaaaaatct

SEQ ID NO: 715180 - DNA, 1987 bp, Homo sapiens
cattatattacacatgcatgtcatctcagcaacctgtgatttcagatttatgtatgtatgtatgtttgagatggatgagtctcactctgttgcccaggctggagtgcagtggtgcaatcatggttcatggtagcatcaaactcttgggctcaagtgatcctcctgcttcatcctgccaagtaacagagactgcaggcagggaccaccatgcctggttaattttgaaaaaaatttttagagatggggtctcactgttacccaggctcgtctcgaactgctggcatcaagcaaccttcctgcctcagcctcctgaggtattttagattcctaattcaagtttttggggatttagaccacatgtcttattattcagaacatttgttgatggagacttagatgtcactaggttccctagaagttcaatgctttgctgagcatactgctaaatacaaatattaagttaattaaccaagtagtcaattcatgcattattcagagaatcactctgcaagcatgtcctaagctcctacaatgtgtcaggcactgcttccagccatgcaaacacgaagcaaaaaggcactgactctgggaatccttagcctctaaccagtgaacctactacattatgagacagatcacaagactttcttgatatttgtcaaaacaccaaagcttactaataattttcctattatataaagtgaagtaaattcaaggtttttctttcaataatgtaagttttactaccatggtttctaatatagtttcctgcatgtggaaacaattgagttattgagatagggtaagaaatagcttataacattgaatattactgggactgtgttgggactatgttgtataagtggactttgtggataaaacaggaaaactaaaactaaaattgaaaccactggttgttggaaagaaacaggtatatggatgacaaggcaaccataagcaatatgtcacacaaaagttctgtggaagcacagagtagactgggaaagtttcctacagaaggtagagtttaaagtagtctacaaaaaacaaatcagaatcatgagcccaccagtgcaatagtctagggcagggaaattgatcgctactgtgaatatatgcaatggttttgtcttaatggaccatagtttgtagataaaaactgaaatgagctaagttgggaagggtttctgaagacattttaaaaccatgctaaggaaattttggactacacagtgtagtcattggcaagcccacatatcaccgtaaaaaaggagaagacatcacctttttcatatggcttcttttcaagatgcaattataaactagttcttctgggtgaagaagcttttgggtttttccagtcagctcttacagtatgagtgagtggagtctcagactgtgaattgccctccttcaagagatatttgagtctcatcgaccacaaaatgtctatccctctgtccatcattcactgcccaaggtataaactcccaagcatttcatcccccactgcacaatcaactcaaaccactctaaatgtcctgccccacccaaagccattaatgctacctccaattctcagatacttttctatgcccttgaagattctaccttttaactagaaaattctcatagatacttaaccccttcccttgagagtatattgactaaaacatgactcttacctcgtacactttcttttgaaacctctgcaagctgcacaccycactcatctcagagaagcctgaatattttgtaatgaattaggtttccagatagatacgggaggattatggattttcaggcaggttacatttagcccacatagaagatcagggaaactaatggggaccaacctgtttaggaagtcttatgcaggcagagagggcctagcacttaagaaatcagatattccataaaagcaataataacaaacagacttaaatcctaactgcgagtcattgatgctcttctttccagaatgcca

SEQ ID NO: 715181 - DNA, 592 bp, Homo sapiens
tcagtacaggtcccattgcatttgttgattttacaaatgaatagatcctcagtagggagaagccagccttctctcaaaagccctcttcaaagcagaggctgcctgggtggtatgggtgatctgaatattgcctgtttaaacgggcagtcagtgatgcacataccatccaaccacatgtgtaacttatttctgaattattataccagggcagaaacctacctcatgagtttccaccacagtagtactgaaagttcagctgtccaatttcaattatattccatctgcaaatccagactatatccaaagtcatgattccaccatttgtcagcattgagaagggcagaagagtatatacctgaggcstcttctctctgctcccacctccttctgtatatcctccccaccaatatttttacccactctccttcccctttctctatcacattcttggccctctccattgaaggagtttagtcttttcatctcaggtatagtcattagctctagagttaaaatttatttttttacttactttttttttttttttgctactttcaacatagtaaatggagattcagaagaaagcttcata

SEQ ID NO: 715182 - DNA, 595 bp, Homo sapiens
atgcttgtctgctctggtaaaaccccttactgagttgttataaaaagagaaaattgagatgggttgtgggaataccaaaaagagttgatgcagctaaaaagaattgtcatgtttacaygttttattgctgtagggctctcatccacctagaaccttcagtaagtttgccttgcctgctgacatcagagctcaaaagttctgttctcacaaaaaattccagaaagaaacacgtatacccagagttagtaagcaataataatattaagcaaggcatgcttaagtcatttaatgaacaggtacacaaagtttcagtgtgaaaaaactggccaatcagtggcaaatacgcataatgcttcctgaacagagtttatacctctatcttccaataattgcctttgctatactttgtttcacaagactaattctagagtacattcatttagcttagggagctgcatatcttttcattctgcagaaaaaaatttaagcagaaactaaatatttattttgtttatctgaggaagaaatttgcttgaaggtgaaattttaaaaaattcaccttccaaatgatgttacattttttgttatcatgcat

SEQ ID NO: 715183 - DNA, 634 bp, Homo sapiens
aataatgtcaagggaaaaaatcggtgcatgtttagtacagatttaatagcttttagaatattttcaatccaatgttggtggaattagctgatgaggaacccatgaatgtaaaggccaactgtgtgtgtgtttgtgtgtgtgtttgtgtgtgtgtgtgtgtattagctgatgtgtatatatacacatacatatatatgtgtatatatgtgtatgtacacatacatatatatgtgtatatatatgtgtatgtgtgtatatgtgtgtggtgtcggttgttccataaaaatgcaatgtgaaaaatgtaraaaaagaatcaaatgatttatttagtactacattattacttcttcccattctagcactctcctaccctataattaattcaacatttttaggtaaaaataaatacatcattgcttattacaatcaacaatatgtacatacatatatgtacacacacatcttttttaaatgtatggataaatttttagtagtagagttctcatttattaggaaagaccagttcttggtgtaataacttatataaattagtgtgtaagtatgggagcatgtgtaaattaatacaacatttcaattaatcataatatgtaaagagttaatattgatattatgc

SEQ ID NO: 715184 - DNA, 634 bp, Homo sapiens
aataatgtcaagggaaaaaatcggtgcatgtttagtacagatttaatagcttttagaatattttcaatccaatgttggtggaattagctgatgaggaacccatgaatgtaaaggccaactgtgtgtgtgtttgtgtgtgtgtttgtgtgtgtgtgtgtgtattagctgatgtgtatatatacacatacatatatatgtgtatatatgtgtatgtacacatacatatatatgtgtatatatatgtgtatgtgtgtatatgtgtgtggtgtcggttgttccataaaaatgcaatgtgaaaaatgtaaaaaaagaatcaaatgatttatttagtactacattattacttcttcccattctagcactctcctaccctataattaattcaacatttttaggtaaaaataaatacatcattgcttattacaatcaacaatrtgtacatacatatatgtacacacacatcttttttaaatgtatggataaatttttagtagtagagttctcatttattaggaaagaccagttcttggtgtaataacttatataaattagtgtgtaagtatgggagcatgtgtaaattaatacaacatttcaattaatcataatatgtaaagagttaatattgatattatgc

SEQ ID NO: 715185 - DNA, 666 bp, Homo sapiens
gcgccccttcatacatgttgctctctctgctttgatatttcctatctttcccctgacatccctttacaaaayaaaacacctttcatgtgttacgttctatttctttacctacttatgtcattactaatcctttgtctacttatattattacacttaaccactgcagttatcttgcattctattttttcattaattcttatatttataagtgcaagaatgcaaaaaacaatgtctgcttggtttctgttatatcttcaaagtatatattgtctaatccgtacatagattacaatattatttcagctttaaataatattgactgtaagacatcaatgtgccaggtacagaagtcactcaatagatggcatagtaaccaaaaatgcaacagatataattttcagtttcctctttcactccgcatctggctgttttaaaatacttgttttacaaaatcactgtggtttttcatgcctctttgcctttgaataaactgctccttcagatcaactatggaaaggcataataggctatgttcaagattcaaatatagtatcttctccgtggattatcttttcctagatttcttttcccttctccacaccctaagtgaggtttcactgggtctttacagagaatcatgaacacacatgtcttcttaaatgccct

SEQ ID NO: 715186 - DNA, 2695 bp, Homo sapiens
cttctgagaagtatgcagactccaattccctcaaagaacactcagtgtatgtggttcacaaatggcaaacagagggtgtgagatatggcagggctctcttcaaacagcctgctcaacttcttattctctaattccaagtacccgccccctgcccaccacctttcttctccttttcttctgattttactacatgcccagacatgccacagccccaactcacattcctttccttatttgaaaatagactggctctctagtcctctgtagacgaccctttcctcctctcccctctctcccattaggtgcccaccttatctaaaaaagtttaaatgcttagccaatcgagtccactttagattgtgcagtccaaccccagctaatgagaaaaggacacagggtcaagagtcgcggtaaaaataaaagcttcaggccgggcgtggtggctcatgcctttagtaatcccagcactttgggaggccgaggcaagcggaacacctgaggtcgggagttcaagaccagcctgaccaacatgaagaaacattgtctccactaaaaacacaaaattagtcatgcatgatggtgcattcctgtaattccagctactcatgaggctaaggcaggagaatcgcttggacgcaggaggcggaggttgcggtgaactgagatcgcgtcattgcactccagcctgtgcaacaagagcgaaactccctcaaataaataaataaatataaaaagaaaataaaagcttgtactctcctttgttcagggtgctttcgtgccagccagcctgatgagaaacacccttctgcgcaaaagtaaatttgctttgctgagaaatcctttatttaagtgctgtttttctttatgactccgaactttttttctaacagaggggctctaactatttatcatcatagccttagtcagttatccaggcctatgatttaaaaatccagtagtaaatgtcctatggatgccatcaacagtctcttaaaaggttttataattagacaatttttaatgccattcccattgcctctgacagacaactgtcatgttttgcctttgctacctaagaatcttaccaacttcgttgaactcaggaaacctgttcagtggcctaatcttctacctgcgtcctcaggctacacataacaaccagtaaaagtatgttttgtcatattgctacttgcctctccaataggatcctcgaagtggtattccatgaaaacactcaggggacatggtaggctatggttgaataaaatataacgatacaggatacagttcctctaacatttttaacttctttaattaattcacttatacaaattcatttttagcatccaagttccaattttaccagaggccacagtgaagctcaagttctagtcaaccaaacaaattaataccagaccacttaagaattcaaggtttattttactgastactttatccaccaatatgtcctgatgtataataatactctcagaatacatacaaaaatctattcttcatatatattgtccatatggactataaagtacttggggttatttgatatgtgtttgagcattttgagaggtatcaaataaatagcatgtctcttttcttgaattctgaaactcttgtgaattaaaataatgaataagttagatggagcaagatgttttctttaaaattgtggaagccaattaagattctaactattaactcccatcattagtcagaaacacaatcagtttccccgtatcagatgccttaacttgaggaacaaagagaacttttactttgtgaaagtaatactacacccttccaaaaggaaaatttatgagaagctgatctaaacatgtaaaattcattgtttttaatttactaattagaaaatgtacactctggggacagagtttttaaattcagcaaactgtaggaatggactattttaaatttggccctgttggctgtattgaccccgaacctgtaggaaaataaatgaaaaaagatgaaaaataaatgagagaagctaaagatgctctctagttctggcatatgtgtattgaggttattttttctatgtatgttttcgaataaagcaaccatgccagcactcaggctgtgtatgagacccagtaaagattcatttatttattttatgttttttgtttgtttgtttttgagacagagtgtctgtcgcccaggctgaagtgcagtggtacaatcttggcttactgcaacttgtgtctcctgggtctaaacaatcctcttgcctcagcctcctgagtagctcagctaacaaatccctgccaccatgcctgactaatttttgtatttttagtagagatggggtttcaccatgttggccagcctggtctcgaactcctgaactcaggtgatctgccctcctcggcctaccaatgtgctgggattgcaggcttgagccatcgtgcctggccccagtaaggatttattagtggctattaggtaactcacagaaacaactggaggattaggcaatgaccaaactacatagaaaaactagcatgattacataacttactctgagtaaaaaacaatagatcaccattcttacctctcaatccagggtaagcccagtcttttaaaagcctttttctaaactacagcctagacaagaatgtggtttaatagagatagttgcatatttcttactaatttt

SEQ ID NO: 715187 - DNA, 2695 bp, Homo sapiens
cttctgagaagtatgcagactccaattccctcaaagaacactcagtgtatgtggttcacaaatggcaaacagagggtgtgagatatggcagggctctcttcaaacagcctgctcaacttcttattctctaattccaagtacccgccccctgcccaccacctttcttctccttttcttctgattttactacatgcccagacatgccacagccccaactcacattcctttccttatttgaaaatagactggctctctagtcctctgtagacgaccctttcctcctctcccctctctcccattaggtgcccaccttatctaaaaaagtttaaatgcttagccaatcgagtccactttagattgtgcagtccaaccccagctaatgagaaaaggacacagggtcaagagtcgcggtaaaaataaaagcttcaggccgggcgtggtggctcatgcctttagtaatcccagcactttgggaggccgaggcaagcggaacacctgaggtcgggagttcaagaccagcctgaccaacatgaagaaacattgtctccactaaaaacacaaaattagtcatgcatgatggtgcattcctgtaattccagctactcatgaggctaaggcaggagaatcgcttggacgcaggaggcggaggttgcggtgaactgagatcgcgtcattgcactccagcctgtgcaacaagagcgaaactccctcaaataaataaataaatataaaaagaaaataaaagcttgtactctcctttgttcagggtgctttcgtgccagccagcctgatgagaaacacccttctgcgcaaaagtaaatttgctttgctgagaaatcctttatttaagtgctgtttttctttatgactccgaactttttttctaacagaggggctctaactatttatcatcatagccttagtcagttatccaggcctatgatttaaaaatccagtagtaaatgtcctatggatgccatcaacagtctcttaaaaggttttataattagacaatttttaatgccattcccattgcctctgacagacaactgtcatgttttgcctttgctacctaagaatcttaccaacttcgttgaactcaggaaacctgttcagtggcctaatcttctacctgcgtcctcaggctacacataacaaccagtaaaagtatgttttgtcatattgctacttgcctctccaataggatcctcgaagtggtattccatgaaaacactcaggggacatggtaggctatggttgaataaaatataacgatacaggatacagttcctctaacatttttaacttctttaattaattcacttatacaaattcatttttagcatccaagttccaattttaccagaggccacagtgaagctcaagttctagtcaaccaaacaaattaataccagaccacttaagaattcaaggtttattttactgagtactttatccaccaatatgtcctgatgtataataatactctcagaatacatacaaaaatctattcttcatatatattgtccatatggactataaagtacttggggttatttgatatgtgtttgagcattttgagaggtatcaaataaatagcatgtctcttttcttgaattctgaaactcttgtgaattaaaataatgaataagttagatggagcaagatgttttctttaaaattgtggaagccaattaagattctaactattaactcccatcattagtcagaaacacaatcagtttccccgtatcagatgccttaacttgaggaacaaagagaacttttactttgtgaaagtaatactacacccttccaaaaggaaaatttatgagaagctgatctaaacatgtaaaattcattgtttttaattwactaattagaaaatgtacactctggggacagagtttttaaattcagcaaactgtaggaatggactattttaaatttggccctgttggctgtattgaccccgaacctgtaggaaaataaatgaaaaaagatgaaaaataaatgagagaagctaaagatgctctctagttctggcatatgtgtattgaggttattttttctatgtatgttttcgaataaagcaaccatgccagcactcaggctgtgtatgagacccagtaaagattcatttatttattttatgttttttgtttgtttgtttttgagacagagtgtctgtcgcccaggctgaagtgcagtggtacaatcttggcttactgcaacttgtgtctcctgggtctaaacaatcctcttgcctcagcctcctgagtagctcagctaacaaatccctgccaccatgcctgactaatttttgtatttttagtagagatggggtttcaccatgttggccagcctggtctcgaactcctgaactcaggtgatctgccctcctcggcctaccaatgtgctgggattgcaggcttgagccatcgtgcctggccccagtaaggatttattagtggctattaggtaactcacagaaacaactggaggattaggcaatgaccaaactacatagaaaaactagcatgattacataacttactctgagtaaaaaacaatagatcaccattcttacctctcaatccagggtaagcccagtcttttaaaagcctttttctaaactacagcctagacaagaatgtggtttaatagagatagttgcatatttcttactaatttt

SEQ ID NO: 715188 - DNA, 2529 bp, Homo sapiens
ctgtcaaagaatgggccttcaggccgggtgcagtgactcacgcctgcaatcccagcactttgggaggccgaggcgggcggatcacgagttcaggagatcgagaccatcctggctaacacggtgaaaccccatctctactaaaaatacaaaaaaattagttgggcgtggtggcaggcgcctgtagtcccagctactcrggaggctgaggcaggagaatggagtgaacctgggaggcggagcttgcagtgagccgagattgcgccactgcactccagcctgggcaacagagtgagactccatctcaaaaaaattaaattaaattaaactaaattaaattaaattaaataaatacaagagtgggccttcagtgaagtttgagcaatcacctaatcaccttagatatagacgctttgggctggtccctaggttgctccctgttaaatcgaatctgctgctatatcttatttttggccacatatattgtaattctgattccattcttagactcattttttccatcacttctctggtatcacactctatgccataccacaaatactgtgccatggaatcatctgtaatggccttaatgactatctactaataagatttcactgcttccctattaacagctactgacttcatacacagctacaggagtaagtctaaactggtcaaagataaccattgtaagattattcagatggccactgtgattgctgcagttaatgcagggctaagttgttaagctcatggcatttacaaagcagtgatgaccatttcagaatgaagttcaggatattgtctaaaaatttaggcatatagacagtctccttctacataatgtggttgatgttgatgaagtctgctactaccgctgtcttttagtacatgcctgggaaatacaaccaaatgatgaaattagcaaatgagaaaaaactggagtgctgaagaaatgagccaatgcccttattaaactgaacttgaattttcagttccttgatgaaatgagtgtccctgaattcttaagcaaaaatcaggttgctttttgttttgttgttattattatattattttctgcttaaaaaatcatattaaaatatactcttattaatttcagactactcaagggcatgtaactattgtaactgacaattcagaagccaactgctattcctggtcaagcatgtccaggagaaacaacagcaactcatgttaaggctatttggaaggaagagagggaaatagaagggaggagaggggagggtatgggaggggatgggaggggatgggagaaaatgcagactttccaaggggtcatgatatacagaaattaaaatgttggatttatgcccttcaaaatgaaaaggaatctagctattatatcatagcctttttagaaattttccagggaagaaaaaattagaaacttaatttacaaccaatttgattggctttttccaaaaataattatagacattgtatacatatacagatgctccttgatttatgatgaggttacattttgataaacttattataaattaaaaataagttataatgcatgtaatacagctaacctatctaacatcatagtagggtttctactgaatgctgtggctttcacaccatggtaaagtcaaaaaattgtaagtggaacaattgtggggcctgtctgtactaatagccatatttaatcgtgtttcctcaaacaaaatgatgttcaaaattcttaacacattggagatactgagatacacataacttaaactcattcggagcctgatacagtctttcttcaaagccaggtattacagagctgtgtcagagagaccaggcttttagatacccctgaattgaaatgtctaaactcattatttattgtttgtctttaattgtgataaagtacatataatataaaatataccacataatcattctaagtgtacagttcagtagcattaaatgtatttacattgttgtacaaagatcaccgtcatccatcttcagaactcttttcttcttgcaaaactgaaactctgagtctctagatacaggacctatttttaatcacactgacctatgaataaggggtataaatatatatgtgtgtatttatgtatatatatgcacacatatatatttacatcccttgtaaatataaatatatgtgtatgtgtgtatacatgtatgtgtgtgtgtgtgtgtgtgtgtgtgtgtgtacatatatatatatagagagagagagagagagagagaaacagagagccagagagccaatactgaaataattaagtaggtgtggccaggggtggtggctcatgtctgtaatcccagcactttgagaggccgaggtgggaggatcgattgagcccaggagtttgagaacaacctggccaacatatcaaaccccccgctactaaaaatacaaaaagtagccgggtttgttggtgtgttcctataatcggagctcttcaggaggccaaggcaagagaatcgcttgaactcaggaagcagaggttgcagacc

SEQ ID NO: 715189 - DNA, 2529 bp, Homo sapiens
ctgtcaaagaatgggccttcaggccgggtgcagtgactcacgcctgcaatcccagcactttgggaggccgaggcgggcggatcacgagttcaggagatcgagaccatcctggctaacacggtgaaaccccatctctactaaaaatacaaaaaaattagttgggcgtggtggcaggcgcctgtagtcccagctactcgggaggctgaggcaggagaatggagtgaacctgggaggcggagcttgcagtgagccgagattgcgccactgcactccagcctgggcaacagagtgagactccatctcaaaaaaattaaattaaattaaactaaattaaattaaattaaataaatacaagagtgggccttcagtgaagtttgagcaatcacctaatcaccttagatatagacgctttgggctggtccctaggttgctccctgttaaatcgaatctgctgctatatcttatttttggccacatatattgtaattctgattccattcttagactcattttttccatcacttctctggtatcacactctatgccataccacaaatactgtgccatggaatcatctgtaatggccttaatgactatctactaataagatttcactgcttccctattaacagctactgacttcatacacagctacaggagtaagtctaaactggtcaaagataaccattgtaagattattcagatggccactgtgattgctgcagttaatgcagggctaagttgttaagctcatggcatttacaaagcagtgatgaccatttcagaatgaagttcaggatattgtctaaaaatttaggcatatagacagtctccttctacataatgtggttgatgttgatgaagtctgctactaccgctgtcttttartacatgcctgggaaatacaaccaaatgatgaaattagcaaatgagaaaaaactggagtgctgaagaaatgagccaatgcccttattaaactgaacttgaattttcagttccttgatgaaatgagtgtccctgaattcttaagcaaaaatcaggttgctttttgttttgttgttattattatattattttctgcttaaaaaatcatattaaaatatactcttattaatttcagactactcaagggcatgtaactattgtaactgacaattcagaagccaactgctattcctggtcaagcatgtccaggagaaacaacagcaactcatgttaaggctatttggaaggaagagagggaaatagaagggaggagaggggagggtatgggaggggatgggaggggatgggagaaaatgcagactttccaaggggtcatgatatacagaaattaaaatgttggatttatgcccttcaaaatgaaaaggaatctagctattatatcatagcctttttagaaattttccagggaagaaaaaattagaaacttaatttacaaccaatttgattggctttttccaaaaataattatagacattgtatacatatacagatgctccttgatttatgatgaggttacattttgataaacttattataaattaaaaataagttataatgcatgtaatacagctaacctatctaacatcatagtagggtttctactgaatgctgtggctttcacaccatggtaaagtcaaaaaattgtaagtggaacaattgtggggcctgtctgtactaatagccatatttaatcgtgtttcctcaaacaaaatgatgttcaaaattcttaacacattggagatactgagatacacataacttaaactcattcggagcctgatacagtctttcttcaaagccaggtattacagagctgtgtcagagagaccaggcttttagatacccctgaattgaaatgtctaaactcattatttattgtttgtctttaattgtgataaagtacatataatataaaatataccacataatcattctaagtgtacagttcagtagcattaaatgtatttacattgttgtacaaagatcaccgtcatccatcttcagaactcttttcttcttgcaaaactgaaactctgagtctctagatacaggacctatttttaatcacactgacctatgaataaggggtataaatatatatgtgtgtatttatgtatatatatgcacacatatatatttacatcccttgtaaatataaatatatgtgtatgtgtgtatacatgtatgtgtgtgtgtgtgtgtgtgtgtgtgtgtgtacatatatatatatagagagagagagagagagagagaaacagagagccagagagccaatactgaaataattaagtaggtgtggccaggggtggtggctcatgtctgtaatcccagcactttgagaggccgaggtgggaggatcgattgagcccaggagtttgagaacaacctggccaacatatcaaaccccccgctactaaaaatacaaaaagtagccgggtttgttggtgtgttcctataatcggagctcttcaggaggccaaggcaagagaatcgcttgaactcaggaagcagaggttgcagacc

SEQ ID NO: 715190 - DNA, 2529 bp, Homo sapiens
ctgtcaaagaatgggccttcaggccgggtgcagtgactcacgcctgcaatcccagcactttgggaggccgaggcgggcggatcacgagttcaggagatcgagaccatcctggctaacacggtgaaaccccatctctactaaaaatacaaaaaaattagttgggcgtggtggcaggcgcctgtagtcccagctactcgggaggctgaggcaggagaatggagtgaacctgggaggcggagcttgcagtgagccgagattgcgccactgcactccagcctgggcaacagagtgagactccatctcaaaaaaattaaattaaattaaactaaattaaattaaattaaataaatacaagagtgggccttcagtgaagtttgagcaatcacctaatcaccttagatatagacgctttgggctggtccctaggttgctccctgttaaatcgaatctgctgctatatcttatttttggccacatatattgtaattctgattccattcttagactcattttttccatcacttctctggtatcacactctatgccataccacaaatactgtgccatggaatcatctgtaatggccttaatgactatctactaataagatttcactgcttccctattaacagctactgacttcatacacagctacaggagtaagtctaaactggtcaaagataaccattgtaagattattcagatggccactgtgattgctgcagttaatgcagggctaagttgttaagctcatggcatttacaaagcagtgatgaccatttcagaatgaagttcaggatattgtctaaaaatttaggcatatagacagtctccttctacataatgtggttgatgttgatgaagtctgctactaccgctgtcttttagtacatgcctgggaaatacaaccaaatgatgaaattagcaaatgagaaaaaactggagtgctgaagaaatgagccaatgcccttattaaastgaacttgaattttcagttccttgatgaaatgagtgtccctgaattcttaagcaaaaatcaggttgctttttgttttgttgttattattatattattttctgcttaaaaaatcatattaaaatatactcttattaatttcagactactcaagggcatgtaactattgtaactgacaattcagaagccaactgctattcctggtcaagcatgtccaggagaaacaacagcaactcatgttaaggctatttggaaggaagagagggaaatagaagggaggagaggggagggtatgggaggggatgggaggggatgggagaaaatgcagactttccaaggggtcatgatatacagaaattaaaatgttggatttatgcccttcaaaatgaaaaggaatctagctattatatcatagcctttttagaaattttccagggaagaaaaaattagaaacttaatttacaaccaatttgattggctttttccaaaaataattatagacattgtatacatatacagatgctccttgatttatgatgaggttacattttgataaacttattataaattaaaaataagttataatgcatgtaatacagctaacctatctaacatcatagtagggtttctactgaatgctgtggctttcacaccatggtaaagtcaaaaaattgtaagtggaacaattgtggggcctgtctgtactaatagccatatttaatcgtgtttcctcaaacaaaatgatgttcaaaattcttaacacattggagatactgagatacacataacttaaactcattcggagcctgatacagtctttcttcaaagccaggtattacagagctgtgtcagagagaccaggcttttagatacccctgaattgaaatgtctaaactcattatttattgtttgtctttaattgtgataaagtacatataatataaaatataccacataatcattctaagtgtacagttcagtagcattaaatgtatttacattgttgtacaaagatcaccgtcatccatcttcagaactcttttcttcttgcaaaactgaaactctgagtctctagatacaggacctatttttaatcacactgacctatgaataaggggtataaatatatatgtgtgtatttatgtatatatatgcacacatatatatttacatcccttgtaaatataaatatatgtgtatgtgtgtatacatgtatgtgtgtgtgtgtgtgtgtgtgtgtgtgtgtacatatatatatatagagagagagagagagagagagaaacagagagccagagagccaatactgaaataattaagtaggtgtggccaggggtggtggctcatgtctgtaatcccagcactttgagaggccgaggtgggaggatcgattgagcccaggagtttgagaacaacctggccaacatatcaaaccccccgctactaaaaatacaaaaagtagccgggtttgttggtgtgttcctataatcggagctcttcaggaggccaaggcaagagaatcgcttgaactcaggaagcagaggttgcagacc

SEQ ID NO: 715191 - DNA, 1115 bp, Homo sapiens
aggggcgtgcctggccagtgtgaggcaaatcagaattgtgggggtttaacatccctggcagtagccctcagcaaatgatggacaggagttagaggatgaatattccagccaccggagccctgcgcacccacagctgtcttctgctcgttgacataccttgtactggctcccttctgtccctttcttaccccctctcactcgctcaccagtacttctggaatcaccttccaaatgaaccatttgcatcaaatctgtgtctcagggcctcattgttggggagctcacactaagacagaggtgacatttaccccaaggcctgaaggataagaaggagctggttagctagagtgttgcagggacagctgtggtggctggaagagcatatgtgaagaccccatttgaatctaccatttcccagaaactgagaaagctattaaaacctcccccaaaaagttccaggcccacatagttttgtgggagaattgyttctaacttcaaagagcaaaaaatgcagatgttatttaagcttttccagaacactaaatgatttaatttatttttataaatccaatattaacactgataccaaaattctaccaacataggatacaaattaaaggtagagacctatctcatatacattgccaaaatccaaaataaaatattggcaaattgaattcggtagttctttaaatggcctcacggagttcaccttaagaaggtaaaaagagctcactagatgacatctattactataatatgtcatattaaataatcaaagggagaaaactattatctcaacagattaaaacaaagttatttgacaaaatccaacatcctttccttgattaaagaaagtccttagtagaaccagaatagacacatatttccttaacatgaagaaatgtatgtgtatcaatatacacatataaacatattcacgtatcttttttgtctctttttgttttttttttttcctttttgtgcagtacaagatctcgctgtgtttcctgggtagatcttgaacttctgggcttaagcgatcttcatacctctgcctccctaagtgctgggattacaagcgtgaaccattgcggctggcaaacatactcata

SEQ ID NO: 715192 - DNA, 1444 bp, Homo sapiens
ccttttaaaagcttacacgttctgtttccctttcagtaagctatactaaccaagaaacccaggaaaacacagacgtttgctggcatgaaagataatttataattccagagtaaaaaatgctatttatctactgtcatcttcaggctacatgcctcatctgcattcatatttyaatgttgattgataatatttcttgcttctttcattgtagtttcctccccaagatttattttctcagaaaggtcacttccacactactgtatttctgagactacatctttctaccttgccaggatattttttccttattactttaccacattatgtattattaattaaaaaaactgatttgaagtcatttatagcatagtcaagtgtttgtctaaggatatttccatgcaatgggaattttttgagtttggtctacagagcagaaacatcagtatcacctagaagaaatgcacaatctcaggattcatcccagatctgcagaataagaatcttcattttcacaagatcccacagtgatttatgtacactttaaagttagagaagtagaaggttttacaaggtcaatgactgtagtgaggagcccccatctagccccactactcctaggattctgagtctgccatgccttaagagattgttctctacagattcggtggtggatctgccagagatatttctcctgtgttttctctagtgggaagagtaccagggtatcatttagcattctgtcactctgtccagggcaagacccatagacagtaacattctgaagagaactaactaactcttctctaccattatatctctactgctagaaagcagtgactggcatataatagctgttcgcaaataaaatgcaattggaatcctagaagcaccaaaatcattggtgaaatatttaaacatttcaacaacttgaaagaaatgtatggtcaacatgaaattacctaccctcgtagtttcattgctactgatcaagtcaaaagtattgttttgtaagatatatagtctactccaaatctaagtcttgacaaaagcatagtacactttggttaggctactgactccaagctacttactgacatcatagaacatgtattctaaacttttgaggacttgtttagacctaattatatgataagcaaatggtggaaacccaataaatgctactgacaggctgacaagatttactcaccactggcttgagtctttgtgactcagttcagcctcaaaggaaaagaattcacggccttccccatccactctgtagctgggcagcctttcaccaatgcagagaactaattgcttctttgtctttggcttgcatatcgcttattactggcatgacgttccagtacccaagaagcacaaatagtgatccctgaagctgctttaaccttttcaaactctaacaacttgattgtatgcttca

SEQ ID NO: 715193 - DNA, 1444 bp, Homo sapiens
ccttttaaaagcttacacgttctgtttccctttcagtaagctatactaaccaagaaacccaggaaaacacagacgtttgctggcatgaaagataatttataattccagagtaaaaaatgctatttatctactgtcatcttcaggctacatgcctcatctgcattcatattttaatgttgattgataatatttcttgcttctttcattgtagtttcctccccaagatttattttctcagaaaggtcacttccacactactgtatttctgagactacatctttctaccttgccaggataktttttccttattactttaccacattatgtattattaattaaaaaaactgatttgaagtcatttatagcatagtcaagtgtttgtctaaggatatttccatgcaatgggaattttttgagtttggtctacagagcagaaacatcagtatcacctagaagaaatgcacaatctcaggattcatcccagatctgcagaataagaatcttcattttcacaagatcccacagtgatttatgtacactttaaagttagagaagtagaaggttttacaaggtcaatgactgtagtgaggagcccccatctagccccactactcctaggattctgagtctgccatgccttaagagattgttctctacagattcggtggtggatctgccagagatatttctcctgtgttttctctagtgggaagagtaccagggtatcatttagcattctgtcactctgtccagggcaagacccatagacagtaacattctgaagagaactaactaactcttctctaccattatatctctactgctagaaagcagtgactggcatataatagctgttcgcaaataaaatgcaattggaatcctagaagcaccaaaatcattggtgaaatatttaaacatttcaacaacttgaaagaaatgtatggtcaacatgaaattacctaccctcgtagtttcattgctactgatcaagtcaaaagtattgttttgtaagatatatagtctactccaaatctaagtcttgacaaaagcatagtacactttggttaggctactgactccaagctacttactgacatcatagaacatgtattctaaacttttgaggacttgtttagacctaattatatgataagcaaatggtggaaacccaataaatgctactgacaggctgacaagatttactcaccactggcttgagtctttgtgactcagttcagcctcaaaggaaaagaattcacggccttccccatccactctgtagctgggcagcctttcaccaatgcagagaactaattgcttctttgtctttggcttgcatatcgcttattactggcatgacgttccagtacccaagaagcacaaatagtgatccctgaagctgctttaaccttttcaaactctaacaacttgattgtatgcttca

SEQ ID NO: 715194 - DNA, 780 bp, Homo sapiens
atgatataataggcagtccatgtagaattagtcactaacgcataacagaatgctttacacagtactaaggtatcaacaaaattagagattttggggtttatttcaggaatataagaaatcaactacaaaaactcatcctgtttctatcccattcttaacattttccttcctaaattcttgtacttttggatttaaaatgatcggctctggctacttccatgaattacaggaaataattagctgctaaactttattttacatcagaaagtttggaagtggcatgtttgttaacaagtgtcttttatgtttcttagaactggaagacctgcctcatgtttcatgaagcttccatgatactacgtttagttgtagtcacactgtgtgacagaacatattgccttcatattcctaaactcaaataagaatttgcctttaaatttgtgacttatgaacacattaggatagaaatctctagtctgaggtctgtgaacctattgaaatggtgtaaaatttgtgtgaatgtgccttatttttttcttggaaaggggcacatagcttttatcagctcttcaatgaacttcttgtctccccagttttgtggcacttttcttttcctgcttcagttttgtcaagaattatgacttcacagcatcatttagataatctraatatgtaatttcctcaaaagagcaatccattgaaaggaacataggaatcaacagtcaattttaggaaattaccaatgaaattaaaacgggagagttccctgaccccgttgtg

SEQ ID NO: 715195 - DNA, 1863 bp, Homo sapiens
aaatggatgaaacctctctttgattttaaaaggcttactgttcttgtaagtttgtttcttgaagataatattgcttagttttaactccactaaaagctgaaccgttattgtacaagatgtataggccttggcatatgtttatatcttttttttttttcttcttttgtatttttgagacagctctcactatgttgcccaggctggtctcgaactcctgggctcaagccatcctcccacctcagcctcccaggtagctgggactacaggcatgagccacaggcctggtttatatctttaaggtaaggttagatctaaattgagcctttacttgaagtcagactgatctgcatcagcaccatatgttatgtttacttttttttttctttcaatgaaaatgggcctgaggagattggtttgtatacggtacataaactggcatttaagatgactacctcttcaaacaaggctacggtttttttggatttttaggtttttgttttgttttgttttgagatggagtctctctctgtcatccaggcaggagggcagtggtgtgacctcggcacactgcaacctctgccttctgggttcaagcgattcttctgcctcagcctcctgaatagctgggattacaggcgcctgccaccactaccggctcatttttgtatttttagtagagatggggttttgccatgttggccaggctggtcttgaactcctgacctcaagtgttcctccccgctcggctacccaaagtgctggggttacaggcgtgagccactgcactcggccaaggctaaggttttaatctagggttatgaaactcaattttttctgcagtgggcatatgcaatttccataggataaacatttccctcaaccagctaggaggtaaaaacacttctgagaaatttaaggacagtaacataatgtctttaaaaccagtgtctcaagaagtatactatattagtgaaacaataaaataacagtgatcacagatacgttaaggcaagcagtggattaagcaggataacctaactccaagtaatatacaygaaattatttttttaagcttccatacctctttaaatttattcttgtgatttcttactttcccctccctcaccaaaggaagtgctcaccttttcagatggaatgaaagaggagagtgctgatgtgagtgactcagcctgtttaactctgcctctgtggtggtttgttggttacctactagaggaggtggaactcaaacaatgtaaaagcaatcaggttggagaagtgctgagtttttagtgtcatgggaactcggtgtatgtctttgtcaccattagcagtgtttctgtgcagttcttccacaatggctcagctcatcctgagcaaggacagcatttctgttttccttttccattcaatattctcatcctatcatcttttgatttgctagaatgactaaatgctagagcagaaagttgggtttactcatcctcctgaagaagatagttaggcttacttggtatatctaaggaagtaaatttggaagtcaaggcctccccagggacttctaagaacactccacttttacgccctaggaagttagagtgagcaactgttagctgcatcgtgacttctgttctcatttgtcttaatacatgacaaaaaaattctagaaggtcagccttttaatatctaaggaggtggttggaaaatggcaatggtcagagctcaaatggagttgtgattgggcataagtgccttggatgagtggaatgcttcattgcctgagctgcacaaatgggaggtagaaagggatttgcaatgaagttgatgcattgttcgtattccttatttccacagccaactttt

SEQ ID NO: 715196 - DNA, 2611 bp, Homo sapiens
cagaaggaacggttggagaggaggtagagaaagcagatgttgcactgcaaaatggtgtgaagtagctgtaagacagagctattcaaatgatgaattagtaaaatccatgatggctgaagagaagagatggaaactaatggagaatataggagtttccagaggaagacgttctcttaagatcgaatgaagcagattttaaaagctcagctacagtagatgactcttaagaatctaaaggaaaagatgaagggttatgtcttagcaaatagggagttgaagttttggggagcaacaaagaatgtccagacgaagggaaggcaaagttcaacattataactaataaaagttggattggatgacttggggacttagaataacaagcaaagcaagtctcttaattcttccctttggaattatatagactgaactgacccatctcaggcatagctgaacaattccagtcttctctctcagtcacctttggttgctccaatgattttgccaaaggtagatcagaatgtgtgttttggtgagcagatttgctcacataagtgaaacaatgaaatgggggcaagcaagaggcaggctgcaacatacctacttgcttatttctttgatatcacctataggatgagtcattcttctttttggtgggtggggagcaaggctaagaggccataatttttctccttcgaaattctttccctttatggaacttagaatagggtgattaccaattatagcttaatatctaagacggacctaactttgttcccagaatgcacctgcattgggtaatctgtgtaaaacacaacacatcatataattctttatatgaaatttttataatgtgttttgaatttttttggtggtataatctgtctttgatagcataggaaaggataattcatataaaagctgaagaatgatggtttaatgtgttgaacagaatataccatgagcaaaagcttgttgatttgggtaagtctctaccttgtttctttaggagaatgtcatttatgactcctcctgcatttgtataccttcgtaattctcagtaacatagaaatttgatttataggtatttttataatgtatatattttacataaaatattttgatgcatctcacttattttttaattgcataaattatattgaccacttacatctattattaatgacatacctccccaacttcccaaatccttatcattaacttttctttttttttatttttagacagtctctctctgtcgcccaggctggagtgcagtggtgcaatctcggctcactgcaacttctgcatctgggttcaagcaattctcctgcctcagcctcccaagtagctgggactacaggcatgtgctaccatgcctaactaattttctgtatttttagtagagacgggcttttgccacgttagccagagtggtcttgatctcctgacctcatgatccacctgccttggcctcccaaagtgctgggattacaggcgtgagccaccgtgcccagcctatcattaacatttttatttatctcagaatcatagtatcaggatatcttgaaggatttggccaaatatatttcagcaacatattcaacaacattatgttaaacatgaaaaacatgaaaatcacataggtatgtatatattgagagactaaagggagcagaaaagcaaggtactgataatacagaagggctgttgttcctagaatggaaatagctgagattgcaaaggggcaattagaaagatgtcatggtgttaacataactttatatacgtatacacatgctgtgttcatttatgagcggcagtaaacctatagtgatgccgtctataagaaagaaacagagaaatcgagtaatatgatttagaaaataacaaagaatctgttataaagtaataattatcacatgaaatctgactttcatattttctcaagcactttgaaatgtacaaggttctgttccgagtataaagcttgctgaagaccatttttttcaaatttatagacaaaatgtaaaaacaatttgataagttctcatttcagaaagtttatgtcagtgacatgaaaacatatcagtaaatgcattgttaacaacttaatcgagtaatttgcctgtcatcatgactcctgggtaatgtcaagctgtttacagctaatgtaatttttggtagaaaaaaatctatccattggacatttttcatttcaccttatgggaaatattttattatagtagacaagtttccaaaaagagattattatgaaagtagttattctagcagtaacttctcagataaatgatctgtataaatatttttctcaatctctgaatagaatcccaatcaggagtattggtattacatgtaatccaacttctagctctatcgttatgtatttgtgtcatgtcagacattattttttactggttggccctcaattttctcacctyttgtccttagctttgaaccaatcaagttatggtaattgtgtttattgctcgtcagtaaaggcaactataataagatattttgcataaggttagaatgtattacagttgtttaataaaattaactgattaaaatgcagggaatatttttcaaa

SEQ ID NO: 715197 - DNA, 1944 bp, Homo sapiens
tattttaaataaggctaacttatttagaccatagtcatacccatatgaaattaatgtgatttaattaattactagtatgcacagaaaaatatgaggtatgaaagctgattttaaaaaaatcattgttgcccctgagggataaaattttaatggagaagaaagacatataagcattacattagtacaaatcaaggttgatagacacttaaacaagtgccaatagagcacctgataatatcgagaggagaggtcatttcatcttaaaattcatgataatataaagcattcctttttaaatgaaattgaagaaggccatctctttagagagtagaagggtttctatccctyatcagtactgagaacaatacagttttgaaaataaagaaatataaatttaacatctaaaagaatctcaagtgctctcttcggcagtacatacactaaaagaatcttaaacattcctaaggcaaatgtttcagttaaagggggttaaccaatacacttaaaatgcaaacattactttgtgaaacatgttgaaattaaaaataataaagccaaactatttggaatgtcatatatttataaaatatatattttcgtgctacaaggccaaatatatttttttctttccagtcctaaaatatgccctgtatcgtcagtgtagtttgtaggtctgttcatcaaaagagtgggaagtatatcatgccagaatgcatttgctgttcccctatcaagtgatcaccattgttattggctttagaattattagcttctgtacctggatctgaccttaattttaaccacaaatgtgggaatggttttgacaaggcatacagttttggcaagtcacctcacttgggtactaattacttctgggtacccagttactcctgggtcctaattttatctttaaatgcttgttatgttacttattactttcatatgagaattttgataatatgttgtattaaaaaattattagttttatagtgatcaatcaatgaggaaattctctgaaagtgatgtttctttacaagaaaagcacccaggctggaaacaatataaacattgtaaaaatatgtgaatcaacactgtcaattcatattatttttcttagtatagttttagtttactgaattcatatgcttgctaagagctagaagctttatatatattcccactttatatgacagtataagaagatcaaactattatatcccacaggggaaatattttaaatctttcacaattgctggttttccccttaacacaatttcttgattataacatttaagctattatactgctatctatctatctatctactaaattttatctatctatttatctatccatttctatagctagactataatctcttcaagactggtatctgacttcagtttctactactagttcctaacgcagcggtacagttcctggcatatgtacatactcctatagtgtgtgctaaagaaaggaaagaaattaacaagtctttttctcccatgttgtataagcccagtactagttgctctcagacactagtgaataatttattactgttcatagtttaaagaatgctgataattgagtgtattggtttgttattgctgtgtaacaaattaccacaaacttagcaatttaaaacagcacatatttattaattcacagttttgtatgttagaagtctggcactgtgtggttctctcctcagggtatcacaaagaagaaatcaagtattacctaggttgagtttacctatacaatccctatgtgtaagctaggaatatttggaaacagtggaggttcatgtgttcttcgctgaccgtttatggttttgaaggcctaagaggtttcaataaactatgtcgatatgcctagcagctggcgcaaaatttttggtgaagtatttacttaatttggggaggtatgtgtgatgca

SEQ ID NO: 715198 - DNA, 1944 bp, Homo sapiens
tattttaaataaggctaacttatttagaccatagtcatacccatatgaaattaatgtgatttaattaattactagtatgcacagaaaaatatgaggtatgaaagctgattttaaaaaaatcattgttgcccctgagggataaaattttaatggagaagaaagacatataagcattacattagtacaaatcaaggttgatagacacttaaacaagtgccaatagagcacctgataatatcgagaggagaggtcatttcatcttaaaattcatgataatataaagcattcctttttaaatgaaattgaagaaggccatctctttagagagtagaagggtttctatcccttatcagtactgagaacaatacagttttgaaaataaagaaatataaatttaacatctaaaagaatctcaagtgctctcttcggcagtacatacactaaaagaatcttaaacattcctaaggcaaatgtttcagttaaagggggttaaccaatacacttaaaatgcaaacattactttgtgaaacatgttgaaattaaaaataataaagccaaactatttggaatgtcatatatttataaaatatatattttcstgctacaaggccaaatatatttttttctttccagtcctaaaatatgccctgtatcgtcagtgtagtttgtaggtctgttcatcaaaagagtgggaagtatatcatgccagaatgcatttgctgttcccctatcaagtgatcaccattgttattggctttagaattattagcttctgtacctggatctgaccttaattttaaccacaaatgtgggaatggttttgacaaggcatacagttttggcaagtcacctcacttgggtactaattacttctgggtacccagttactcctgggtcctaattttatctttaaatgcttgttatgttacttattactttcatatgagaattttgataatatgttgtattaaaaaattattagttttatagtgatcaatcaatgaggaaattctctgaaagtgatgtttctttacaagaaaagcacccaggctggaaacaatataaacattgtaaaaatatgtgaatcaacactgtcaattcatattatttttcttagtatagttttagtttactgaattcatatgcttgctaagagctagaagctttatatatattcccactttatatgacagtataagaagatcaaactattatatcccacaggggaaatattttaaatctttcacaattgctggttttccccttaacacaatttcttgattataacatttaagctattatactgctatctatctatctatctactaaattttatctatctatttatctatccatttctatagctagactataatctcttcaagactggtatctgacttcagtttctactactagttcctaacgcagcggtacagttcctggcatatgtacatactcctatagtgtgtgctaaagaaaggaaagaaattaacaagtctttttctcccatgttgtataagcccagtactagttgctctcagacactagtgaataatttattactgttcatagtttaaagaatgctgataattgagtgtattggtttgttattgctgtgtaacaaattaccacaaacttagcaatttaaaacagcacatatttattaattcacagttttgtatgttagaagtctggcactgtgtggttctctcctcagggtatcacaaagaagaaatcaagtattacctaggttgagtttacctatacaatccctatgtgtaagctaggaatatttggaaacagtggaggttcatgtgttcttcgctgaccgtttatggttttgaaggcctaagaggtttcaataaactatgtcgatatgcctagcagctggcgcaaaatttttggtgaagtatttacttaatttggggaggtatgtgtgatgca

SEQ ID NO: 715199 - DNA, 1944 bp, Homo sapiens
tattttaaataaggctaacttatttagaccatagtcatacccatatgaaattaatgtgatttaattaattactagtatgcacagaaaaatatgaggtatgaaagctgattttaaaaaaatcattgttgcccctgagggataaaattttaatggagaagaaagacatataagcattacattagtacaaatcaaggttgatagacacttaaacaagtgccaatagagcacctgataatatcgagaggagaggtcatttcatcttaaaattcatgataatataaagcattcctttttaaatgaaattgaagaaggccatctctttagagagtagaagggtttctatcccttatcagtactgagaacaatacagttttgaaaataaagaaatataaatttaacatctaaaagaatctcaagtgctctcttcggcagtacatacactaaaagaatcttaaacattcctaaggcaaatgtttcagttaaagggggttaaccaatacacttaaaatgcaaacattactttgtgaaacatgttgaaattaaaaataataaagccaaactatttggaatgtcatatatttataaaatatatattttcgtgctacaaggccaaatatatttttttctttccagtcctaaaatatgccctgtatcrtcagtgtagtttgtaggtctgttcatcaaaagagtgggaagtatatcatgccagaatgcatttgctgttcccctatcaagtgatcaccattgttattggctttagaattattagcttctgtacctggatctgaccttaattttaaccacaaatgtgggaatggttttgacaaggcatacagttttggcaagtcacctcacttgggtactaattacttctgggtacccagttactcctgggtcctaattttatctttaaatgcttgttatgttacttattactttcatatgagaattttgataatatgttgtattaaaaaattattagttttatagtgatcaatcaatgaggaaattctctgaaagtgatgtttctttacaagaaaagcacccaggctggaaacaatataaacattgtaaaaatatgtgaatcaacactgtcaattcatattatttttcttagtatagttttagtttactgaattcatatgcttgctaagagctagaagctttatatatattcccactttatatgacagtataagaagatcaaactattatatcccacaggggaaatattttaaatctttcacaattgctggttttccccttaacacaatttcttgattataacatttaagctattatactgctatctatctatctatctactaaattttatctatctatttatctatccatttctatagctagactataatctcttcaagactggtatctgacttcagtttctactactagttcctaacgcagcggtacagttcctggcatatgtacatactcctatagtgtgtgctaaagaaaggaaagaaattaacaagtctttttctcccatgttgtataagcccagtactagttgctctcagacactagtgaataatttattactgttcatagtttaaagaatgctgataattgagtgtattggtttgttattgctgtgtaacaaattaccacaaacttagcaatttaaaacagcacatatttattaattcacagttttgtatgttagaagtctggcactgtgtggttctctcctcagggtatcacaaagaagaaatcaagtattacctaggttgagtttacctatacaatccctatgtgtaagctaggaatatttggaaacagtggaggttcatgtgttcttcgctgaccgtttatggttttgaaggcctaagaggtttcaataaactatgtcgatatgcctagcagctggcgcaaaatttttggtgaagtatttacttaatttggggaggtatgtgtgatgca

SEQ ID NO: 715200 - DNA, 1257 bp, Homo sapiens
aataaaataaataattattacttgtaattatttataattaattataattataattaatttatagtgttttataattattttaattaacttataatgttatcaatcaatattaattaaaattattattcataattattataatataatataataattattctttattgtgagacttaaatgaacaaatgcatgtaaggcacttattaccataatgcctggcactaagaaatattcaataaatgttaactattattactattgttgttattagtccagaaacacaatcaattttcaaataggtaaaaattctgaaatcgtgtgtgtgtgtgtgtgtgtgtgtgtgtgttgcaaagagacctgctagagtcagtccattgagaagaataaacccattttctcccttttaagatgttttttgtcctacacatgttaccacttcatattgttcatattacctagaaagttatttagcttttgcttttctcttagttccccttaatttagaaatctgtagggcctccagacaaatctacatgctcggtctgaatggccacccattctgttcaccggtgtctaggcaggaatgggtatcttasaatcaagctactctcaatataacctactcatctctaggaatactaacacccataaccaactatcccaaacaaacagccaaacccctctcaaattattcttagggttggagtcaaacaacttatatttttgcctcccctggaacaagtgctttagccattatcttcatcgtcctgaacctaaagatacaaaaataggaggctcagagagcttttctgatttgacatcactcacaaagggaaaggagtgcaggaggagaagatcccccaaagcagtgggtgggggtaggaaggagactatgtattaataagaaccaacactgaattattgaagactacacacatcgattacaactatgacaagcccttcagtattttgagcttcagttttcacctctgtaacgaggtgataagacaaccagcttcataacattcttgtaaaggtaacaagaatgtagccagagcgttcccattgtctggctcctgggaaggaatccacttatcatctcatttttttggtatctttttattttatccatttttttcttgctctccctcccctagtcccccaccccgacaggcctcggtgtgtgatgttcccctcgctgtccacctgttctcattgttcaactcccacttatgagtgacaacatgcagtgtttgg

SEQ ID NO: 715201 - DNA, 625 bp, Homo sapiens
gcctcaacagattggatgacaccagccctccttggggaaggtaatctgctttactggrtccaccaagtcagatgctaatctcttctagaaacattctcaaaagcccagaaataatttttatctcagcaccttgtgatccagtcaagttgacacataaaattaaccatcacagctggtaagataggccttgcttaattcaaaactaaagtgttggacactgcaatcatcatttaaaattatgaaaagattcatcacaggttaatgcaaataatcatcccctcctctttataccataagagcaaatgtcagtatattatatgtctggggaagagtatatccttatattaataacctaactttatacctctgaagatgtatataaagccaagccaaaaagcctcctagcaacctgtgtgaaatcacccacacatcccaaactgtcaagcctaggttatctccagggttgctgtggggttctctgattcagtccagaccagcccgaggaggaagttctgaagacttctagagaacatgcaagaaattggagccaatatttagacccattccaagcaggcctgttaggattgggccatccccagagctgagcctgacctccagctctgac

SEQ ID NO: 715202 - DNA, 757 bp, Homo sapiens
caaatcaaggcttcttgagatgaataagtattagagtgaagtccatatgggatggatgtgagcactgacatgattcaacacttataaatgatctggaagaacaagcaagcaataaatctctgatgcagtcaaccctaagcacttctgggtagtttaatgccaagtcagcatgaaccaacttagagcaggagcggagaggagaatgacaggtgtgatgtaagtgtatttggaagagaacagtccacatctcacttgtaaatgaactaccagttacaaccccaaagcaacacctggaattatggtgtggtccctattagtctattaaggtcagaaaaattagagtatcatcatgacagtcactaaaagcaaaagaggaagcaaaccaccattcttcacccctcttaaccaaaatggaggcacacccactcctgaaatgccatgtggctttatggccatgcacaaagaaacagaaagcagaacctgttggcactttcgcacatctcctgtttgtccgccagactagctacagtattttgtactcaatgatgtgacttaagtatcagtaatgattactagtttgctcatgcatttaatatttattgcaaaccagctaaatgcaaggcaccatcctaatgcctgggagcaatataaagaagggtgaaatatgcacactcaccctgagtggcttactctggtagwtgtgatgagacttggacattataacacaggacacaaagtaataaaaagccacaataga

SEQ ID NO: 715203 - DNA, 641 bp, Homo sapiens
tttcagcattatcccaagagaaataaaataaacttgcattatatatttatcatttatcatcatatatcatgctatgtatttgttgatttgatctttgccagtttattagagcttggtgtcacatgctgttacataaattgttgcaattaaaactgggaaacatgttcctctctgcacttggctcccttcttcgtggagatgtgattagcaggttagaggatgatagaaatcaggccaggcttgggaattagaaaccggtgtgttctagttatctctgttttgtttcaggaacaaaacccacagtccctactctaagacttctataaaatgtatgcatgagtcaaagaagaagccactaaggagtaagtggttggtgcagcacaagctcattagtactactagaaaaacatttcaaacgtaatgcctgacttgtggataaatagtataaataaggtatcactccttatctgagtctctgggttacaatctacataaggacacaaaatattccgaacaawtgggttcagcataaaaaataaacaaataaataaataaataaaggacccaaaatatcttattagcctttctccatagcatacagaacagtgccagaacacataagcacacagtgatgattaaga

SEQ ID NO: 715204 - DNA, 575 bp, Homo sapiens
agttctctgaggcctccccagaagcagatgctgccatgctttctgtacagcctgcagaaccgtaagccaattaaacctcttttcttatacattacccagtgtcagatatttctttatagcagtgtgagaatggattaatacactacgtcatgcaaaatgtaaaaacaggcaactcactgagagtaaacctaatcaacttgttcatttagatataaactgtagagacgacackgccatctagttgttgaatactgagtatactgttgaaacattcttgacaatgttctatttctcttttgtagacttacaaggaacacacagaagcccctaaccaattacatctccttcctaggagtgtgaatgtgactgccatagtgcagcccatgctgcccctggtaattatatgcctcaacccaagcaggtgattatgtatcctgtgactacctcatgctcaaggctcttccatattacacaaacacacacactcatactcaaaagcaaaacaaaaataaaacaatctgcttgatccctgccctatagagattagtctagtcagggaaacatacaactaagca

SEQ ID NO: 715205 - DNA, 575 bp, Homo sapiens
agttctctgaggcctccccagaagcagatgctgccatgctttctgtacagcctgcagaaccgtaagccaattaaacctcttttcttatacattacccagtgtcagatatttctttatagcagtgtgagaatggattaatacactacgtcatgcaaaatgtaaaaacaggcaactcactgagagtaaacctaatcaacttgttcatttagatataaactgtagagacgacactgccatctagttgttgaatactgagtatactgttgaaacattcttgacaatgttctatttctcttttgtagacttacaaggaacacacagaagcccctaaccaattacatctccttcctaggagtgtgaatgtgacwgccatagtgcagcccatgctgcccctggtaattatatgcctcaacccaagcaggtgattatgtatcctgtgactacctcatgctcaaggctcttccatattacacaaacacacacactcatactcaaaagcaaaacaaaaataaaacaatctgcttgatccctgccctatagagattagtctagtcagggaaacatacaactaagca

SEQ ID NO: 715206 - DNA, 2638 bp, Homo sapiens
ccaagacagtacataaaagatactcttctgatttattaaaacagcattattggctgggtgcggtggctcacacctgtaattccagcaccttgggaggccgaggtgggcggatcacctcaggtcgggagttagagaccagcctgatcaacatggagaaacctcgtctctactaaaaatacaaaattagccggacgtggtgacgcatgcctgtagccccagctacccaggaggctgaggttgcggtgagccgagatcgcgccattgcactccagcctgggcagcaagagcaaaactccgtctcaaaaacaaaacaaaacaaaaaacaccagcattattttctccagaacctcctgtacattaccaatattttaatttcaacaacgatctcagattgcatactaaaaggtaaaagtgcaattcagtaatcttttccaaaaatgttttattgctacaggttgaaatttttcaaccatcaaaattagaacaaaatttaagtttctgctcactatggtgtaacacagccatttcgtgggactttgtttttaatgtaggttggcagtagagttcagcaaagtttagatgatagcagaatggtatcatgaaactttgtttataacttaaagaagtggggcattagctagaatagaaagaccgccttctatttgaaaggtcagtctttctttgaaatctcaaagattcatttcaaaatttaaggctttaattatctgacacaagtatatacctatcttgcaacaaagtccaatattttacattacagcttttcccaaatactatacatggtaactgaaatattcttagaaatcatacaagacttccctgaacttaccacaacctacctgaatctggaccacactttttttgatctcttcataaagtcacagctttcatttcacagctctaatagcaatacaccatggagtacaaacaacactgtgaaaaacaagggcctgataaagcccacagcaaagctattcactaatattggcattacctttagccatgctattagagatcacactttatttttgtgcataataaatacgatacagaaaaatgttgaaaatatatgactcaactatctaattaaagctgagtaaactaacctagtcagattttagtttttcaacgagaaatgacaagagtagctgaatataaagaaaaacaaaaagaactttactttcctatgttaatacaggtcaagagaccctttcttctcaaaagggttggtaacaccagttcttagcaataaacataaggcacttgtttagattacaacatcactccattttttccacttgtttttctaaccctgtttttcccccacagtatcatttgaaattaataggatgaatgaggcaaatatgagacgatccagttgatactactcagagcaagatagtacagtacagtgtttcaggggtgatgtctggacataaaatgaacccagtcaaggtcctctgacaccaatgtatccactatcaagtaaacctgaaagaaaataaaagatttattcaatagttccagtaaaattgggttggaatacaatacacattaggaatttagctcctcacgggtggcatctgcatcttaagagttctgagtacttatgaatattcattctaagacaatctacatcatttgaacattgtcaagacaaataaatgaatttcatttcaatatacagtagagtttaaacaaaattcacacatacaccccctattatatggctggtacctcctccaaacacctcattagtggcagaggtaggactagtgttctttcccaacaataagaacttcagttgccactcataggagttgaaaaaaagtttttgtttttttgccatctgttaagatgttcctgagacagggccagttaataaaacataacaaagcactggagttcggtttgtacttctctttacatcactactaaactgttagactgagatgtggaatgcaggtcatgtactatgaaaagttgattgtagcacaactgttcaatcagtaaaaggtcttcggcaaattccctttagagtatactttctataaactacatgttccacaaaaaggtcaattatatatacaattgatttgttttacttaatcttatttgctcagatcttgcaaatgcaatgagaatattaagcctgaggctagttctcagtgtataggtttaacaaattaaggctcattttcccaaatcaaaatagtttttagttttccttttaaattatgaattacattcatagtacctgccaccagccttgccctcaatgaaatcttaatgcaggagcagcattctacttcattatggaatttccctgacaccagcacttagccccttytaaaaagctcccatctgcactagccttacagcatattacattgcctctggcttgcacctctgtttccacctgtgtatttcacagaagcccaacacagattagttgaaatattcacacaactgtttttcaaaacaatttattgcatcatatttggtaccttatgtttgacaacaaaaaggaaattacatctgtaactgcaagaaaaagaagctggtctgttatttgaaaaaaaaaaaaaaaaaaaaaatcttgggccctttaaaaattaca

SEQ ID NO: 715207 - DNA, 2122 bp, Homo sapiens
tactttttcagcaggataaaaaacgtaaaacactatttgaaggcaagaacatttactcctctcattctgtgtaagttagagcaatgcagcaggtgcgtgacaaaaatattatatactagatatggtccaaagtcattccatttgcttgtttagtgatgttcaaatttcattggccagttcttcagcttctgcagaactatctccattaactgtgatcttcatatcctcttcatatccaggaggcatgaaagccaaagcataagggaaaagcttatgacaatttgctctataaatttcagcagcttctttacagtctcctaggctaccatcatacaaggcttccaatacctccatacatgtctaaggaaagaaaaaaagtcatgttgtaactggtcaaaaaaaggttcttactgggaatttattagacatttcaacagcaagagatttctaaaataagaaataaatacacatatttagctatttactcctgcatatgcattctattagaatgttcttcaaggcctaatttaaccatttctccagaattgcaggatttatacaaaaggctaaacagggatgactgcagaaacaggaatgggactatggtgaggcaagcaaggtatatggagtgctacatttaaaaagccactcactctcagcaagcgtatgaccttaggcagcaatgttacctcagcctagcctggccctgggtataaacatctagatttacaatgccaataccaattactgcacatatgccttctaatatttttgaaagcttagagccagccagcaaactcaaacactgtattcaacattgtgttcaaattaaagagcaacttaaggcacatccaataactaagcagaaaagagtgtctcaaacatgaagtgattatttgcaagaaaaattagttcatgaaaatgagtaattctttcaaccaaacccctaagtaagtctgcttcttatcttttttgttgattcatgttgatttgcatttctcatgtttgctttcttaatattttcacttagaaaagctacttagtttccacatgcaaaaatccctacaaactttgccaggttacaaagcaacttaaatccaggttacaaaggacctagattagaactttaaatccaggttctaatctaaatggtaaaacaaacaagtctaatttttctttcttaaagatactgccttcatttgctattaaatgaatatatttattaataactgtctttcagcatatacatgtttatctggcaaattataacatgaggtagctatccctttgtttctagtttaaactacagtattttacaatacacccatattaatttttatttaacttaatctcatattgtattacaagttacaaaataagtatttttatttagcccctagtaaatacatctttctttattttgagatagggtcttgccctgttgtccatactggagtacagcgtcacaatcacagcycactgcagctccaacctttcaggctcaagtgttcctcatatctcagtcccccaagtagctgggaatacagtgccaccacatctgactgatttttttttttaagagatggggtctcactatgttgccctggcttgtctcgaactcatgagctgcagtgatctgcccactttggcctgccaaagtgctgggaatataggccatgaaccaaaacgcctagccaaaatacattttaaacatgttagaatctccactgagaccactgcttgctcagaaatgcagagatatgaaatgaaatccaaaaatgacgatggaatgtatatgattttattaaaacatatttcttaaaaagttattccaagctacagatgtgaaactagttactgaatgccaagcagcctaaataaattttaagataagttgtttctgacccagattcataatgatttaaaaaacagtgtgtataaatacccaattatttctcttggtgaaaaaagtagttaagtattcttacagagagattatgaaaaactctttacctggaggtttctgttagtgagagattcatcaagtgttgttgccaactctatagctcgcttctgactagaaggatctaagtaatataccattttggcagctaaatgagag

SEQ ID NO: 715208 - DNA, 651 bp, Homo sapiens
ttggtgaagcacttaagaaatgtcatgagattgagagagtaagtaccttctacataaaagttttcttgttttattctgtcgatggttttggacaaatttcatagtttttttctcttctatttctttataattcatagtaggtgctttttaaaatcagtattcacttttttcagttttcatactggaaatatagactrcattttcagccagggtctctattgtcttgtggtaagaactcttttttaaaaaactttatggaaaatttgtatcttggctatgtttttattgatttttgaaccttccaaattgctgctgccgctttagtagtacatacacagctgattaaagtactcctaggaccctgttcattgtagaatttattgatgatgccatatacccttggtaagatataaatgttggaagacttttcacaatatttcttctgtagcttatctaatttcatgctgtttgataaaattgttttcttaattctcttcacgtctgactcatttccatgactagtggttggtttttcttttttgtgttttacacagataaacatagtttatataactaatttcacatttgcaatattgtcaagtatagaataccaaagcttagttgaaatgcatcaagttcctgattgcttga

SEQ ID NO: 715209 - DNA, 1729 bp, Homo sapiens
gattttttggaacctgattcacacaatagactagaacrcttcttaaatcctattgagtactgacaatcttaacagtctattagttttatccctgtgtgattagtgggcagcaatatcttagttttagctaaccaagcctaagcttcctgctcttctcatgtaaaatcatgtatattcaggaagatgagttagctttattaatatacaagtaagaaaatgagctgtggaaagaagtatatgcaagaaaggttaagtgacaaaaaactaaaaaaaattagtgattttggaaatctgcctttacttcacctgccatctccctagtgactttaagaatgctacataaagccaggcgcggtggctcacgcctgtaatcccagaactacgggaggctgaggtggttggatcacaaggtcaggagatcgagaccatcctggctaacacggtgaaaccccatagctactaaaaatataaaaaattagctggatgtggtggcaggtgcctgtagtcccagctactcgggaggctgaggtaggaggtggaggttgcagtaagctgagatcacgccattgcactccagcctgggcgacagagcaagactctgtctaaaaaaaaaaaaaagaatgctacataaagtttaaaaaccaagaacatttggacagattttgaaattgcgaattaatgaaaaagtaatttcacctttattgatcagctcagttgctactgtactgcagagcaatcagataaattgtaaactttcaagacactaaaattagcatattccaacaaagttatttatataacagctatttttctagtctaattttctagtatttattggaaattccccaaatttgtttcaattctctaatcttatcccagccagtatcatgttctgtttaatgtttaacacgctcatattattaaaatatagaagtcccaggtctaaccttcaatggacaagtgttgtatgtcactatttttttgcctacttgtaaaaatgactgaacaaactttttagatgaataattaagcaacacatatccctcttgctttcattgccattttaataaaaaaatagaaactcctatattacaaaatatattgcgtattgatgtcacaatggaaattttacaaacacaaactttataaaagggtgttaagccaattccagatgaagcaaagacatgaaaacaggaaagttctagaaaaagtctaaataaatgtattcatattctatgagtgaaaaagataattcaaaaggatgtccgtaaggctgggcacagtagctcacgcctgtaattccagcacttggggagggtgagatggggggactgactgagcccaggagtttgacaccagcctgggcaacatggtgggacctcgtctctacaaaaaatacaaaaattagtacggtgtggcagtgcccacctaaagccccagctactgaggagactgagacagaaggattgcttgaactcagaaggctgaacctgcagtgagctgtgatcatggcactgcactccagcctgggcggtaaaagtgagatcctgtctcaaaaaaaaataaattacaaaggactcatatatattaattttgtataattcctctaaaggaattattcaaagatctcaaaatatttcactgatatttaagtcctgtaagtttccatttcatacggtgatataagaccatgggtagaaaatatcagtgaataaaggaagacatgcca

SEQ ID NO: 715210 - DNA, 2737 bp, Homo sapiens
tgaatattaattttacaactttactatcttactgtattataaaaaatgtaaaaaagactctcactagctttacctttttagactaaacatagctcctaatttctagagctcactcagtgatacaacccttttataagatccatctgtgggtctccagaaaactgtgaaaatgcattgtgtatatatctctaggtaagagttattttgcaaccaaaacattaagagattctctaaaattaatctaatgaggaagaaaagcagaaaggctatcagcaaaaaaaacaaaacaaaacaaaacaaaacaaaacaaaacaaaaactgctgttggcagcaggaaaaggataaatggctcagagaagcgtgaaagagttaatttggtggcttgagcagggaaaggcaaaatgagcagaacttatcaagagccagctggaaaatagtgttggtggggaaggagaaaaagggaagaatttakactcataggggtcttataagggattgtagctgcaggtgcactgccactaagaaatggctggagatgtaattgagtttattactcattgtaaaatggaagttgaaagtgtgataagttgaaaatatgatgccatctagagtctagtaaataataagttattgctgtggtctgctagatgttagcaatatgagcactggcattatttttataacacagtagaattgtattgcaactgatgaaaatagtggaatagatatgtagatactgcattcaagacttactcctgtacattctctgtgttgatgcagtttattctcatgatccttcaaaaatagaaaagagcagaatttgtattgtagaagactattttacatattattttaattgacaaatcataattgtatacacttatgacataaaatgtgttttgatatatgtatacaatgtggaataaataaatcaagatatttaacatatccatcaacttgcttacttactatttttgatggtgagacatttgaaatttatgaacttagttattttaaaatatacaatacatttttattaactatggtcatcctactgtgcaatagatctcaaagcatatttttttctgcttatctggaattttgtatcttttgaccaagttcccattctctccctgacactccagcctctggtaaccattattctactctctacttctatgaattttacattttttagattccctacataaatgagatcatcaaaaattgaaatcaatatttgaagtgatatctgctcccttatgttcattgcagaattagttcccagtagccaagatatagaatcaacctgtgtctatcaacatatgaatggataaataaaactagtataaatagtatatatacacaatagaaggatatttttgatggcatcaagtagaagggaataatttagtgtgggagatgaagaggtgaaaatcaactgagaacatggctatgttccatgcattaaagggaccaggctgtgtttgctaaagggagccatatattaggttggcaattactttcagtggcaaaaaccacagttacttttgcatcaacctaatacaacccagtggctatgtctaagagttgaggtgaaaaataagcacttaaatagccttaggttttgcaaaacggattctttcttttgggtgccattccacagaagggggttcctggaaaacatctttaactcaaatcttctgttattatcaacaacaaagacttaaatgcctcctttttctggaccttagtttagcaaaggatcatttgaataaatccattttcttttgccagtatttgggattttaggcaagaggaaaagagtccagtgttttcatctttttatgctctgaatggcacagggaaggaccttgtgcagtattcacttaagattcaggtttgtgggtgaatgctcacatgggggatgacagacagtgtcctggtaacagcagtgggctgtgcattgagagatctgctcctgctgccatgtgatgtccagtgctacattatgcttatttgtatctgtgtatctctttgctcatttgtacgatgacaggaatggctcagtacaagtgatttttcacatatgtaaaattttaaatatattaaataaaatgaagaccttataacaatcacagtagatgttattgatgttttgatagcatagttattttactcgaaattctaaaaatataagtcatagcttttcttatgtaataaatataatattttaagaatctttaagaatcaactccacaaaatgaccattttttcttgcaattatgaccaggtaaaaattctgataagatccaccatgaaaaaagatataaatacaacaacaacaacaaaataaataaataaataaaaagctgctttgaggacatgacatgaaatttaatgaaaatcaatcaaaaatttgaagcagtaataataggaatgtttcccatgtaatttgtggactgtgtacaacagaatctcttggagcagtggaggaaagagtatgagtcaaaatgtaaatttttaggctccactttcgaaccattcagccagattctctgagtagtaggacccaggactctgtattttaaaaagccttggaggtgatccttatggtctcttatgtttgaatgtcaatgtcagctttgagactaatccaccaaaattcttaagaaaaaggagtgagcatttttagtttacctgttataaagcattctctgatcttgaaaaaagtagc

SEQ ID NO: 715211 - DNA, 1088 bp, Homo sapiens
gaagcttatttctttaagatatggcattaaactttctttctttttggtaaaagacaggactaaacaaactggaattcaaggttctaattttatatgagcacattggcttatatgagaatattttgcaaataaagtatcttttgatttgccaacatttatgtgatcaattcttgaaaggttttttatccttacaaactcttctactatggctctaacaaggttaaatatgagctagaattttaattatgtgaataaaataattagtatagtaataggttcactttggaaaagaaagaggaagacttcatctgagcaataatggacgtaatatatagaagaaaatcctgctaataaccacaggaaaacaggaggtgaaacactgacaataaaaagacagtgattatctggtttatgatgaaagcagttcctttctttgatcacaggagagcactgttcatctatgaaacattttgtttaaagggaataactggagcctttgtgatccagaagaggcttgatgtggcagactatataacccttattattgaatcatagctataaaagagggacacatttttcccatagaaaaacagttatatttgtaaaagattttgtaagctgtcagtgtgctagtcttgaaatcaattggcaacaatacatatatatgaatcttttcggtgcaagactctgagagtccctagcaatacgcaagatgcatttcctcgtagaaagagaagtaattacatcatgccttgtaatttaagtgtttcatttaagaactggtctcaaytaagctcaaacagataactcttaacataaatatttagtaaatataattacccaaaacaacctatgaaagatctctgtggatatgatatacgtacgtttctcagtcaggtaagattaagagaatagtgtttcaaactgtttttccttgttttccaagagtaacaggatttagcaaaagatgttaagtcttatgagaacaattagcaagatatttgattattttttcacaagagccatggacaagtaatattatctcaaggattatttacatcaattacataaggaaattttagtatttc

SEQ ID NO: 715212 - DNA, 742 bp, Homo sapiens
ggagaatcactgctctcttcaaagctcagatggaaatgcagcctctaatatctctatttggctcacaaccctcaagtagttctcttcagggtttcagcaaatcttgccctataaatgcctaatattaagccagtggcttaaggtgaccttagaaaagatttctgaagcttcatctctaaacagctacctcctctctactaacctgcttcataaatcccagccacaatgctaataatgtctaccttagacaccatcaatttctctttgggttctatttcactgygttcctaatcaaaaagccagggtaaatgtgttgcttacctccagtagttctttcttttccaggatagcagtgttgtggagtctgttgttagatgtctaaaaagagttgctgcttatgtattttttgagtgttatatttgtttatggctgaagggtaaatctaatagttataaccctgtcattattcagatgaagaatttgtcattttaagtttctcttttttatattcaccacctaccattctacagtattttttgattctttgtgggatttttctctgtctctacaataacttaacttccatgagaagtgattctgtcagtcttactcaattcagatctctagtgctcagaagagtgcttggtactcatgaataaacaacaaatatttaataaaattaaatgaaatgaatgagtaaattattgaataattatgcacagatgaaatttgcttcagaaca

SEQ ID NO: 715213 - DNA, 1145 bp, Homo sapiens
aacaaataatgaaatacctaccatgtgccagacactatgatagacacagaggtttacaaaggtaaacaaggtcaacacataagcctgtcctgtgtaaatgttgtatgtccatgtaaattaggaaaacatgaacataaacaataatttttatactcttatttatagctatttttattccacaatgaatatgaagaggcttacaacatgatagagtagaataaacaaatgcatgaccaggaagaatgcacattttgaaagaaaatcaatttcaggtagaaagagtagagctctaaaaaatccgttttggttaataagagctcaaatttggttctgagcttccaagcaagcaaaagaaaaaagaaacattattagtgactgatttatcttattaatgaagaggtaatacaaaagttcctcaggagaaagaaatgagtccttacattttgttctaaaagatatctctctttttgtaaatggccaataggtgatactacttgcatctcttaggggttttggaagatgtagaaacaaaatggttcaggcacatgaaaatgtatgtagaattatgtaatgagtatatatatgtgtatatcccacatgtggcctaaaaatgaaaaacgttataattaaagcccttttgtacctttctacaattttatttcttggtgtctctacccagaattaatcattttcctaaatttggtgtctctcatttttattcagctccattcatatgtatacattcattcaaacagatagcattgttttcatgaaatacatagcgtttccataaatgaagtgtgtggggcctctagctccttcagtttgtattgctgaataatattttattttataaatatgcacaatttgtcctcctgttgatggacatttagattatttccattttttgctattaccaagctgccaacaaactttctcataaatatcttcttgtgatacatgagaatgcttccctagccctttatctagagtgaaatcactggctagagggtatgtgcatgttcatcttggtttgatattgccacatggctctctgaattgatcataccaaytgaacaacaatgttctgctgaccaccacttccctccttctacaagtttctacttgtagaagtttctgttgta

SEQ ID NO: 715214 - DNA, 676 bp, Homo sapiens
aagcaaaatgtagtatatagatgcaatgaattattattactcagtattaaaaagaaggaaattctgacatatgctacaacacagatgaaccttgaggamatgatgctaagtaaaataagccagtgatgaaagggcaaacactatattatttcacttacatgaggtacctagagtagtcaaaatcacagatagaatgtattaatagaaccatggttcctagggtctgtgggaaaaggggaatacaaagttactatttaacaggcacagagtttcagttttgcaagatgaaaagagttctggatatggatggtggtgatggttgcacaacaatatgaatgtacttaacaccactgaaatgcatgcttaaaatggttaagatagcaaatattttgtgtattttaccacaataactctcccaccaaaaaaaggtgattatataaccaaaggagaagggagagttaaaaagagttaaaggtgtacaagtggatgtccccggcccctaaacccaaatttatcatgagcaattccttccaccctctcccttaaacttgttcctcatcctcttttccacatctcagcaacgtcagaatgttccatcttgtttttcatttcaaaactcttaaaatcattctcgaataatcctccttcctcactccataacatttactttattttt

SEQ ID NO: 715215 - DNA, 665 bp, Homo sapiens
tttttttattttcagaatgactaaaggtcatcatatgtacacagagctttatctttatgagacctggacctacaaggatatgtaatgtataatacaacataatagactaaraaattccctttatatttaactatggatatagttaagtatgaaacttccttaatatttaaatttttaatactggttctaaaatcagcactcttgtacctggtcagctcaaaatactattatttatttatttttgtttgttttaataaaataatgaagaatatcaatgaaaaatgtccaaatacatggaaataaattgagtaaaaagaataaatccagtaattagtctgggagtacaaagcagggttgatttcattacataatcatttccaaagggaactagctgtcttccttttgaatcttgattaaaggtgtgcataggaaggatattctactccatgttccttggggatttctttccatgatctggtttcccttgagtagttggtatgattaactgggctggtttcttttataattgtcctgaagcgctttgcattttgcaaaactgcttcgcaattgtttttttctcaggatgtacttaaaaatgaatccattaggtgtagcgggcaagcacagctcagggaggtgttgttagcaaagccagaataaaatca

SEQ ID NO: 715216 - DNA, 665 bp, Homo sapiens
tttttttattttcagaatgactaaaggtcatcatatgtacacagagctttatctttatgagacctggacctacaaggatatgtaatgtataatacaacataatagactaagaaattccctttatatttaactatggatatagttaagtatgaaacttccttaatatttaaatttttaatactggttctaaaatcagcactcttgtacctggtcagctcaaaatactattatttatttatttttgtttgttttaataaaataatgaagaatatcaatgaaaaatgtccaaatacatggaaataaattgagtaaaaagaataaatccagtaattagtctgggagtacaaagcagggttgatttcattacataatcatttccaaagggaactagctgtcttccttttgaatcttgattaaaggtgtgcataggaaggatattytactccatgttccttggggatttctttccatgatctggtttcccttgagtagttggtatgattaactgggctggtttcttttataattgtcctgaagcgctttgcattttgcaaaactgcttcgcaattgtttttttctcaggatgtacttaaaaatgaatccattaggtgtagcgggcaagcacagctcagggaggtgttgttagcaaagccagaataaaatca

SEQ ID NO: 715217 - DNA, 952 bp, Homo sapiens
tctttgattttgtctatgtttttctgaaaattttcctactttctacaacagaatattttaccacgtgaaaatgaaaatattactgagcctcaaaacttttcagagtttatggttctatataatttgacctgtgagaagaactgatacaattttcaggtatcatttcaagaggagaaatttataactaatgtttttaagtaagaaattgatactttagagtgaatgtttataaagaaaggaggataaaggcacaaaattataatatatgtaaaattcccctgaataagttgcattccaactaaatatcggagctgtattatattgtgagcttatgtaataattataaactttctggaggaatatatattgttaaaatgaattattactgtatgttggtgatacattttagttattcacacaaaaacaaccataggactggaactttaaagtgtatgagaatttattcccagtcctaaatggaatatatttttaatgttatcaatacttggggtgaatgaaggtgagttggtggtacccattaaatatcaaggttaggagtggtggctggaaaatcaaccctggtggaagtttaggaataccacggttcaattatgtacatttctgtctgtgagttatggagcaataagacttaaaacaagacttaggctgggcacagtggctgacgcctataatcccaacactttgggrgaccgaggtgggcggatcatctgaggtcgggagttcgagaccagcctgatcaacatggagaaaccccgtctctaccaaaaacacaaaatcagctgggcgtggtggcgcatgcctgtaatcccagctgctcagtaaggctgaggcaggagaattgcttgaacctcggatgtggaggttgcggtgagtcgagatggcgccactgcactccagcctgggcgacgagagtgaaacttggtctcaaaaa

SEQ ID NO: 715218 - DNA, 672 bp, Homo sapiens
gtacatattgtcatgttggtcttcaactttgttaaagtatatatctcaacatcttttttaagaatgtgtgggccgggcgtggaggctcacgcctgtaatcctagcactttgggaggctgaggcgggcagactgactgagctcaggagtttgaaaccagcttgggcaacaaggtgaaaccccgtctctactaaaaatacaaaaaaattagccgggcgtggcggcgtgcccccgtagtcccagctactcaggaggctgaggcaggataattgcttgaaccagggaggcggaagttgtagtgagccgagatcgcgccactgcaccccacactccagcctggggaacagagcaagactccgtctcaaaaaaaaaaaaattatatatatatatatatatatatatatatatatatatakagagagagagagagagagagagagagagagagagagagcgtgtgtatgtgggagatgagggattgtgtatgcatgtgtgcattaagtgtgcaagaaaaaaattataaactgttcatttttagaagattgaatatgtttgaaaatatatttaccattagtattacttatttttaaaatggctgctcatgtaattgtgtatgtaattgagacatttaaattatggacatgtaggaactaattatatattgtctatattta

SEQ ID NO: 715219 - DNA, 945 bp, Homo sapiens
gtaaatgtcattattttcctacaattgtacattgagattattaagattatttaaaaaatgattatgacaaaatgccaatgtcaatttaaaaaataaaagagaagaaaatgggattaaaaaggtcataaattaagatttgaaatcttttaaaggaaaaacttccattgaaagttatctcagtattttaagtaaggcacacagaataacaaaattaaatcactaaatatctaaaacttcttaaattattacaatgcgtaatataaaacctaacagaaaaaaaattatgaattataatatatactgcaaaaaatgagtcaactaactttttttgcattaatgattgacattttgaattgggttttgatagaaaaaaatagatattttcagrgtaaattcatcatctgacttaaaggtgtaaatttctattttattttatattttggagaggtgcaaaagttgattattgaacctttgtgaagaggggtagatatatttgccacagagggtgtgttgaaaataagattaaaaaaaaaaaaagaaaagaaatgtagctttgagaatgtgacttctgagatcactgataggaaatgtagcttcgagaatgtgacttctgagatcactgatagaatgcctataggcgttttgaaggttgcactcatatgatcaagtgactcccagtggaaaacaatgttgtacttcccttttttgtaattttttaagaaatttaagtaaaataaaataagtattcatgaaatttgttcttcctttaaaatcaaattatatttactttgctaagtttgagctacagatgatgtgcaaaatcagaattgtcactggaaatttgcttcaaaatttgctctacttaaccttacttgaaagatgtataggagatattatatttagtggccttcaagtatataatcacaagtaacaaatatacttgaa

SEQ ID NO: 715220 - DNA, 945 bp, Homo sapiens
gtaaatgtcattattttcctacaattgtacattgagattattaagattatttaaaaaatgattatgacaaaatgccaatgtcaatttaaaaaataaaagagaagaaaatgggattaaaaaggtcataaattaagatttgaaatcttttaaaggaaaaacttccattgaaagttatctcagtattttaagtaaggcacacagaataacaaaattaaatcactaaatatctaaaacttcttaaattattacaatgcgtaatataaaacctaacagaaaaaaaattatgaattataatatatactgcaaaaaatgagtcaactaactttttttgcattaatgattgacattttgaattgggttttgatagaaaaaaatagatattttcagagtaaattcatcatctgacttaaaggtgtaaatttctattttattttatattttggagaggtgcaaaagttgattattgaacctttgtgaaraggggtagatatatttgccacagagggtgtgttgaaaataagattaaaaaaaaaaaaagaaaagaaatgtagctttgagaatgtgacttctgagatcactgataggaaatgtagcttcgagaatgtgacttctgagatcactgatagaatgcctataggcgttttgaaggttgcactcatatgatcaagtgactcccagtggaaaacaatgttgtacttcccttttttgtaattttttaagaaatttaagtaaaataaaataagtattcatgaaatttgttcttcctttaaaatcaaattatatttactttgctaagtttgagctacagatgatgtgcaaaatcagaattgtcactggaaatttgcttcaaaatttgctctacttaaccttacttgaaagatgtataggagatattatatttagtggccttcaagtatataatcacaagtaacaaatatacttgaa

SEQ ID NO: 715221 - DNA, 945 bp, Homo sapiens
gtaaatgtcattattttcctacaattgtacattgagattattaagattatttaaaaaatgattatgacaaaatgccaatgtcaatttaaaaaataaaagagaagaaaatgggattaaaaaggtcataaattaagatttgaaatcttttaaaggaaaaacttccattgaaagttatctcagtattttaagtaaggcacacagaataacaaaattaaatcactaaatatctaaaacttcttaaattattacaatgcgtaatataaaacctaacagaaaaaaaattatgaattataatatatactgcaaaaaatgagtcaactaactttttttgcattaatgattgacattttgaattgggttttgatagaaaaaaatagatattttcagagtaaattcatcatctgacttaaaggtgtaaatttctattttattttatattttggagaggtgcaaaagttgattattgaacctttgtgaagaggggtagatatatttgccacagagggtgtgttgaaaataagattaaaaaaaaaaaaaraaaagaaatgtagctttgagaatgtgacttctgagatcactgataggaaatgtagcttcgagaatgtgacttctgagatcactgatagaatgcctataggcgttttgaaggttgcactcatatgatcaagtgactcccagtggaaaacaatgttgtacttcccttttttgtaattttttaagaaatttaagtaaaataaaataagtattcatgaaatttgttcttcctttaaaatcaaattatatttactttgctaagtttgagctacagatgatgtgcaaaatcagaattgtcactggaaatttgcttcaaaatttgctctacttaaccttacttgaaagatgtataggagatattatatttagtggccttcaagtatataatcacaagtaacaaatatacttgaa

SEQ ID NO: 715222 - DNA, 1428 bp, Homo sapiens
tgataatttataattatattaacaattataattataagtaatataattatttaatcggaaacaaagcagatccgagaagatatcctttatctatttgtttttaccatgattatcacccaatawttatcaaaccctcaccctatatttttatttttttaaagaaaagtggggcaataaatcaaagagaatggccagtgtattgaggcaagttaacaagcattttctgaatttgtcacattttctggaatcttttattagttcctataaagtatgtacaaaaaagtaaaatacgatttctgatctccaaatattgtgattttgaaatggtataaaatataataattgataaaatagcatttactgtgtccatttgcatcattttgctcattcctctcagaaggttgtgctggaggaagctggtatttctggaaattaagttttttttccttcttctcaacagaaatatcacaaatatggaggcatctttatttaaattttaagtcaaatcaatatattttttgatgatcaatataatggtatactgttaaacagcctttttttctgatcaaattcctttatcaaactgtcaaaaaatttaagcctagacatcaaagctgtagataatttggtatatattcatccattttttagtttattcagttattcaaaagcacttgttgagtggcttctgtgggctaggcaatgggctagggaacagggaacagagaggtgacagtgcagactccagctcaaagcttctctaatgagctagattgtcatgcaaattaaacttagagtaggatgtgatatgtgttatgataaaggattatgcaagttgctttgctgtgcaaatgggaaaaagcgactatttctgttagagaacttctgggaggtgatactttaagaaattaagatgtatagatacagcttcaaattcttcctagtaggcagttgtcacctgttcatcggttagtctgaaagtggaagcgtatttaccaccccccttctgatggtaaaagttatacagagattagaagccgaaaataagagttaaaatgagaatactacaatgtaaaattgaaaaactgctggagaatttaataatgaggaaatttgtcatcaatgtaaaaaaacttcagcgattagaaaatcacgtcctttgcagaaacatggatgaagctggaaaccataattctcagcaaactaacgcaagaacagaaaaccaaacaccgcatgttctcactcgtaagtgggagttgaacaatgagaacacatggacacagggaggggaacatcacacaccagggcctgtcggggggtgggggactaggagagggatagcattaggagaaatacccaatgtagatgatgggttgatgggtgcagcaaagcgccatgccatgtatatacctatgtgacaaacctgca

SEQ ID NO: 715223 - DNA, 596 bp, Homo sapiens
gtgaaggaagactctaagtccccaaaagtggattactggacagaagatattaaagaccaaggtgttagagtagaagaatatgagaagacaaaacttgaacatgaataagatactactgattttatttctttaaaatatatattcagaagtgggattgctgggtcatatggttattctatttgtagttttttgaggagcttccatactgttttccataatgactgtgccaatttacttttacatgaacaatgtatatgggttttcttttcacctcatcctcatcartgcttgttatcttttgactttttgacaatagccatcctaacaaatatgaggcaatatctcattgtggttttgatttgcatttccctgatgattagcaatgttgagcaccttttcatatatctgttggccatttgtatgtcttctctgaaaaaactgtgcatttaagtgtctactcctttgctatctttaaattacttgtttcttttttgttgttatttttgctattgagttgtttgagttccttatatattggatattgatcccttataaaatcactatctcaaagagatacctccactctgatgttcagt

SEQ ID NO: 715224 - DNA, 596 bp, Homo sapiens
gtgaaggaagactctaagtccccaaaagtggattactggacagaagatattaaagaccaaggtgttagagtagaagaatatgagaagacaaaacttgaacatgaataagatactactgattttatttctttaaaatatatattcagaagtgggattgctgggtcatatggttattctatttgtagttttttgaggagcttccatactgttttccataatgactgtgccaatttacttttacatgaacaatgtatatgggttttcttttcacctcatcctcatcaatgcttrttatcttttgactttttgacaatagccatcctaacaaatatgaggcaatatctcattgtggttttgatttgcatttccctgatgattagcaatgttgagcaccttttcatatatctgttggccatttgtatgtcttctctgaaaaaactgtgcatttaagtgtctactcctttgctatctttaaattacttgtttcttttttgttgttatttttgctattgagttgtttgagttccttatatattggatattgatcccttataaaatcactatctcaaagagatacctccactctgatgttcagt

SEQ ID NO: 715225 - DNA, 596 bp, Homo sapiens
gtgaaggaagactctaagtccccaaaagtggattactggacagaagatattaaagaccaaggtgttagagtagaagaatatgagaagacaaaacttgaacatgaataagatactactgattttatttctttaaaatatatattcagaagtgggattgctgggtcatatggttattctatttgtagttttttgaggagcttccatactgttttccataatgactgtgccaatttacttttacatgaacaatgtatatgggttttcttttcacctcatcctcatcaatgcttgttatcttttgactttttgacaatagccatcctaacaaatatgaggcaatatctcattgtggttttgatttgcatttccctgatgattagcaatgttgagcaccttttcatatatctgttggccatttgtatgtcttctytgaaaaaactgtgcatttaagtgtctactcctttgctatctttaaattacttgtttcttttttgttgttatttttgctattgagttgtttgagttccttatatattggatattgatcccttataaaatcactatctcaaagagatacctccactctgatgttcagt

SEQ ID NO: 715226 - DNA, 639 bp, Homo sapiens
gtagtgatgttgatcaaagggtataaacttaaaattataaaacgaataagtgatgaagacctaatatacagcatggtaactatagtgaactaaaatgtatatttgacttttgttaagagagtagattcccacaatacacacgcatagagtaacgatgtgaggtggtggatctggtaattagcttatgttaattatttcacaatgtatatgtgtgtcagaacattgtgttatatactccgaatatatacaattttaatttttcaattaaacctcaataaacctgaacactaaaaatactacctgaaaatcactggatgtatgaggacaatttagaaggagctaagttggctggcgcctgcctcctgccgcagtacccgccgcctctacgcacaagcccagaagctgcggaagcagagcagccacctcttcacagccaccatccctctgaatggcacgagtgacacctggtaccaggagttcaaggctatcattcgagagcarcagacgcggcccatctggacggcggaagataagctggatggctccttggaggacaaccctcaccgcggcctggccgacagctctgctgacctcagctgcgacagccgtgttaacagcgactactggaggagacggaag

SEQ ID NO: 715227 - DNA, 639 bp, Homo sapiens
gtagtgatgttgatcaaagggtataaacttaaaattataaaacgaataagtgatgaagacctaatatacagcatggtaactatagtgaactaaaatgtatatttgacttttgttaagagagtagattcccacaatacacacgcatagagtaacgatgtgaggtggtggatctggtaattagcttatgttaattatttcacaatgtatatgtgtgtcagaacattgtgttatatactccgaatatatacaattttaatttttcaattaaacctcaataaacctgaacactaaaaatactacctgaaaatcactggatgtatgaggacaatttagaaggagctaagttggctggcgcctgcctcctgccgcagtacccgccgcctctacgcacaagcccagaagctgcggaagcagagcagccacctcttcacagccaccatccctctgaatggcacgagtgacacctggtaccaggagttcaaggctatcattcgagagcagcagacgcggcccatctggacggcggaagataagctggayggctccttggaggacaaccctcaccgcggcctggccgacagctctgctgacctcagctgcgacagccgtgttaacagcgactactggaggagacggaag

SEQ ID NO: 715228 - DNA, 592 bp, Homo sapiens
aagaaaatgctgctaaatttgactgcaaaagctaaaatctgtgcaaatcaacaacaacaacaaaataataataataataaataacatcgagataaaggtcatactagaaagactatttgcaagagagagaagagcacttagcttgagcttgtgctaagtgggtgggatgggggtgagggatgaaagactacaaattggatacagtgtatackgctcaggtgattgctacaccaaatctcagaaatcaccactaaagaacttattcatgtaaccaaacaccacttgttcccccaaaaacctatggaaataaaaaataaaaataaaaaataataagtaaaatagaaaacgattcaaaaacctataaatttttactcagaaattccactttttggaatttttcctagacacaactttgcatgactataaaaccatgtgtgttagtaattatttaccacagcgtttttttctaatagcaaaatggaaccaatctaatccaaagattcatacgttaattaaattcctgtttacataaatcaatacctgcataaaacaaaattttaaaaaaagcacagaacacaaataaatgcaagaa

SEQ ID NO: 715229 - DNA, 1646 bp, Homo sapiens
ccggggatcggagatcgaggcgccttgaaccgtgattgctccactgcactccagcctgagtgacagagcgaggccacctcaagagataaatacataaataaataaataataaaaataattaaaataaaagtgccacagttgtggtttgggggttccatatagtggaaggatgtagaaaggctttgcaaaatggagggcagcattcaggtccccagtagagcagcgctggactgcaactggtaaatcgaaagggataacttgtggtggtagcctcttgagctgagggtgggctcagccgtccggggctgaaaccttttccgcagccagctggccagataccctccgactggctasttttgctcacctccgtgaaccctgcagtccagaacagctgttccaatttgacaaggaaatgccaagactgaagcttttttgtttgcttgtttttttgttgcttttttttttttttgagatggaatctcactctgtcgcccaggctggagtgcaatggcgcgatctaggctcactgcaaccttcacctcgcgggttcaagcgattctcctgcctcagcctcccgtgtagctagaattacaggcgcctgccaccacgcctggctaatttttgtatttttttagtagagacagggttttgccatgttgaccaggttggtttcaaacttctgacctcaagtgatctgcccgcctcagcctctcaaagtgctgggattacaggtgtgagtcactgtgcccggcgaagactgaagttttaaaattactcttacatataaatgtttgagtggattaaacaaagttattacccttacaagaagccagaaaaaaaaaaactgcacaatttgagtgcctactaattccagctgagccacctctttccattcattgcttccttcctctacctgggtttcagtcccaactcagcaatttgccattcgtgtcatttcgatggaggaagcctctcggtgcttccgtttcctctcctaaaaagaataattaactatgatctcagagtagtgtgagggttacatgagagaagtgtaaggtaaacagtgggctgacagtattaggtagcaggaattttccttaggctggtgtgacaattgtggatgtaattttttttttcttcttctaaaagaaaccagaggtcaaccattgttacataaccacagtgtgtcaagggagggccaatggggagccgtatgatgtggcaggaagccaaggatggaagttgcccatgggctaggggcactcggaaaccataggcatggtgcttcggcattgttctgctctcttgacctttggctccctggcctccagcagtctctgcgtgttcccagctctgctctgctcaccacatgtgttagagagcacaggaccaccaggggctcagagcagtggtagggaagcttggccagtagcctctgctcagccagaagactgaccaggccctgggatccagggcctgcatgccactctctgcaggacacccgagggccctgacagaaaccagccatgctggcttctacctcctagaacgcactacctccaaggtagtggggatggtgggcatgcttccccaaggatggcagctcagtttctgcagctcccggcctctaccctgtagctcatccc

SEQ ID NO: 715230 - DNA, 627 bp, Homo sapiens
cacatgtataggcagacttcatgaagcccagctaaaataataaaattgatttcagttatcatcaagcacagtgaggacagaaatagcaacaaaacacattactttaggcaaagatactcttttyttgaaaacccaaactacattccattacctttcataacagtcatattccttgtccattcttgtttctaccatggttctaactcctacttttattcattacattaatcaaagtaattctctttcaaagaggaaactggaagttatgtaattgaggactattaaaaataagtattttggcagatgtgcaaaattctcaagcacatatattacaactttctatagtcatatacatcctttttacacttgcttgaattggcatacaaaactcccatgtttgttaatgtaatccaaacaaatagccagtccataaaatataaaagttacatttagttatttatttatataacccgtgattggtgaccacatttcagtattccatcttaactagtaattatccaaagattttcatgaagtcactgaatctaatattagtctaaggtcttgaactaggaatcttggaaattaaatttaagacaataggctacagaaaataattactgtcaa

SEQ ID NO: 715231 - DNA, 627 bp, Homo sapiens
cacatgtataggcagacttcatgaagcccagctaaaataataaaattgatttcagttatcatcaagcacagtgaggacagaaatagcaacaaaacacattactttaggcaaagatactcttttcttgaaaacccaaactacattccattacctttcataacagtcatattccttgtccattcttgtttctaccatggttctaastcctacttttattcattacattaatcaaagtaattctctttcaaagaggaaactggaagttatgtaattgaggactattaaaaataagtattttggcagatgtgcaaaattctcaagcacatatattacaactttctatagtcatatacatcctttttacacttgcttgaattggcatacaaaactcccatgtttgttaatgtaatccaaacaaatagccagtccataaaatataaaagttacatttagttatttatttatataacccgtgattggtgaccacatttcagtattccatcttaactagtaattatccaaagattttcatgaagtcactgaatctaatattagtctaaggtcttgaactaggaatcttggaaattaaatttaagacaataggctacagaaaataattactgtcaa

SEQ ID NO: 715232 - DNA, 630 bp, Homo sapiens
agttctattatgagatggaaatgtacagtcttgttcacagctaaattctacatgactgtattaattttggtgttatgaaattttaaaaatgtgatttaaaccttaagataaatcatccccacatgtgatttatgtgtttttttaaaatcatgtatcttcctcagtacaatgtaagaactgtaaaatcagatcagagatgatctcatctctgtcttgctttctgttgaatgtaagatcagagagcaagatgatctcatctctttcttgctttctgttgactcccaggacctagaacccagcaacaagaatagatggtcaaaaatgatattttaatgaacaaataaatgggtggataaaatgggtaagctgatgtggtaaaccaatgaaagggaaactcatcacaaaatctgcagttgcatgaattcccctgttctgttctcaggttaaggttacaggcttatccaagcagaatccttccgcagaggaaaagtttggctattccacaattttaggggaaatatgacaataatatagtcttgatgcarctgtatcaggtgtctgaattggagacaaggtagaacatcaaaattagatggcgcctattacaatatttttagaaagcgtataaac

SEQ ID NO: 715233 - DNA, 918 bp, Homo sapiens
ggtcttacactggtcttacactgattccatagggatttgctctcccctctcctacaggcttgtcagagacatgcacagagtcctataatgcccactatgcatgcctctagcagctttgaattccgctggatcatctggcacagtggccagagcagcytggaccagagcctatatcttctgtagagccctctttagttctgggctccatttgagaccagtagcctttagaaacatcgttcgtgagtcagagcaatattctcaaatgtggaatatgttgtctccaaaatcccagtaggcccccaaaacatagtgtctcttttgtagtgataggaaatatatagagagagcaaaatgccgtttactgtaaaaaagattgtctcagcatgtggactagggacactaaaaaccttaaaacatcacctatgttgtcggtccctgaatcttctctgatttatctattttcttctggtattttacttctgctcaatgttataatattttactatactgaagaaacttgccatttcctgattattgtaccaactaatatattattattggtattattttgagacacggtctctttctgtccctgaggctggaatgcagtggcaggatcacagctcattgcagcctcaaccttctgggcacaagtgattctcccacttcggcattgctggcagctgggactgcaggggcacaacaccatgcctggctaattttggtattttttgtagggctgggatgtcaccgtgttacccaggctggtctcaaactcctgggctcaagtgatctgcctgtgtcggcctcctaaagtgttgggattacagtcatatgccacagggcccggtctgtaatattatcaatacattaaactggcaggatgttttaaaaaatgtaaattaaactgagaacaga

SEQ ID NO: 715234 - DNA, 1251 bp, Homo sapiens
gttgtataagaatgtacgtaaatggtggattttccccctaggtatataatgagcagagcaattaataatttttacgtgacatttctcccaatttgtaattttttaaataaaattataatgcacacttagaaatgggccaaaacaaaaataggtaagagcaatgtatcataaacacttatgtaaccatcatgcaggataagacatggaacactgcaaacagactaggtccacttccaggccactttccaagcccctaaacctttattcacatctcctgagataagcaatattcataatctatgatgatcatttgcttgaatttctttatactttaccagctaggttcacaaccctaaactccacagcttggtctgtcctgctttgaactgtgtataggtgcagtcctgtgtgttcttcttgttcatggcttcttgcactagatatcatgtttctgaaatttagttacatagttgcatgtacatgtgattcatttcttttcacctctatatactgttccactgtatggatttactgtaatctttcatatcattcaatcatccttagttaatatatatttggggcagtctatttttgagctattatgaataatactactatcagcattatttcacatatcatttgatgcaattcctattatggggtcattaaatgtggtgttcaaattatcctcacagacatagaaaagtgcaaaaaataatttatctaaatttgttcctgtcacctttacctccagtctctttatygctatttgcatatatcttatcaataatatatttaactcagcaagacgctattattttattcagtcaacattcatttagaattatgcacatatttatcatttctgttaatttttattccttcttgcatgcttaaccttgtattttcaatattttttatctgaaaaatatcatttggatttctgtttatgaaggtcctctattcttttgaaacacactaaagacatgattccattgaattctactttccatttttctgttgaaaatcaggttgtcatttagaaagttgttccttttaaaataatctatcttttcctctggctacttttcagattttctactggtctttgatgtcttgtgacattttatgttaatttgtttttagttatcttgtctgacctttgatggttactaaaaatatatggattaatacattttatcacttttgggaaaatctccacaacattgattctgccctattttatccctt

SEQ ID NO: 715235 - DNA, 1853 bp, Homo sapiens
atggtaaccatatttttctttttgtaatactttggtcaaagaagagaataaaagcaagatctaggcattctcctgcaacttagaagaaactggaaattgatttgatgtcagtagctttttttggatagtatcttatctgttgctgggtcatcaccacaaactcttttcacaggcaaattcaatgagcagcactggatctcaaaatgtcattaaaattaattaaatagagcatctcaaccacagctccaccactctattccatgatttaaattttacgctgtttttgctttgttttgttttgttttttgagacggagtgtcgctgtctcccaggctggagtgcagtggcgcgatctcggctcactgcaagctctgtcccccgggttcacgccattctcctgcctcagcctccggagtagctgggactacaggagcctgccacmacgcctggctaattttttgtatttttagtagagacagggttttactgtgttcgccaggatggtctccatctcctgacctcgtgatccacccacctcggcctcccgaagtgctgggattacaggcgtgagccaccgcgcccgccctatgctgttttaattagcagaaatcaaaacttcttagtttataacaatcattgaaagatcaaatagtaaaacagtacttacgagtttatcaaaaaatgaaggacatctgacataagtagactttaagtcccatggaaacaaaactgaatctggtgcttctatggaattccaccatttaatcctatccatgaatatagttttggttatagaactacaaccttctaactccatcatcactcactcaagtgtgacagaagatctggggtcttacctctgtttgacagtttggtcctaaaatccgctctttagaaataaaagcgtgctcaaaaaatgtgttactcgctttatctttcttattaaggaattttatttacacgaaaatctgaattgtttctatcatgatcatagtgaaaggaggattcattgaaggtcatccataaataattatttgcataagcaatgtattgtaaaataaactacacttaatttctaaatctaaatgtattggagcttgacttgaactttgctgtttactattgtaactttcccacaatgatgatctttttaaaattacttattttccaaattatgtatttaaatatttcaaaaacaaaccacttcatgatatagatgaagatatagacgatgatgataatgatgatggcaggtgaaagggagaatgctatttgatcagtgtgatttcaggcttgtttctaagtactggagctcagcgtgatgagagaacactactattcttcctcatggcctcatgattcttctatgattctcagcattaggcctagacaagtaccctcacatggtatttcatcaagaataatgtaaaaccaacatattttcaacgatttatttgcttttttttcttttactacattttaaaattcgataagaaacacgacctccaacaattaggattctattttgggattttttttggcatttttgaacactaacatggacaaatagtctatgcaataatacagtatatcaactttagtttatcttttaatagcatcattagcaagccaaattcttgcaaatgctttttccccttcttagctatggtgactaaatctggatcattttactatagcagtcaaagttgaattatatatgcacaaacatactcaaagatcatgctaaatatgttttatacgttaaaaaatttgcctttctatggtatttttctctaatgtagagccaaaaaatttatagtaacaaaatatttaacccaacttacaggtgtaca

SEQ ID NO: 715236 - DNA, 1853 bp, Homo sapiens
atggtaaccatatttttctttttgtaatactttggtcaaagaagagaataaaagcaagatctaggcattctcctgcaacttagaagaaactggaaattgatttgatgtcagtagctttttttggatagtatcttatctgttgctgggtcatcaccacaaactcttttcacaggcaaattcaatgagcagcactggatctcaaaatgtcattaaaattaattaaatagagcatctcaaccacagctccaccactctattccatgatttaaattttacgctgtttttgctttgttttgttttgttttttgagacggagtgtcgctgtctcccaggctggagtgcagtggcgcgatctcggctcactgcaagctctgtcccccgggttcacgccattctcctgcctcagcctccggagtagctgggactacaggagcctgccacaacgcctggctaattttttgtatttttagtagagacagggttttactgtgttcgccaggatggtctccatctcctgacctcgtgatccacccacctcggcctcccgaagtgctgggattacaggcgtgagccaccgcgcccgccctatgctgttttaattagcagaaatcaaaacttcttagtttataacaatcattgaaagatcaaatagtaaaacagtacttacgagtttatcaaaaaatgaaggacatctgacataagtagactttaagtcccatggaaacaaaactgaatctggtgcttctatggaattccaccatttaatcctatccatgaatatagttttggttatagaactacaaccttctaactccatcatcactcactcaagtgtgacagaagatctggggtcttacctctgtttgacagtttggtcctaaaatccgctctttagaaataaaagcgtgctcaaaaaatgtgttaytcgctttatctttcttattaaggaattttatttacacgaaaatctgaattgtttctatcatgatcatagtgaaaggaggattcattgaaggtcatccataaataattatttgcataagcaatgtattgtaaaataaactacacttaatttctaaatctaaatgtattggagcttgacttgaactttgctgtttactattgtaactttcccacaatgatgatctttttaaaattacttattttccaaattatgtatttaaatatttcaaaaacaaaccacttcatgatatagatgaagatatagacgatgatgataatgatgatggcaggtgaaagggagaatgctatttgatcagtgtgatttcaggcttgtttctaagtactggagctcagcgtgatgagagaacactactattcttcctcatggcctcatgattcttctatgattctcagcattaggcctagacaagtaccctcacatggtatttcatcaagaataatgtaaaaccaacatattttcaacgatttatttgcttttttttcttttactacattttaaaattcgataagaaacacgacctccaacaattaggattctattttgggattttttttggcatttttgaacactaacatggacaaatagtctatgcaataatacagtatatcaactttagtttatcttttaatagcatcattagcaagccaaattcttgcaaatgctttttccccttcttagctatggtgactaaatctggatcattttactatagcagtcaaagttgaattatatatgcacaaacatactcaaagatcatgctaaatatgttttatacgttaaaaaatttgcctttctatggtatttttctctaatgtagagccaaaaaatttatagtaacaaaatatttaacccaacttacaggtgtaca

SEQ ID NO: 715237 - DNA, 1853 bp, Homo sapiens
atggtaaccatatttttctttttgtaatactttggtcaaagaagagaataaaagcaagatctaggcattctcctgcaacttagaagaaactggaaattgatttgatgtcagtagctttttttggatagtatcttatctgttgctgggtcatcaccacaaactcttttcacaggcaaattcaatgagcagcactggatctcaaaatgtcattaaaattaattaaatagagcatctcaaccacagctccaccactctattccatgatttaaattttacgctgtttttgctttgttttgttttgttttttgagacggagtgtcgctgtctcccaggctggagtgcagtggcgcgatctcggctcactgcaagctctgtcccccgggttcacgccattctcctgcctcagcctccggagtagctgggactacaggagcctgccacaacgcctggctaattttttgtatttttagtagagacagggttttactgtgttcgccaggatggtctccatctcctgacctcgtgatccacccacctcggcctcccgaagtgctgggattacaggcgtgagccaccgcgcccgccctatgctgttttaattagcagaaatcaaaacttcttagtttataacaatcattgaaagatcaaatagtaaaacagtacttacgagtttatcaaaaaatgaaggacatctgacataagtagactttaagtcccatggaaacaaaactgaatctggtgcttctatggaattccaccatttaatcctatccatgaatatagttttggttatagaactacaaccttctaactccatcatcactcactcaagtgtgacagaagatctggggtcttacctctgtttgacagtttggtcctaaaatccgctctttagaaataaaagcgtgctcaaaaaatgtgttactcgctttatctttcttattaaggaattttatttacacgaaaatctraattgtttctatcatgatcatagtgaaaggaggattcattgaaggtcatccataaataattatttgcataagcaatgtattgtaaaataaactacacttaatttctaaatctaaatgtattggagcttgacttgaactttgctgtttactattgtaactttcccacaatgatgatctttttaaaattacttattttccaaattatgtatttaaatatttcaaaaacaaaccacttcatgatatagatgaagatatagacgatgatgataatgatgatggcaggtgaaagggagaatgctatttgatcagtgtgatttcaggcttgtttctaagtactggagctcagcgtgatgagagaacactactattcttcctcatggcctcatgattcttctatgattctcagcattaggcctagacaagtaccctcacatggtatttcatcaagaataatgtaaaaccaacatattttcaacgatttatttgcttttttttcttttactacattttaaaattcgataagaaacacgacctccaacaattaggattctattttgggattttttttggcatttttgaacactaacatggacaaatagtctatgcaataatacagtatatcaactttagtttatcttttaatagcatcattagcaagccaaattcttgcaaatgctttttccccttcttagctatggtgactaaatctggatcattttactatagcagtcaaagttgaattatatatgcacaaacatactcaaagatcatgctaaatatgttttatacgttaaaaaatttgcctttctatggtatttttctctaatgtagagccaaaaaatttatagtaacaaaatatttaacccaacttacaggtgtaca

SEQ ID NO: 715238 - DNA, 2666 bp, Homo sapiens
tacattttccaagacaggaggatacagatgggaggaccataaagctgcttcatcattattggttacattctagttctgtagttggttggtgggttcgtaggaatttcttttattattatacttcaaaactaacctgtaagttacatgtattttttagtatatcaaatattacataataagatattctaaagtatctggccgggcatggtggctcacgcctgtaatcccagcactttgggaggccgaggtgggcaggtcacaaggtcaagacatcgagaccatcctggctaacatggtgaaatcccatctctactaaaaatacaaaaaattagccgggcgtggtggtgggcgcctgtagtcccagctactcaggaggctgaggcaggagaatggcatgaacccaggaggcagagcttgcagggagccaagattgtgccatggcactccagcctgggcgacagagcaagactccgtctcaaaaaaaaaaaaaaaagaatattctaaagtatctgcacgcaaaagaaaaagtatttaaggaattatacttgttaaatgtgttcatttctgctagtgaaataaaggtgatttttacatgtatttctatattttcccaaatatttgcaatctaggtgagtaattttgtaatttaaaatactatatttatgtgtgtattttctaaaaacagaaaatgagcattttataaatagaaagaaaacttcagtgtacaaacctctttcttagactcaccttttgagaatgccattattcatattttttatttccagctccaccttccccgtagttactctgtaaagtgtggcatggatgtctgcgtgaatgcccagactctgacttgtacctggataccctctaggtagaagaagctctgatccagatccatgatccagaactcaggaagctgcttaacccaaccactgcagacctaaggttcgcagactacctagtgaggcacgtgactgagaatcgggatgacgtcttcctagatggcacgggctgggagggaggtgacgaatggatccgggcccagtttgcggtctacattcatgccctgctggctgccacactgcaattaggtaagaaaccacacggagcctacagctacctgttttattataatttttcattttgtaacatttatgagattttggattgcacaataaatacatattccttatagaaaaattaccagttattccctcatacaaagatagccacttttaacgtctttagtactttatagccttgcaaatcttttcctatgcatgtattttggattttggttttatggtacttttggtggtccttttacaaaaatggatccctttatacatgttttctgaaactattactttataatagaaacaacacataccaacataacatgaacatatatcatcacttttacatgactgcttcatattcatcagtatttggcagctgtttgtgaatactgccacatgttttttaagatgtataaagggagaaagaatataaaaaatagaaatcattgaaaatcgtgttgtaaatgattaaatcttcaaatttataacccattctaagaaatattattattcgtattaaatggttaaaatggagcaggtaaacatggagttactcctgcattaaaactatctcattctccttgggaaagaaatatataaatagtgaaaatggagctctgcagtgagcttttcaccttggacatttggcagatatttattagagttgttaaaaatgtgttgagyttgtgtttttgtttcagttaactaaccattatttttttaattgtgatgaaatacacatagcataaaatttaccatctttaccatttttaaatgtacagttccacagtggcattagatacattcattgttgtatcagtagatttttttaatcaacaccaccaccacatgctcccaggttagttgtttacagtgcacataggagttttaaagtaggtttcgggagagtttttcatttgtaaaagacagctgaggaacaagccctcgtttgttaatgagatatttttaaatgtttgccaccactaacaatgtagcagctgagacaccaaaattaaatcctttaaccccaaatcatttggtaatctagaaagaaaacttcagtctccactgccatgtagcttaattaatttgcttttaagcaaattaattaatttgcttttttaaaaatatttgcccaggaggctgtaagcactgaataatagtagctcacttttttttttgaacattaaatatatgcagggaccagtgttctgagcactttacatctagtaattcatttcatccttacagcaatcctgaaggtagggaccttgtcattgccttttacagaagagaaaatgaagctcacagaggttcataagaggcttaggtgggatctgatcccaaacagtttggcttaggcccatactcttacaagtaacaaggtcaaaagaggaaattcagcccaatgaactgcttgaggaagtgttcttagaacaacttctttatgctgtgtatggaactgtgtatctcattcatttcctttcctagcaacaaaaggtactttgtatttcaccttcaaagtaaacaacatgcaattaatatatgaagtaatagccatttgtatcagttctccaaaccatt

SEQ ID NO: 715239 - DNA, 573 bp, Homo sapiens
cacagatccacagcaggggaccatatgtcgaactgtttacatggatgttgctctaagtgaatgtttcgggatgccgaaatgatgaaatcacagccatagcagggatggctttccaggttggggtttcaattgactacttttatttcagtctgagcctgattaaaacatacagtgaaccttctaatgaattttgagttytgatattgtacattggtttactttagaagagtttttacttatgtaaattttgttctgttttggtgtttgaatatctagatggtcactgtaatttatacttgctaaaattaatttatattaccattttctctaaagttggccttaaaacgtgcttataaagtgaaggggtcatacagttgggccttcattattttgctgaattatgtgatgatttttttgctttctacccacaaaacatttattaattcacttcctcccagaaacatgaaagttagaggtggtagttctgaggattgggtgttttgttttacgtttttagtttgttctttccacatccttaaaaacttggtttcagacatcaaggagtatcactgt

SEQ ID NO: 715240 - DNA, 607 bp, Homo sapiens
taacctttaaaaaaatcacaaatagacaatttgtaagatacattaaaaagtactatatacttctaagaaaaatttagctttaaaagcattgatcagaaaataagagaggtgaaaacaacagagctaagcatttcccttgggtatcagaagagaggaaacaaaaagaagtgagaataaggacaggaattggtgacaaagagaaacacaataaaaccaaagaggactaaaaaaaggtataactttaaaaatattaaaacaatagacctctagagcaagtctaatgaaggaaataaaagaygcaaacaaaaagcaaatgaaaaagggagaaataactatggactcaacataattaaaataagaagagtaggctacacaatttgctaataaattgtaaaacctaggtaaaatggatacatttctggaaaatcataaaacaccaaaactggcacaaaaagaaatagaaaacttgaatagaacaaaaagcattcaaatatctgaaatagaaatcaagtattttccctcccaaaaagccctagaatgagatggttaacatggatgagttattaaacttttaaaaaaatcttttccaagttgccaggaagtagga

SEQ ID NO: 715241 - DNA, 607 bp, Homo sapiens
taacctttaaaaaaatcacaaatagacaatttgtaagatacattaaaaagtactatatacttctaagaaaaatttagctttaaaagcattgatcagaaaataagagaggtgaaaacaacagagctaagcatttcccttgggtatcagaagagaggaaacaaaaagaagtgagaataaggacaggaattggtgacaaagagaaacacaataaaaccaaagaggactaaaaaaaggtataactttaaaaatattaaaacaatagacctctagagcaagtctaatgaaggaaataaaagatgcaaacaaaaagcaaatgaaaaagggagaaataactatggactcaacataattaaaataagaagagtaggctacacaatttgctaataaattgtaaaacctaggtaaaatggatacatttctggaaaatcataaaacaccaaaactggcacaaaaagaaatagaaaacttgaatagaacaaaaagcattcaaatatctgaaatagaaatcaagtattttccctcccaaaaagccctagaatgagatggttaacatggatgagttattaaactttyaaaaaaatcttttccaagttgccaggaagtagga

SEQ ID NO: 715242 - DNA, 607 bp, Homo sapiens
taacctttaaaaaaatcacaaatagacaatttgtaagatacattaaaaagtactatatacttctaagaaaaatttagctttaaaagcattgatcagaaaataagagaggtgaaaacaacagagctaagcatttcccttgggtatcagaagagaggaaacaaaaagaagtgagaataaggacaggaattggtgacaaagagaaacacaataaaaccaaagaggactaaaaaaaggtataactttaaaaatattaaaacaatagacctctagagcaagtctaatgaaggaaataaaagatgcaaacaaaaagcaaatgaaaaagggagaaataactatggactcaacataattaaaataagaagagtaggctacacaatttgctaataaattgtaaaacctaggtaaaatggatacatttctggaaaatcataaaacaccaaaactggcacaaaaagaaatagaaaacttgaatagaacaaaaagcattcaaatatctgaaatagaaatcaagtattttccctcccaaaaagccctagaatgagatggttaacatggatgagttattaaacttttaaaaaaatcttttccaagttgccagraagtagga

SEQ ID NO: 715243 - DNA, 632 bp, Homo sapiens
ctagcaagattggttatctggtttccaggactacagtagattagaagcatcaatacatgaaggcaagcagaccatgagaacctgagcttgccaagaggaaagcattcaataatcatagctstggggaccattcagtttggcagcatattttccaatatacttcagtagaaatttgcaaatatcaccacatgatagcaacataccatagtgagtttattattttagaatagactagaagtgtgtcatagcacagtggggacaatgtttttcttttctttgcattcctagtgcctagaataatacccagctgatgactgtggtcaaacttttggctgaatgaaatagactctagccaagcaggcacatctgcgttaatataaagcaatgtcaattcaagtggactcacttttttattgttccttacttgagctatttaaagaataaatttttttctatcagagaaacttgatttttcagaatgactcaattcccaatggttctggatagctagcacgttagcggatgactaggtgtagaaggggcctctgtcttcctttggatgtgggagaatgaagtgaacaaactcctgacttcccagtgacatggggtaaactaatgctagtagccatgaa

SEQ ID NO: 715244 - DNA, 632 bp, Homo sapiens
ctagcaagattggttatctggtttccaggactacagtagattagaagcatcaatacatgaaggcaagcagaccatgagaacctgagcttgccaagaggaaagcattcaataatcatagctctggggaccattcagtttggcagcatattttccaatatacttcagtagaaatttgcaaatatcaccacatgatagcaacataccatagtgagtttattattttagaatagactagaagtgtgtcatagcacagtggggacaatgtttttcttttcwttgcattcctagtgcctagaataatacccagctgatgactgtggtcaaacttttggctgaatgaaatagactctagccaagcaggcacatctgcgttaatataaagcaatgtcaattcaagtggactcacttttttattgttccttacttgagctatttaaagaataaatttttttctatcagagaaacttgatttttcagaatgactcaattcccaatggttctggatagctagcacgttagcggatgactaggtgtagaaggggcctctgtcttcctttggatgtgggagaatgaagtgaacaaactcctgacttcccagtgacatggggtaaactaatgctagtagccatgaa

SEQ ID NO: 715245 - DNA, 2066 bp, Homo sapiens
ctctgatgtgggattttgatggtggaaaaggctatgagagtgtggggataggggatatatgagaactctttacttcctggtaaattttgctatgagcctaaaactgctctaaaaataacatctatataaagacattttttaaaaaattaaaggaatgaaaaccttacaaagtccttatttcagaagacaaaaaaaaaaagtcaattccttcaccaggacaacaggatttaactactgtagacagccacttactstcttgaatagaaaaataataagaggtgagtgtctaggctttaaactgcttattcatcatcttgaactaaggaaaataagtcctatggaaaatgcatttaaagaaggggatggatagtgaaatacaaggtcagtaggcaaacccattccaatgtttgggttgaaaggggccatgaaagacctgtaactgggagaacatgagtgggttgtggttgcatgtctgcattaggaactatgtatttcagagataaggagtaaagatctgttatcatctgttatctgctcctgtatcttaagtctagttggtttgggagcttttctatataatataaatatattatataagccacacatataaattctccagtagggacatttaaaaacaaaaaaaggtgaaaataatgtgataataaattttacttaacccgatacatccaaaatattatcatttcaacatgtaatcaatgtataaaattattgatggcatatttcactttctttttccatattaaatttttaaaatctaatgtgtctcttacacttgagtatgtcttaattcatatgctaaatgttaatcagaaataattaatccttaattagctttaataacatttacagttaagtagtagattcacatactcaagttatcccagattttaaaagttttacaataactcaatggagtatcagtttgaaaatccagatttaaattcattaaaattaaaaattgagctcctcagttggaccagctacattgcaagagctccatagtcacttatgcctagtagctaccatgttggacaacgaaattctaattagttgatcattttatgtgaatagattgaaaaaacagtacaattcagtaaaatgtgtttggctataatattttaatcccttattgcaagtaggtagcaaataaatgaggaaaaatcattgccactggaaaatatggtaactgggttaatgccagggcactactcaatgatacccagtaaacagcttttgtagcccttattctaaaggacacacactgaacatgtggtcaggtgaaaggaaacagaacaatagatgtgtccattattacacttttctgactttcacagtcatggtaaatagcctcgacgttataagaatgggataaaaatcatattcattctcagatctagtagaattaaatatatagtaaaactgccaagtaaagactatctattttgaagaactgacaggttgtttaaattaagacaatacttaaagtattagaggatacttaaaaacttaatataatgtgaaaacagtggtttaatgaaaacaaaattcttacgacagcaaaatgcagaatttcgtcttcgttcagttcatttttcaattttctgaataaaggttgcattgctctgcaaggtccacaccaggcttggtaaacatcaatcactagaagatgatgatatttatgaaataacaaagtctaccaatctaggatagcagttatcccaatctggagccatggccagggcaaaggcactgcaggatttcttggtcaaagtggggactctagagggacagggtgccaggaggagctccgggtcaaaccccaggtggccagacagccggggagtccttatacctgttaagcctttgttctgcaacatctcatcccacaggctttgattattgatgactgtctgcaaagtggaaggcactgtaaaaggtattcaagcactagtgcaccagataaagaattgttgatatgtcagacccacctgtaactggacttctcgttttttgcttgccatttatctactatcataggaaaaaga

SEQ ID NO: 715246 - DNA, 641 bp, Homo sapiens
ccctgtctctaccaaaaataaataaataaataaattaattaattaattaattagctaagtgtggtgacatacacatatggtcctagctattcgggaggctgagttgggaggagagacagagcatgggaggtygaagaggcagtgagctgcgatcttgccactgcactccagtctgggcaacagagagagacctcttctaaaagaaaaaccggctgggcatgatggctcacgcctgtaatcccagcactttgggaggccaaggtgagtggatcacctgaggttgggagttcgagaccagcctggccagcatggtgaagtcttgtctctactaaaaatacaaaaattagccaggcatggtggcgggtgcctgtaattccagctactcaggaggctgaggcagcagaatcacttgaacccaggaggtggaggttgcagtgagccaagatcactccattacactccagcctgggcgacaagggcaaaactccgtctcaaaaaaaaaaaaaaaaaaagaacccaaaaaccaaaagttctgcatgctagatcttattgtaaagaatgcatatttgtattacaaaataaatgaaaagcaagttagctcaggaactgagcctggaacttactatcagatcacatggatt

SEQ ID NO: 715247 - DNA, 1541 bp, Homo sapiens
aggaaggaaggaagggtgggagggaagaacaggaggggatcccacaggagaatgtgtatagggagaggactcagactagctaaagcttttccctcataattaatagcaaataccatgttacctgaatttaattcacagtagcatacaaaagactcgctttgttctccccattgatgtcatcagagggctgtgggcaggcctaatcttggctcaggaggccctccagcctggatctaaagagcagcagatgggccaggctcggtggctcatgcctgtaatcccagcattttgggaggccgaggcgggtggatcacgaggtcaggagtttgagaccagcctggccaagatggtgaagcctcgtctctactaaaaatacaaaaattagccaggtgcggtggtgggcgcctgtatttccagctacccgggaggctgaggaggctgaggcaggagaatcgcttgaacccgggaggcggaggttgcagtgagccgaggtcacgccactgcactctagcctgggcaacagagcaagactccgtcaaaaaaaaaataaaaaaataaaaaaataaaaaaaataaagaggagcacacatctctgcccatcctaactcccactttgacattgaggtccccaggatggagggtctgcctccatctgccttgtcccctgcaatggtgggaaggtgatggagctcaagtctagaggccaccagcttcttagggaggtaggaggtggagggtggggtgcgggccctgcacacaactgccaagtgaggatgggggtggggtccacctgaggataagtaacagtgaggctggtgcagaggacccaggtggaggtagacagcagaatttgtggtggggtggatggcacattatataagcctctcttgctgccctgtttactgagattgtttcattatcttttttggcttttgtttttaagagatggggtcttgctgtgtcacacaggctggagtgcactgtgtgatcatacctcactgcagcctcgacatcctgggctcaggcaaacctcccaccttggcctcccaagtagctgggaccacaagcgtttgccaccacactcagctatttttatttttatttttattttttttagagatggggtcttgctgtgtcgcccaggctggtcttgaactcctgggctcaagcgatcctcctgccttggcctcccaaagccctgggattataggctgagccaccacacccagccacatttcatctgtgcagctccaggggctccacattctactcttctcatttcttctccagggtacccatggcaagggatgagggtagaagatggggcagccaggccttgattaaaggagaaggaaggcagcctgtggagagggcagcccagggagtgcagagagaagtgggccatgagggagacagcagagtgcaggctgcgtcccaaatgagcayacagcccactgtgagcccaccatcttcctagagacccctctcctctccaggagctgcttcagtagcactcagaggaaagaatgatgctgtatcaac

SEQ ID NO: 715248 - DNA, 1026 bp, Homo sapiens
tttctttctttctttctttctttctttctttctttctttctttctttctttctttctttctaacttttttgccagtgacacaacctcagaagttcctgagaacatgtgtcccaattccatttcagatgctgataagaaattctagttaattttactaggtataatgatggcatggtggtgtagttattcttcagtgcttccttatgcattcgtgatagatgcaaacagaagtttagggtgaaatagcacaatgcctgggattaaccttaaaaaacttcagcaaaacaatttatcttataattttttataaatattatataaactttatatawataactatatatctatatatatatatcaacaagatcagcaaaatgttgagaattgctaaagctaagtgacagatacatgggagtccattataccagaccctttccttttgggtgaaatttccagaagaaacactttttggaaatgtccagttcagcctggcccgtcccctgcctgggcaatgttgcattcctgggaaggaaggagaggaggtggggagagaagagggagaaggagaatatgacgtggagctgagctgtatttaaagagcacatttgatttcactgcctggcagatgtcccagggccttggggggacagcagactgtcagtgcgggtgtgaaacagtgaactaagacagggatttagcaaatcaaacaaggaaggaatggtaagaaccagctgcaaggggcagggagaggcatgtcctgaagctcacaggaaaaagccaaagcagcagacatcagggcctcaagctctgccccagtcctgctgggcctcaggtgtcccacagaagccaactccccccacccaagggggcatcgtggtattcctgctgtgcagctgttcctccatattaaataacactgtgtaggcagagaagcctttagaccatttgtaaccacgcaatgggttcaccttgcctgctgcgtagacagaaccgatttatcaagacaggggaattccaataaagagt

SEQ ID NO: 715249 - DNA, 1026 bp, Homo sapiens
tttctttctttctttctttctttctttctttctttctttctttctttctttctttctttctaacttttttgccagtgacacaacctcagaagttcctgagaacatgtgtcccaattccatttcagatgctgataagaaattctagttaattttactaggtataatgatggcatggtggtgtagttattcttcagtgcttccttatgcattcgtgatagatgcaaacagaagtttagggtgaaatagcacaatgcctgggattaaccttaaaaaacttcagcaaaacaatttatcttataattttttataaatattatataaactttatataaataactatatatctatatatatatatcaacaagatcagcaaaatgttgagaattgctaaagctaagtgacrgatacatgggagtccattataccagaccctttccttttgggtgaaatttccagaagaaacactttttggaaatgtccagttcagcctggcccgtcccctgcctgggcaatgttgcattcctgggaaggaaggagaggaggtggggagagaagagggagaaggagaatatgacgtggagctgagctgtatttaaagagcacatttgatttcactgcctggcagatgtcccagggccttggggggacagcagactgtcagtgcgggtgtgaaacagtgaactaagacagggatttagcaaatcaaacaaggaaggaatggtaagaaccagctgcaaggggcagggagaggcatgtcctgaagctcacaggaaaaagccaaagcagcagacatcagggcctcaagctctgccccagtcctgctgggcctcaggtgtcccacagaagccaactccccccacccaagggggcatcgtggtattcctgctgtgcagctgttcctccatattaaataacactgtgtaggcagagaagcctttagaccatttgtaaccacgcaatgggttcaccttgcctgctgcgtagacagaaccgatttatcaagacaggggaattccaataaagagt

SEQ ID NO: 715250 - DNA, 1077 bp, Homo sapiens
catattattgtgctaaattagatacatattatttcctttagataatttcatatgaagatgtaatgccacgctattctagaacagataaacaataagaggtatcatttcttaaagagaagtgtaggggagaaaaagtttaaaaataagaatatttaacccaggaacacgatcatatccaaaataggaataatgctgtgagtgggtagtttttactagaaggaaatctactatattggaagaagatatagtagcagattagttagtagaaattaagtaacgttcttgtgaaaatgtagaaaactcacagccccagaagaacttattgacaaacagacaaaacaggacgaagttcacacacctgttacaggttttgcaccatccctctcagtcttagcaacagggcctccacattatgataataataataacacatggggcaaatgtttgcaaagaaaatgaacatgagccagaggggcagccttgtgatctctctactccaccttggagaacatccacagagacatgcagcaggactttttgctgcaaatacaggaagatgccatgaagggaagactttggggagataaactgggctgtcttgcttaggaactcctggggtgttgcaacccgttttttctgccattgggttagttacaacaaatgccaataagtcacctccactttgtctcacttgttctttgcagcagcagctcagccttggaaggacgttgcctgagaaatkaagaagctcattaacttgggtcggtagattggacagtgtagcacctgtagaccttgaatcttaagatgccttgtgtgatcagccagagaaatgaaaactaatcaggagggtgaaactgcaatggggcccgcagtgaatagtgaggaggcacagccaacaggctgaggcccagactcagtggtagcccttgcaacccagcttgactggcctgtgctgggaaatgcagctggcctaagaaatgattaaatcctcaaacgtctaggacaaacattccaaccatcctaccagactagatcatgtacatatatatccatttgtcccacaagggaatttca

SEQ ID NO: 715251 - DNA, 1077 bp, Homo sapiens
catattattgtgctaaattagatacatattatttcctttagataatttcatatgaagatgtaatgccacgctattctagaacagataaacaataagaggtatcatttcttaaagagaagtgtaggggagaaaaagtttaaaaataagaatatttaacccaggaacacgatcatatccaaaataggaataatgctgtgagtgggtagtttttactagaaggaaatctactatattggaagaagatatagtagcagattagttagtagaaattaagtaacgttcttgtgaaaatgtagaaaactcacagccccagaagaacttattgacaaacagacaaaacaggacgaagttcacacacctgttacaggttttgcaccatccctctcagtcttagcaacagggcctccacattatgataataataataacacatggggcaaatgtttgcaaagaaaatgaacatgagccagaggggcagccttgtgatctctctactccaccttggagaacatccacagagacatgcagcaggactttttgctgcaaatacaggaagatgccatgaagggaagactttggggagataaactgggctgtcttgcttaggaactcctggggtgttgcaacccgttttttctgccattgggttagttacaacaaatgccaataagtcacctccactttgtctcacttgttctttgcagcagcagctcagccttggaaggacgttgcctgagaaatgaagaagctcattaacttgggtcggtagattggacagtgtagcacctgtagaccytgaatcttaagatgccttgtgtgatcagccagagaaatgaaaactaatcaggagggtgaaactgcaatggggcccgcagtgaatagtgaggaggcacagccaacaggctgaggcccagactcagtggtagcccttgcaacccagcttgactggcctgtgctgggaaatgcagctggcctaagaaatgattaaatcctcaaacgtctaggacaaacattccaaccatcctaccagactagatcatgtacatatatatccatttgtcccacaagggaatttca

SEQ ID NO: 715252 - DNA, 599 bp, Homo sapiens
aaaaaaaaagcacacattaagagaagaaatttgcagctgaatcattacacccaaatagaaatgactagaaattggatcctgagactggacttcccatgttattgctctgtctccaccaagggtatgttaggaatgagctcgcctcaggtttgccagctgatcacccaactacacatctcctggggcacagtaaagggaccgtggagcggcaggagccataaacacagctctccaaaatccggggactccattagggagcagctcgctgctctgtgaagagtctccaaattaagcccaagacccacctcaaactgttcccaccttctctcctataacccctggctactttcccaytccatttgaatgggtctgtgtcttgcagaccttgcattccagcctccctgcctttccttaggtactttgaagcccctctgtctgggatatcctccccgctgctcttccacttaccaaaatctcagcagtctctcaaagaatggcttaagacccttctggaaagccttcttcaactgccaaagtccagagagaatgccttgaatgaatgcccccagcacctgctctctgcagtcatgcctggtgca

SEQ ID NO: 715253 - DNA, 669 bp, Homo sapiens
tatccctggtatacctacgttacagaaaatctgtgttaacaccaatgtactagggtgtggtgttatatacctctagtctcagctacttgggaggctgaggcaggaggactgcttgagcatgggagttcaaggctccacctggtcaacatactgagaccctcaactctaaaataaataaattttaaaaaataacaccaatatatagatcccaatactgctctaatggatattaagtgctatcaataagtacttcttgacacatcactggatgaatgaaaacaaacaatgattacattgagagtgacaatgagttggtttcaaagctatattgagtactattcactcaggcatactcaatacatttttgtgagctcatggctttcctayttgtgattctcaaaagaatcctattggaacccccccaccccccaatcacagtaaaacctcagattaggtcttggcaaactcattttcttgacaaatacaacttagaggttatatctggtccctcatttggattatactatataaattcttcagtgattactgtcgtttggtatttggttaattaaatctactgagtgaggtcaaacttgcatttgtcttgtgtcaagttccattctatggcagactaatttaacagagattccaaggttctctgcctccaag

SEQ ID NO: 715254 - DNA, 2185 bp, Homo sapiens
aaccacgcgtttctatacattcatgctcccagcttctctgcttccctgccggctgcctcacctacaacagtaaagccctaattaacccgctgcttatttttctcaagacttacaaaggcatttatgaagcttccatataatttccaccacatcttttaagagggtccatttgggtgttattccttgaggacattttctcttttctctgaattccatgtcagaaactttaagatgcatttttacattgtcttggggattgtttttgcagatgccatgtcctggtggagcataattaactccggataacaatgttttgtttcttttctcttttaaatggtgtgtgtattggccattagaaatttcaccaatccgtgtggtgttttcatctaagaaatagattctgagaaatcaacttcaaggatgagcccagtcagcaagggctgttgtttcttccctcattttgaaggagaaacaatgtggagcagccacagctggctatggcagaaagggatttatttaacaagaaatagacactttaactgggtcagtctagtaggacccaggcactggcaggtacacacatatggctggcacgtttccctacgcagcttccatgtttctgggcacagaaccacatcaattagacttcatgggtgtacacgtagaaaacatgcagccaacccaagccgaagggaatttattggaagactattggggagctcttcataccaactgaaggttaaaagaaccaggcatggagaataggccagaaccaaaaagcagtaagctggagggaagcccagcgactgtctcatggccgggactgcctggccaggatggtggccccactgcgacaacgcctgcatggagatgagtgatgttcctgctcacgttacacaattcaggaagggggcatcaagctagctaagtccataccagggatctgaaggatgaagggagggagtggttactggatacaggagagtctagtagaggaagccaccacgagaggagcagttttgttaccggaaaggggtcccgatccagaccccaagagagggttcttggacctggtacaagaagaactcagggtcagtccataaagtgaaagcaagtttattagagaatagcagccctttcgcatgctaatgcattataatgagcatataatgagcagtggggacgaccagaggtcccttttatcaccatcttagtgttggtgggtcttggccagtggtgtctttgtgacctgtatcttgtgccaacctcttatctcatcctttgactaagaatgcctagcctcctaggaatggagcccagtaggtctcagccttattttacccagcccccattcaagatggagttgctctggttcaaatacttctgacagtttccctctgttaacagcctaccttatgtcaccacaagggaggaaatagttgtcctgaccccattctcytcatcctctctgatctcctgcctgggtttcccactggccaaacccacctggaaaccagacgtgatgagctcttagatgtagatcagcttggagaacatgcaggaaccaagggaattctggggcacagaacttccagccatggaagggaagggtttaatcttcaccttttttcccttcccctttcccccatcccccaaattgagcttcaaccatcctctgctttgattcaatctatattcgatgtgtacagtattatgaatagtcaaagatatagtacatacttgaattatatttctttttttgtacaacttcttcctctcagagttaatatttatattattttttgtttgcttggcttaatagtcctattcctaacacacccctaaactttgccataagcgtaagtctctcagtgcattcaaacacatcaggtattccatcaatttgatctttgcggagatgtatttagcagagtcctctctcctgctccagtaagagctgactgctttctggggctgctgttctcctgtcattctggactctctcttcatctctcttcacctggatattgccttcacttttttcctacattgaacccaccactttcctggagccgtgtttttctgagttgacttcattttaattgcgtacatcctctaggagtttcttaaggaagagttgtatgaaaaattgcatagaacatgtggaaaaagattttttaaaaat

SEQ ID NO: 715255 - DNA, 2185 bp, Homo sapiens
aaccacgcgtttctatacattcatgctcccagcttctctgcttccctgccggctgcctcacctacaacagtaaagccctaattaacccgctgcttatttttctcaagacttacaaaggcatttatgaagcttccatataatttccaccacatcttttaagagggtccatttgggtgttattccttgaggacattttctcttttctctgaattccatgtcagaaactttaagatgcatttttacattgtcttggggattgtttttgcagatgccatgtcctggtggagcataattaactccggataacaatgttttgtttcttttctcttttaaatggtgtgtgtattggccattagaaatttcaccaatccgtgtggtgttttcatctaagaaatagattctgagaaatcaacttcaaggatgagcccagtcagcaagggctgttgtttcttccctcattttgaaggagaaacaatgtggagcagccacagctggctatggcagaaagggatttatttaacaagaaatagacactttaactgggtcagtctagtaggacccaggcactggcaggtacacacatatggctggcacgtttccctacgcagcttccatgtttctgggcacagaaccacatcaattagacttcatgggtgtacacgtagaaaacatgcagccaacccaagccgaagggaatttattggaagactattggggagctcttcataccaactgaaggttaaaagaaccaggcatggagaataggccagaaccaaaaagcagtaagctggagggaagcccagcgactgtctcatggccgggactgcctggccaggatggtggccccactgcgacaacgcctgcatggagatgagtgatgttcctgctcacgttacacaattcaggaagggggcatcaagctagctaagtccataccagggatctgaaggatgaagggagggagtggttactggatacaggagagtctagtagaggaagccaccacgagaggagcagttttgttaccggaaaggggtcccgatccagaccccaagagagggttcttggacctggtacaagaagaactcagggtcagtccataaagtgaaagcaagtttattagagaatagcagccctttcgcatgctaatgcattataatgagcatataatgagcagtggggacgaccagaggtcccttttatcaccatcttagtgttggtgggtcttggccagtggtgtctttgtgacctgtatcttgtgccaacctcttatctcatcctttgactaagaatgcctagcctcctaggaatggagcccagtaggtctcagccttattttacccagcccccattcaagatggagttgctctggttcaaatacttctgacagtttccctctgttaacagcctaccttatgtcaccacaagggaggaaatagttgtcctgaccccattctcctcatcctctctgatctcctgcctgggtttcccactggccaaacccacctggaaaccagacgtgatgagctcttagatgtagatcagcttggagaacatgcaggaaccaagggaattctggggcacagaacttccagccatggaagggaagggtttaatcttcaccttttttcccttcccctttcccccatcccccaaattgagcttcaaccatcctctgctttgattcaatctatattcgatgtgtacagtattatgaatagtcaaagatatagtacatacttgaattatatttctttttttgtacaacttcttcctctcrgagttaatatttatattattttttgtttgcttggcttaatagtcctattcctaacacacccctaaactttgccataagcgtaagtctctcagtgcattcaaacacatcaggtattccatcaatttgatctttgcggagatgtatttagcagagtcctctctcctgctccagtaagagctgactgctttctggggctgctgttctcctgtcattctggactctctcttcatctctcttcacctggatattgccttcacttttttcctacattgaacccaccactttcctggagccgtgtttttctgagttgacttcattttaattgcgtacatcctctaggagtttcttaaggaagagttgtatgaaaaattgcatagaacatgtggaaaaagattttttaaaaat

SEQ ID NO: 715256 - DNA, 2185 bp, Homo sapiens
aaccacgcgtttctatacattcatgctcccagcttctctgcttccctgccggctgcctcacctacaacagtaaagccctaattaacccgctgcttatttttctcaagacttacaaaggcatttatgaagcttccatataatttccaccacatcttttaagagggtccatttgggtgttattccttgaggacattttctcttttctctgaattccatgtcagaaactttaagatgcatttttacattgtcttggggattgtttttgcagatgccatgtcctggtggagcataattaactccggataacaatgttttgtttcttttctcttttaaatggtgtgtgtattggccattagaaatttcaccaatccgtgtggtgttttcatctaagaaatagattctgagaaatcaacttcaaggatgagcccagtcagcaagggctgttgtttcttccctcattttgaaggagaaacaatgtggagcagccacagctggctatggcagaaagggatttatttaacaagaaatagacactttaactgggtcagtctagtaggacccaggcactggcaggtacacacatatggctggcacgtttccctacgcagcttccatgtttctgggcacagaaccacatcaattagacttcatgggtgtacacgtagaaaacatgcagccaacccaagccgaagggaatttattggaagactattggggagctcttcataccaactgaaggttaaaagaaccaggcatggagaataggccagaaccaaaaagcagtaagctggagggaagcccagcgactgtctcatggccgggactgcctggccaggatggtggccccactgcgacaacgcctgcatggagatgagtgatgttcctgctcacgttacacaattcaggaagggggcatcaagctagctaagtccataccagggatctgaaggatgaagggagggagtggttactggatacaggagagtctagtagaggaagccaccacgagaggagcagttttgttaccggaaaggggtcccgatccagaccccaagagagggttcttggacctggtacaagaagaactcagggtcagtccataaagtgaaagcaagtttattagagaatagcagccctttcgcatgctaatgcattataatgagcatataatgagcagtggggacgaccagaggtcccttttatcaccatcttagtgttggtgggtcttggccagtggtgtctttgtgacctgtatcttgtgccaacctcttatctcatcctttgactaagaatgcctagcctcctaggaatggagcccagtaggtctcagccttattttacccagcccccattcaagatggagttgctctggttcaaatacttctgacagtttccctctgttaacagcctaccttatgtcaccacaagggaggaaatagttgtcctgaccccattctcctcatcctctctgatctcctgcctgggtttcccactggccaaacccacctggaaaccagacgtgatgagctcttagatgtagatcagcttggagaacatgcaggaaccaagggaattctggggcacagaacttccagccatggaagggaagggtttaatcttcaccttttttcccttcccctttcccccatcccccaaattgagcttcaaccatcctctgctttgattcaatctatattcgatgtgtacagtattatgaatagtcaaagatatagtacatacttgaattatatttctttttttgtacaacttcttcctctcagagttaatatttatattattttttgtttgcttggcttaatagtcctattcctaacacacccctaaactttgccataagcgtaagtctctcagtgcattcaaacacatcaggtattccatcaatttgatctttgcggagatgtatttagcagagtcctctctcctgctccagtaagagctgactgctttctggggctgctgttctcctgtcattctggactctctcttcatctctcttcacctggatattgccttcacttttttcctacattgaacccaccactttcctggagccgtgtttttctgagttgacttcattttaattgcgtacatcctctaggagtttcttaaggaagagttgtatgaaaaattgcatagaacatgtggaaaaagatttttwaaaaat

SEQ ID NO: 715257 - DNA, 617 bp, Homo sapiens
cagtcttgtgcttgcctccyttttccgtggtgtggcactgggcacacttctgaacacaaatattcgtgcttttctcaacatcacccatatttaattctctcttttgtcactggcactgtgaaggttcctactcagaaaccagatgtcctgctctctcatttttcatttctttgtgttaagaacattctatatccattttttagctactttttttttagacggagtcttgctctgttgccaaggcacactctcacctgactgcaatatctgcctcctgggttcaagcaatcctcctgcctcagcctccctagtagctgggattacaggtgcatgccaccccacccagctaacttttgtattttcagtagagatggggtttcgtcatgttggccaggctggtctcgaactcctgacctcaagtgatccgcctgcctcggcctcccaaagtcctgggattacaggcatgggccactgtgcctggcccgttttagctatttgaagctatatattgttacatccagtcatcctacagtggtatagaacaggggtccccagcccctgagccatggtcgcataacaacggtctatggcctgttaggaaccgggccacacagcag

SEQ ID NO: 715258 - DNA, 617 bp, Homo sapiens
cagtcttgtgcttgcctcccttttccgtggtgtggcactgggcacacttctgaacacaaatattcgtgcttttctcaacatcacccatatttaattctctcttttgtcactggcactgtgaaggttcctactcagaaaccagatgtcctgctctctcatttttcatttctttgtgttaagaacattctatatccattttttagctactttttttttagacggagtcttgctctgttgccmaggcacactctcacctgactgcaatatctgcctcctgggttcaagcaatcctcctgcctcagcctccctagtagctgggattacaggtgcatgccaccccacccagctaacttttgtattttcagtagagatggggtttcgtcatgttggccaggctggtctcgaactcctgacctcaagtgatccgcctgcctcggcctcccaaagtcctgggattacaggcatgggccactgtgcctggcccgttttagctatttgaagctatatattgttacatccagtcatcctacagtggtatagaacaggggtccccagcccctgagccatggtcgcataacaacggtctatggcctgttaggaaccgggccacacagcag

SEQ ID NO: 715259 - DNA, 617 bp, Homo sapiens
cagtcttgtgcttgcctcccttttccgtggtgtggcactgggcacacttctgaacacaaatattcgtgcttttctcaacatcacccatatttaattctctcttttgtcactggcactgtgaaggttcctactcagaaaccagatgtcctgctctctcatttttcatttctttgtgttaagaacattctatatccattttttagctactttttttttagacggagtcttgctctgttgccaaggcacactctcacctgactgcaatatctgcctcctgggttcaagcratcctcctgcctcagcctccctagtagctgggattacaggtgcatgccaccccacccagctaacttttgtattttcagtagagatggggtttcgtcatgttggccaggctggtctcgaactcctgacctcaagtgatccgcctgcctcggcctcccaaagtcctgggattacaggcatgggccactgtgcctggcccgttttagctatttgaagctatatattgttacatccagtcatcctacagtggtatagaacaggggtccccagcccctgagccatggtcgcataacaacggtctatggcctgttaggaaccgggccacacagcag

SEQ ID NO: 715260 - DNA, 665 bp, Homo sapiens
ttgtgtaacattccacaggaaccaaagtctagatgctgggcagcttgtgtgcgtttcccagatatctctggtaaacagctgacaataaattccaggctgcctggtgccaagataatctgattattcctttcatgataaggctgctctcacacttgctacatacaaaaaagagacccaaagaaggacagagttcccttccttggaacrcaaaccatctcgtgaggctagcaggtcacccagaggacgacgggaggatggggtccttgtgccttcccttctcttaatgactttccctttgtaagttttctctttccacagaaaaacctaatttcttaacctctaccgtgtgacaggggaattcaaatcaagctctggtgcattaaaatggcaactgcaaagagacctattttgcaagagagctaaggtttattttttttaattttaatttttgctcttatttttattttattttattttgtaaagacagagtgtcactatgttgcccaggctggtctcaaactcctgggctcaagcaatcctcccaccttggtctctcaaagtgctgggattatgggcatgagccaccatgcccagccaagagctaacatttaaaacacaggcagaactcagaaaccaaaaagataaatgctgataaacacattgtg

SEQ ID NO: 715261 - DNA, 635 bp, Homo sapiens
tgggtcagaactgcaggtgacaacctcagatttgcaattggcatctgaagtggagacagtcttttgggactcagccctttaacttgtgagatccaatgctcactctgggcaggtagtgtcagaaatgaattgagttctaggctacccaagtggtttctgcagaggattggagaattgcttggtgtagaaaaaagccccacgcatttgctattgtgttaagcatagagaagaacggtttgttttccttttagtcccagttctatccactattaatagctgataatctggaatatataattgtatgatctttttgaagctcagttttcccacctctaaaatggggataataatacctgcaaaactagctcaaaatgtggcattcagyaaaccagtgaatgaatactgaaggcatgggggaggtgggcctccaaggggcggctcttcacctatcagcagggacatgttttaatattttaataattggtacgttgcaacctggtatggttgtccagttgagcaactggctctgataggcagcatgggatactgctgtgattctaattaacatggttaacttggtacaagcattcaattcagtgtccattccactacctccatccccttccacatatttt

SEQ ID NO: 715262 - DNA, 635 bp, Homo sapiens
tgggtcagaactgcaggtgacaacctcagatttgcaattggcatctgaagtggagacagtcttttgggactcagccctttaacttgtgagatccaatgctcactctgggcaggtagtgtcagaaatgaattgagttctaggctacccaagtggtttctgcagaggattggagaattgcttggtgtagaaaaaagccccacgcatttgctattgtgttaagcatagagaagaacggtttgttttccttttagtcccagttctatccactattaatagctgataatctggaatatataattgtatgatctttttgaagctcagttttcccacctctaaaatggggataataatacctgcaaaactagctcaaaatgtggcattcagcaaaccagtgaatgaatactgaaggcatgggggaggtgggcctccaaggggyggctcttcacctatcagcagggacatgttttaatattttaataattggtacgttgcaacctggtatggttgtccagttgagcaactggctctgataggcagcatgggatactgctgtgattctaattaacatggttaacttggtacaagcattcaattcagtgtccattccactacctccatccccttccacatatttt

SEQ ID NO: 715263 - DNA, 1442 bp, Homo sapiens
ctatccagagtgagacaagaataaattcattagctataattttatattctaaagactgtttacacatacaattggtaataattgattatagaaacctaacttagaagagcctggggagctaagccttatcaacaggctatacttaaagaaacrtggtgctaggtaaggcatcaccttccccacatattacctgaactttccttattcttgatggagcagtggcagccacatagggtcccatcctcaaaagacccttcaatctcctaatattttatatatatttccttcatatagggtcctatataagggggaaaaaacttcagctctcttggacacaggacaacagatgacacagcacctccccacctcaaaaaaagcaaacctcaacccagttattcctttaaaaagatgtcagttagtgagcaactctggagagaaagccataccactgaggcagagaagtattttaaaaacatttgttttgtacaactcagcatttacaccagggagctgatgcatctctgagcaaatctataaaactacctaaatcaagtattacagcaatatgctgtatctagatgtatattttaaattttattagtatttcccattatgaaaaaacccatccccttgaaagtaaatctccaccaatctctatcattaataagaatgtcaaacaagtctgttacttcaactgtaaaatgggaaggctggagtttgtcactgtttttaaagctcaagggagaaaagccactaaccattacttttttaaaaagttatagcttcccatgtcaccctcctgcatgctgcccaaaacatatggagaatataaggtgattgttgaaaatatgttgccaaaataaataaataacctccccaagtattcttccctttttccctaataagttagaaaactactggacgatataattgccaaatacatcccaggcccaagaggacatactataattttcagttgtgttcattaccctcagacaagatggtatgcatttggtattctccagaaacaaggaataaaggatctgatgctaaattataaagttattaataaaatatataggaatagatacaatgaaacacattacttaagaatttaatatatgttagaggatgcatcattaaacaacaagttaaagagaactgttatttaatgctagggaaaaagatgatcaaatctgtggggaaaaggagtttaaaagcttcatctcattctgtatattcaaataacagagctgaaataaagtattaagagtgaaaccacagatagcctagaagaaactagaattatttaccaaccctttggaggaaggactttcctaacttaagtaacagaagaaagaagaaaaaaaatcaacatatttgacaacaaaatttaaagagaaatggctaagaaatgttgcaataaattgtagttaatatgt

SEQ ID NO: 715264 - DNA, 992 bp, Homo sapiens
tgggcacatcttccaatacacagactgacccctgtcccctttatgtaaataaagaaagaaatctttgatgaccaggaaataatctgaaaggcaattgttcatgttctcatttgtaaaaagacttttaaggggttgggtgtggtggcacatgcctgtgatgctagcactttgggaggctgaggcaggaggattagaagcccaggtgttcaaaaccagcctgggcaacacagtgagaccctgtctctaccaaccaaaaaaaaaaaaaaaaacaaaaataaaaacataaaatatcttatttaaaaaataagtcttaaatattatttcactttaactcaaccctcatgcagtcaaagcaaaacaaaacagaaaatttgctaacctttaaacccaggacaggatcttttacaagggyagcccttgcaacctcctgggagaaagttcattctctgggtttcagctatagcagcctctctcccttgcttcttacttagttctaagttcctggatcagtgtggcatgctggacccattgtcctcgcggtgtggaatcagaagcaagctgtaaaagcgtgttccttctggttgttctggttgctttggaggctttccatcttcatcaccttctgaactggcctgaagctttacaatggctccttggtgaggggttgcctattaatcaccccatctctgctcttactcactggcagagcactgattatgttcaggcataacaacccccacccccattctcctccatctaaggataatggcaatctctccctcctggccaagtgatccacttaaacaggtgtttgtgacttgttccacagttaagtaagtgggtcaagagagtggcagaaaggcctgcaggtttttccttgcccttaaaatgagacttatgaaaagagatactttttgtatctgcatactttttgcatttgcattttgcatggcatgatagcagccaccttgcaactacctttaagccagctg

SEQ ID NO: 715265 - DNA, 1118 bp, Homo sapiens
tagtaataataataaaacttcaaaaggtacactattctctcttctcataacaaagacaaaatattttaggctttgggagccataaggtctctatcccaaagatttaactcttgctgcagcctgaaagcagccaaagacaatatggaaacaaatgttatttcaataaaactttgtttacaagaacaggttacaggccacatttaccaaackctgctttatttttaaaaatttatatttcttttatatatatatgtgtgtatgtgtgtgtatatatatatatacacatatatgtgtatatatatatatatacacacacatacacacacacaaattttaatttttttttttaagagacaggattgtactatgttgcccaggctggtcttgaactcctacgttcaagcgatccacttgccttggcctcccagagtactgggattacaggtgtgaaccgccgcacctggccttacactgcttcttgatgaaatatttagtcagtgactaaaatacgtacctcaagttgtttctgcaagaataatgtttctcttcagatcacaaaacaaggaaaagcacaaactttaaattcctgaacgcggaattaaatataattcttaatctaatttatatatattccacttttcttctcaaccaaaatattctaacatcttttacctagtcacacaactgctttccccaattcctgctagttccgtggacttccgaaacatgttcttatctagtgtgagtacctttaattaaggttaaaaaaaaaaaaaaagacatctctccccaagataacctgccaaaaaaaaaatccatactgagaaaaagctattcaaaaacacttaaattactttgggaaatccctgttataagccacaattcctggtatcaggtgcttccagattagtaagaaagtcctatattctaacactgatcattagaatatattccatagtaaaaaatgctaaccagcataagaattaaattggagtcatgcaaacacaatataatgaaattcacaatcttaataaagtgcaatgtactttgacataaaaagtgtacatattcttactccttcttttaagtcctgcgctcaattcagtgtttttgactga

SEQ ID NO: 715266 - DNA, 1118 bp, Homo sapiens
tagtaataataataaaacttcaaaaggtacactattctctcttctcataacaaagacaaaatattttaggctttgggagccataaggtctctatcccaaagatttaactcttgctgcagcctgaaagcagccaaagacaatatggaaacaaatgttatttcaataaaactttgtttacaagaacaggttacaggccacatttaccaaacgctgctttatttttaaaaatttatatttcttttatatatatatgtgtgtatgtgtgtgtatatatatatatacacatatatgtgtatatatatatatatacacacacatacacacacacaaattttaatttttttttttaagagacaggattgtactatgttgcccaggctggtcttgaactcctacgttcaagcgatccacttgccttggcctcccagagtactgggattacaggtgtgaaccgccgcacctggccttacactgcttcttgatgaaatatttagtcagtgactaaaatacgtacctcaagttgtttctgcaagaataatgtttctcttcagatcacaaaacaaggaaaagcacaaactttaaattcctgaacgcggaattaaatataattcttaatctaatttatatatattccacttttcttctcaaccaaaatattctaacatcttttacctagtcacacaactgctttccccaattcctgctagttccgtggacttccgaaacatgttcttatctagtgtgagtacctttaattaaggttaaaaaaaaaaaaaaagacatctctccccaagataacctgccaaaaaaaaaatccatactgagaaaaagctattcaaaaacacttaaattactttgggaaatccctgttayaagccacaattcctggtatcaggtgcttccagattagtaagaaagtcctatattctaacactgatcattagaatatattccatagtaaaaaatgctaaccagcataagaattaaattggagtcatgcaaacacaatataatgaaattcacaatcttaataaagtgcaatgtactttgacataaaaagtgtacatattcttactccttcttttaagtcctgcgctcaattcagtgtttttgactga

SEQ ID NO: 715267 - DNA, 1118 bp, Homo sapiens
tagtaataataataaaacttcaaaaggtacactattctctcttctcataacaaagacaaaatattttaggctttgggagccataaggtctctatcccaaagatttaactcttgctgcagcctgaaagcagccaaagacaatatggaaacaaatgttatttcaataaaactttgtttacaagaacaggttacaggccacatttaccaaacgctgctttatttttaaaaatttatatttcttttatatatatatgtgtgtatgtgtgtgtatatatatatatacacatatatgtgtatatatatatatatacacacacatacacacacacaaattttaatttttttttttaagagacaggattgtactatgttgcccaggctggtcttgaactcctacgttcaagcgatccacttgccttggcctcccagagtactgggattacaggtgtgaaccgccgcacctggccttacactgcttcttgatgaaatatttagtcagtgactaaaatacgtacctcaagttgtttctgcaagaataatgtttctcttcagatcacaaaacaaggaaaagcacaaactttaaattcctgaacgcggaattaaatataattcttaatctaatttatatatattccacttttcttctcaaccaaaatattctaacatcttttacctagtcacacaactgctttccccaattcctgctagttccgtggacttccgaaacatgttcttatctagtgtgagtacctttaattaaggttaaaaaaaaaaaaaaagacatctctccccaagataacctgccaaaaaaaaaatccatactgagaaaaagctattcaaaaacacttaaattactttgggaaatccctgttataagccacaattcctggtatcaggtgcttccagatkagtaagaaagtcctatattctaacactgatcattagaatatattccatagtaaaaaatgctaaccagcataagaattaaattggagtcatgcaaacacaatataatgaaattcacaatcttaataaagtgcaatgtactttgacataaaaagtgtacatattcttactccttcttttaagtcctgcgctcaattcagtgtttttgactga

SEQ ID NO: 715268 - DNA, 576 bp, Homo sapiens
tatctggtatgctatcttctggcttagcctcatcttcctaaacaaagggaacaaggtgcaaatagcatggcaagayagcgctgggattctctcctgcttccctaggagtcaccctcacctggctttttcctggtctgtgggtgccaaggtcatcttaattacccctcaaaactagaaagaaagacagttacacttgatcgaaaaaaaaggaaacaaatgtaccagaagaactataccaaaaacaatgtagctgttcttagagaaaagttactggtgaagcagaaaaatctgtccttatatagcaatgactggtgagctccaaattttgatgtaaattagattctaaggttttttaaaaaaaggtttcactacctcaaaatgtagaatgaagcaagatgtatgaattaaagtaaaccaggcttcctggaataatagaaatggcatattatgctacaatagcttattataccctgaaggcccctatcatgttttacagtcgcatgcatgctgtaattttttcaagtttccatgaatattaaatttcaatagaaagatggtttttaagaatcttttttt

SEQ ID NO: 715269 - DNA, 576 bp, Homo sapiens
tatctggtatgctatcttctggcttagcctcatcttcctaaacaaagggaacaaggtgcaaatagcatggcaagatagcrctgggattctctcctgcttccctaggagtcaccctcacctggctttttcctggtctgtgggtgccaaggtcatcttaattacccctcaaaactagaaagaaagacagttacacttgatcgaaaaaaaaggaaacaaatgtaccagaagaactataccaaaaacaatgtagctgttcttagagaaaagttactggtgaagcagaaaaatctgtccttatatagcaatgactggtgagctccaaattttgatgtaaattagattctaaggttttttaaaaaaaggtttcactacctcaaaatgtagaatgaagcaagatgtatgaattaaagtaaaccaggcttcctggaataatagaaatggcatattatgctacaatagcttattataccctgaaggcccctatcatgttttacagtcgcatgcatgctgtaattttttcaagtttccatgaatattaaatttcaatagaaagatggtttttaagaatcttttttt

SEQ ID NO: 715270 - DNA, 1137 bp, Homo sapiens
ttctgtgatctccagtgtccactgctcaagcattgcacattatgaatttttttctaacatagtctttttatgttgtccaggctggcctcaaactccttggctcaagtgatcctcctgcctcagcctcctgagtatctgcraccacaggcacatgccaccatgcccagatcttcataaatttttaaagacctcgaaagatatctactgtagaagactcttagtttttttaaaaaatttttttaattaaaattattgaagtgaatagtatacactctgagttaacttgatgtagtataaccattgtgatagtatttctaaaatatgctatggaatatgttggctaattaagtcttacttattatttacctgtggcaatggcaatttatttggatttgtgagaaaaaaaatttacagtgtatgaaagttctaacatatgctaagactactcctgctccttcttaaccacaaaaatttaatgtaaggtgtttcaatgggaattccaccagcctcctccagctaaatgtttttcttctaaaacactgttttagggaagtttccattaagatgggttgaggtagaattaggattaaaataataaaccaaaaaaactttatgcagaaaaagtgaaagctaagggaagtccagggtatgtcaatgattgccgaataaaagaagaacggaaatgtgatatgaatgtgtaacttttagcatgtattcccctaaaccattcctaccgtctgctatattcattatcaactccaaagtggggaaaaaagaagtaaaaggttttgttgtcttgctctactagctgcgtttttaaaatagttggcttgtcctcgctagttggaggtgtccaaaatatcatagaattggatgaaagaaatgaatatttgaaccctaaagcaattcacattcctgaattgtgtgtgtgtgtgtgtgtgtgtgtgtgtgtgtgtgtatgtgagagagagagagagggtactaagacaaaaattaagtatgtttatttaattaatctagtaaatagtaaaattatccaaagatactgaataaaaaggcacaggcacaggaaaaacaaaggaattgtattatctaacccacaattaccaaactgagtagtctttttttaattcttta

SEQ ID NO: 715271 - DNA, 1137 bp, Homo sapiens
ttctgtgatctccagtgtccactgctcaagcattgcacattatgaatttttttctaacatagtctttttatgttgtccaggctggcctcaaactccttggctcaagtgatcctcctgcctcagcctcctgagtatctgcaaccacaggcacatgccaccatgcccagatcttcataaatttttaaagacctcgaaagatatctactgtagaagactcttagtttttttaaaaaatttttttaattaaaattattgaagtgaatagtatacactctgagttaacttgatgtagtataaccattgtgatagtatttctaaaatatgctatggaatatgttggctaattaagtcttmcttattatttacctgtggcaatggcaatttatttggatttgtgagaaaaaaaatttacagtgtatgaaagttctaacatatgctaagactactcctgctccttcttaaccacaaaaatttaatgtaaggtgtttcaatgggaattccaccagcctcctccagctaaatgtttttcttctaaaacactgttttagggaagtttccattaagatgggttgaggtagaattaggattaaaataataaaccaaaaaaactttatgcagaaaaagtgaaagctaagggaagtccagggtatgtcaatgattgccgaataaaagaagaacggaaatgtgatatgaatgtgtaacttttagcatgtattcccctaaaccattcctaccgtctgctatattcattatcaactccaaagtggggaaaaaagaagtaaaaggttttgttgtcttgctctactagctgcgtttttaaaatagttggcttgtcctcgctagttggaggtgtccaaaatatcatagaattggatgaaagaaatgaatatttgaaccctaaagcaattcacattcctgaattgtgtgtgtgtgtgtgtgtgtgtgtgtgtgtgtgtgtatgtgagagagagagagagggtactaagacaaaaattaagtatgtttatttaattaatctagtaaatagtaaaattatccaaagatactgaataaaaaggcacaggcacaggaaaaacaaaggaattgtattatctaacccacaattaccaaactgagtagtctttttttaattcttta

SEQ ID NO: 715272 - DNA, 628 bp, Homo sapiens
tgcttctttgaatattctctatcaaaacccagtaaagtgtctgagagcttgtactaccctagagactgggaattgcacactaaaatcatatcccagcatattaaataaaaggccagttccagccccaccccaacaatacagatctttggaattacaactaggccttaatcaatcaaaagaaaacttaattattgaattaagaaattttctctataatcgtgagacatttgaaaactggcacatgagacacattcaaactgtattgaggggcagaggtagtttactaaaaaytgtaattcagagaaattttttctttactaggactttttaaaaattgcatgtttctatgacagaacttcacaaaagcggatatttatacaggccacccctccgagaagagtgatgttttcttcctaagaaagtaaactgctagtggttacttaattctagtggtgtattaattagagaaccgtctatactgctgtgacaaggagtattaaacagttgctcgagcaggtcaaagttttatttctttcttggggtataagtcagagcaggtgggtgatccaggtatcattctgagaagggatttctcctgtttttttgacctctcattcctctcatgctg

SEQ ID NO: 715273 - DNA, 628 bp, Homo sapiens
tgcttctttgaatattctctatcaaaacccagtaaagtgtctgagagcttgtactaccctagagactgggaattgcacactaaaatcatatcccagcatattaaataaaaggccagttccagccccaccccaacaatacagatctttggaattacaactaggccttaatcaatcaaaagaaaacttaattattgaattaagaaattttctctataatcgtgagacatttgaaaactggcacatgagacacattcaaactgtattgaggggcagaggtagtttactaaaaactgtaattcagagaaattttttctttactaggactttttaaaaattgcatgtttctatgacagaacttcacaaaagcggatatttatacaggccacccctccgagaagagtgatgttttcttcctaagaaagtaaactgctagtggttacttaattctagtggygtattaattagagaaccgtctatactgctgtgacaaggagtattaaacagttgctcgagcaggtcaaagttttatttctttcttggggtataagtcagagcaggtgggtgatccaggtatcattctgagaagggatttctcctgtttttttgacctctcattcctctcatgctg

SEQ ID NO: 715274 - DNA, 590 bp, Homo sapiens
attcgtaagatgcttaagaatatccttcttttttttattttttatatttttgagacagggtctccctctgttgcccaggctgaagttcagtggcacgattatagctcactcacagtctcgacctcctgggctcaagcaatcttcctgcctcagtctgccgagtagtgagactacaagcatataccaccatgcccggctaattttttaaaaaacttttttttttagagacagggtcttcctatgttgtccaggccggtcacaaactcgtggctcaagtgattgtcctgctttggcctccygaagtgctgggatgacagccatcagctaccatgccctcccagaacattcttgatgaagcacgggaagttgaaaaaataagtcccagcctagccccagtgtttctgaccaaccactccagggtaggctctttctattaggcagttatcgtcccttcagttgactcccctgtgagccaatatgtgaagtcagagctcttacaatgttttctccaagccactgagttgccaacttctgtgcgtcctcacacagggggctgtgagggagatctgagaggctgagcgatagaccac

SEQ ID NO: 715275 - DNA, 3116 bp, Homo sapiens
tgccactcttttcatcatttaccagtgggcaatgtcaagtgagagactccacagataagaaaaataaaggagtggctcaattacatgccagggaaaaccgctttggtggatgaaggtcrcacagctctcccagcattctgtcctctgtatacagatgatctccttctgaaatccttttggggatgacccccttccacaccatggacacttctgggtgggttgtcactcaagaggtcctgccctcttctgcccactgggtggacacaagaattgaaatctgtaaaggatactgagattgggaacaaaataattgatgctgattgatcccagcagtgtatggcgagaagatgacaagcttccactgcctgtatcactgacttgcctaatgtctgccctgccctggcctggatcttaaccgcgcccttcattctgtgaactacccccaaatccttcaaataaagtccttgattgcttgttagagtcaataatattgcttgctgaggatccagagacctctagagagaggaggtggaattgcacaccctgggaaagaggaaggtgtgagttaccatccctgggggaggccccacaggtgtcagccctcagggggcaggggactgacaggggacagagctgacagcaggggtcatatacaagagttgggttgggggcctaaggaaacttccccaaaggtgagaaccatgttgggataaaggacagaggaggacctatatgatatggagagaagtgaaatacagctaagtggggtcctcacctctaaagaggccaggggccgggcacatctgtaatcccagcactttggggagccgaggtggacagatcacttgaggtcaggagttcaagaccagcctggccaacatggtgaaaccccgactcttactaaaaatacaaaaattagctgggcatggtggcgcaagtctgtaattgcagctacttgggaggctgaggcagagaatcgcttgaaccaaggagacagaggttgcaatgagccgagactgcgccactgcactccaacctgggtgagagagcaagactccatctaaataaataaataaatggggcagaaaacaggttatgccaattacaggttgttgtagattcccagtccctcctcctcatgccggatagctgggggatcgacactgcagccgcggtgaggccacggcaggtcaggaatgaccacacggacatccatcttgttgtccaccactgacaatgagacggatgaccaggctcccgagtgccgagtgccgtagtgctctgcggccaggaaatggccaggggccagggaccctccttatctggaatcctcccactcggccctggggtggccacttgtgccgagacagcccaaggttgggggcgtggcatcaggcctccccaaggcctttactgctgcagagccacagccctcaagaaacaaggcccctggaagattccttccctaagcagaagctgctggaggccattttaaggcaatatgtgagctggcgtgtcgcctgcaactgagttcagaggtgctaaaggatcctgagtggggctgggggtttgctgtggaggttcaggaagaaaggctgggtttacgggtccaggaacaattactgcaggtttgtgaggccaaccgagcccccactaggtgacagccagacagcagtgggagaagggacgatggcgacgagcaaaacggcacggctgaataatacctgtgaccacgggagctcctgcccctgatgctatcctgaccctccccatcccacccagctgcaaagcagttgttgctctgccacctgctgccagcatgcgggtgggaatgcgtgtgcagctcaagggtggcatcgtgtggtcatagtggggtagtgcacctcacagcttccaaagagcttcattctgcggagtcactcaaggaattttgagtctatgtgccagactctgttctaggactgcaagatctttcctaacagaatcagagtttttgtgaggagcagtcttgaggggtgcagagcctgagaggggaaggggagaagagaaggagagaaggagagaaggaggggaggtgggagggggagggttgctagagccccttggtgagcgtgtctacagccagactgctctagggcacctttcaaagtggcttctgggtccacatctcaggcatttgacgacttaaccctttgcatgagcctcgcaaattgcaactcaaatccctgccaccctagagaacctattccctccagagggagagggactcaggagaggcactattccaaaaaggctcctgttcccaatgttaaaggaaagaacccagacttcagaatcaatccgatctggattcaaatctcaggttgtccctgcgccagctatgtggcctcaggaaagtccttagccctctctgtgcctcggtgtcctcatctgtaaaacagggaaaatcatgcccctctgacagggcggtgggttctagtcagtgaaataatgtcaggacaatggatggtccccaccataaaaagcaaggcccccgattctgtgtccaggggtatcagctctggggggcatctgcttggctgctcatgagtggctgtctttccacagctgtgtggatgtgtctggcatttagcagtcggttgtctgaaatcagccatggagttttgccccctgctttattgctcccaagcaggttcctcacctgccgagcgcctgcggctgtgtgccaaaggctgagtgcgccacagcgaggagcagctgccagacctggagtgagcagagggagaaactggacttcagaataatcagagctggatgctaatctcaggtcccacctgcactagctgtgtggtctcgggagagtcttacgggtgggaaggaccagggccttgtgggctgagaggcttggggaagccagggggagccaggtcccctcactgctctcgaagaaccggcagtggtgttggaactcccagagctggagaggctcaggccgggaagggctgtcctgacctgcgggccatcatggcctttcggggagggagggaggagatgaagaggtggcacagaattgacaaaggaaaggcaggaatgaaaaggaaggtgggggaatgtgg

SEQ ID NO: 715276 - DNA, 3116 bp, Homo sapiens
tgccactcttttcatcatttaccagtgggcaatgtcaagtgagagactccacagataagaaaaataaaggagtggctcaattacatgccagggaaaaccgctttggtggatgaaggtcacacagctctcccagcattctgtcctctgtatacagatgatctccttctgaaatccttttggggatgacccccttccacaccatggacacttctgggtgggttgtcactcaagaggtcctgccctcttctgcccactgggtggacacaagaattgaaatctgtaaaggatactgagattgggaacaaaataattgatgctgattgatcccagcagtgtatggcgagaagatgacaagcttccactgcctgtatcactgacttgcctaatgtctgccctgccctggcctggatcttaaccgcgccsttcattctgtgaactacccccaaatccttcaaataaagtccttgattgcttgttagagtcaataatattgcttgctgaggatccagagacctctagagagaggaggtggaattgcacaccctgggaaagaggaaggtgtgagttaccatccctgggggaggccccacaggtgtcagccctcagggggcaggggactgacaggggacagagctgacagcaggggtcatatacaagagttgggttgggggcctaaggaaacttccccaaaggtgagaaccatgttgggataaaggacagaggaggacctatatgatatggagagaagtgaaatacagctaagtggggtcctcacctctaaagaggccaggggccgggcacatctgtaatcccagcactttggggagccgaggtggacagatcacttgaggtcaggagttcaagaccagcctggccaacatggtgaaaccccgactcttactaaaaatacaaaaattagctgggcatggtggcgcaagtctgtaattgcagctacttgggaggctgaggcagagaatcgcttgaaccaaggagacagaggttgcaatgagccgagactgcgccactgcactccaacctgggtgagagagcaagactccatctaaataaataaataaatggggcagaaaacaggttatgccaattacaggttgttgtagattcccagtccctcctcctcatgccggatagctgggggatcgacactgcagccgcggtgaggccacggcaggtcaggaatgaccacacggacatccatcttgttgtccaccactgacaatgagacggatgaccaggctcccgagtgccgagtgccgtagtgctctgcggccaggaaatggccaggggccagggaccctccttatctggaatcctcccactcggccctggggtggccacttgtgccgagacagcccaaggttgggggcgtggcatcaggcctccccaaggcctttactgctgcagagccacagccctcaagaaacaaggcccctggaagattccttccctaagcagaagctgctggaggccattttaaggcaatatgtgagctggcgtgtcgcctgcaactgagttcagaggtgctaaaggatcctgagtggggctgggggtttgctgtggaggttcaggaagaaaggctgggtttacgggtccaggaacaattactgcaggtttgtgaggccaaccgagcccccactaggtgacagccagacagcagtgggagaagggacgatggcgacgagcaaaacggcacggctgaataatacctgtgaccacgggagctcctgcccctgatgctatcctgaccctccccatcccacccagctgcaaagcagttgttgctctgccacctgctgccagcatgcgggtgggaatgcgtgtgcagctcaagggtggcatcgtgtggtcatagtggggtagtgcacctcacagcttccaaagagcttcattctgcggagtcactcaaggaattttgagtctatgtgccagactctgttctaggactgcaagatctttcctaacagaatcagagtttttgtgaggagcagtcttgaggggtgcagagcctgagaggggaaggggagaagagaaggagagaaggagagaaggaggggaggtgggagggggagggttgctagagccccttggtgagcgtgtctacagccagactgctctagggcacctttcaaagtggcttctgggtccacatctcaggcatttgacgacttaaccctttgcatgagcctcgcaaattgcaactcaaatccctgccaccctagagaacctattccctccagagggagagggactcaggagaggcactattccaaaaaggctcctgttcccaatgttaaaggaaagaacccagacttcagaatcaatccgatctggattcaaatctcaggttgtccctgcgccagctatgtggcctcaggaaagtccttagccctctctgtgcctcggtgtcctcatctgtaaaacagggaaaatcatgcccctctgacagggcggtgggttctagtcagtgaaataatgtcaggacaatggatggtccccaccataaaaagcaaggcccccgattctgtgtccaggggtatcagctctggggggcatctgcttggctgctcatgagtggctgtctttccacagctgtgtggatgtgtctggcatttagcagtcggttgtctgaaatcagccatggagttttgccccctgctttattgctcccaagcaggttcctcacctgccgagcgcctgcggctgtgtgccaaaggctgagtgcgccacagcgaggagcagctgccagacctggagtgagcagagggagaaactggacttcagaataatcagagctggatgctaatctcaggtcccacctgcactagctgtgtggtctcgggagagtcttacgggtgggaaggaccagggccttgtgggctgagaggcttggggaagccagggggagccaggtcccctcactgctctcgaagaaccggcagtggtgttggaactcccagagctggagaggctcaggccgggaagggctgtcctgacctgcgggccatcatggcctttcggggagggagggaggagatgaagaggtggcacagaattgacaaaggaaaggcaggaatgaaaaggaaggtgggggaatgtgg

SEQ ID NO: 715277 - DNA, 710 bp, Homo sapiens
tttttaattaatccagataaaattatgagaagggtatatttgccaaatataaaaatgaatgataacagtataaagacaattagtcaaacagactgagaagccaaaaatgaaattacatctaatacttttgttaatgcaaaagaacaaatggtatcatatttggaaggttttcttttgtaaaattgcttaatcaagagcctgaggcttcagtactgttggacagtaaagttagactgctcccctccctaacatccatttgtatcgtagcttagatctttagctaattctgttaaatattgattttcaaccactgatttacacaggagacctggaagtgaagctatttttaatactctcctttcattcctccaggagtcaggccatggctcaaggactccatggagatatacatgtgtagaaatacatgtccagtggaatagttgttggatggaagtgagatttcaggaaaatagtaatggactcctaagaaggagcacacattacggggtaaggagtagggaccaatgaattaaaaatagccctccaggatgaggaaggtagaggagtataggctctgagcctaccatgtggcttaaagagaaccccataattctgtcaccctggagtatcagatgtgcctttggaaaaaaaggtgtgtgtgcgwgtgtgtgtgcacacacgcatgatctggagagcagtgtcactaaaaa

SEQ ID NO: 715278 - DNA, 1444 bp, Homo sapiens
ggaacactgtcttctcacatgcagaaggcaggagggcaagaaggctgaatgctgtatgaagcttcttttgtaagggttttaaccctattcatgagagagggtcctcatggcctacacacctcttraagacctcccctcttaatgttatcccattggccattaagttttaacatctgaattttggaggggatgcattcaaaccatagcagctgctaaggcccgttgttttccagaagcttggctacggagctgggggaatacctggtgtgggagaaagatggagccaaaaatgtataccactaacagggtgtaaaaaagttttgcacatggacattaattaatgaaaagatatgccctcaatcctcaatttctcattatccaaaatgaataatttcctaaatatatctaatagttaccagtcatgggtatgaatattgcaaatagatgttccattgataaactacattttgtagtgattgataatttatttatatcatttttatgatacttagtctggaactaaaaataaattttagtattatatttatttttaagtaaacaccctgcaagcataaaaaatactttaaagacatgagtagcactatggttaaggaaatagaattctatatttacctcatcattatgaaacttctgagtcttactttctacattagtgaaattggacaatgactgtcctatcaggggatgttacggagatgaaaaaggttttaaatgcaaaaatatttgaaaacgtttcaaagtatacaaaataaaagtaatggtggtaatgatatgataaagagtcaatcatcttattttgggaatcaaattcaaagctaaatacttctgttaaattaaatttggcctaaatctgccttcccactttgagtcctcccatggcaaactacaacctaactcagtgtgtaaacaaacttcagcctaactgaagagttgattcctgtaacaaacaggtgagtcttggccaatcacagatcacagattgtcagctgatcagaccatgtcaatatagggtaaatgctttaccacaccatccctaagtaaggcaaattccaagctgtaaccaaccatgctgtttctgtagaacatttcttttctattaatactgcccctgcccccatgttgctgggtggagctcccagtacctttcctagttctgattactgtccaattcatgaatcattctttgctcaaataaacacgctaaatttaatttataaaaaaattttcttttaacacttcatttttttaaattttgaggttcagggttatatgtccaagtttattatataggtaaactgtgtgtcacaggcatttggtgagcagataattttgtcacccaggtaataagtatagtacctgataggtatttttttctgatcctcttcttcctcccattcttcacactcaagtaggccccagtata

SEQ ID NO: 715279 - DNA, 608 bp, Homo sapiens
tatctgctgcttttgaaaactaactttacagaaaasaaaaaaacaaatttataggaaagcaattcctgttgcataaaaacatttatcttggtgattagccatacattgtaaaatcgctgggctatagagtcagcctttcttattctgtgttataagaattgtccagtgcagaaattaataggttttggggtaggtattttttccagcgtctctcttttttgtgtggtgcaaacctaatgatctgtgtgccctttactaaaaagatcaagtgtcaggacaacgtgctgccctgcattttagggctggcaccatcatggtagacagttgcatgggaatggtatcatgtgagggagttgactatcccctgcttcgaagtagttctggagattcctgaaagctccacatagatgaatcttttgattatactgatcttttcagaagatcttacttcttggtacttagtcacactggtggtgcaaggaggacaaaggtgtcagaccgccgaagttaatccttggcttcacccttcacttgttctactaagttgagtgagtactagcccctcctcccttcagattcaatactcatagcatcatttataaatgtgg

SEQ ID NO: 715280 - DNA, 608 bp, Homo sapiens
tatctgctgcttttgaaaactaactttacagaaaagaaaaaaacaaatttataggaaagcaattcctgttgcataaaaacatttatcttggtgattagccatacattgtaaaatcgctgggctatagagtcagcctttcttattctgtgttataagaattgtccagtgcagaaattaataggttttggggtaggtattttttccagcgtctctcttttttgtgtggtgcaaacctaatgatctgtgtgccctttactaaaaagatcaagtgtcaggacaacgtgctgccctgcattttagggctggcaccatcatggtagacagttgcatgggaatggtatcatgtgagggagttgactatcccctgcttcgaagtagttctggagattcctgaaagctccacatagatgaatcttttgattatactgatcttttcagaagatcttacttcttggtacttagtcacactggtggtgcaaggaggacaaaggtgtcagaccgccgaagttaatccttggcttcacccttcacttgytctactaagttgagtgagtactagcccctcctcccttcagattcaatactcatagcatcatttataaatgtgg

SEQ ID NO: 715281 - DNA, 1445 bp, Homo sapiens
tcaagattagactctaaactttccaacaaccctattgtcctgttacttgtttcagggctcaaaacattgttgaggctgtggcatgttttgtgctatataatctgctcctattccctgagatttctcttgtgaaaaactgtccatggctttgttcttgggcatgctgagccacaatgtggaactttcccataatttactatgccagtcactgcagcccttctgagaggctggagagaactctgtttctttttctgttgttttttttttctactgatattttgttaaaaatgtaggtagactttcccatcttaaactgatagcaaaaagaagaggcaaataacagaaggaactatcaaccactgttgttgtttccattcatgcttattctttatgaaatgtttctgtgcatggagggaaaaaggctctgagaatacagctagaacccaccgtgcccacggagacactggctgtttcctggcattctctttggtggtgggaagcatcttttcccagattcacctatggtgacacagactcaagtttgaaagcatcagcactgtttctgtcccaacacctgcctttttcgggaatcacacatattgttagtgttgagataacacattttgaacctttatttttattttctgtgtgcttttattgcccagaaagtgtgtgtgtgcgtgtctgtctgtctgtctacggtgaggggaggtgggaagagggagagggcarggaaggagaaggaagcaaagcaaagctttgaagttagtgcaaaactaatattttgggtaaaaagcttttcctttgccagagcaaatatttgattgcttcaattcttctaaaatagtctattttcttcttgtttcagcatctagtaaattttgggcagtcctgtttagcaaaagagaatgaatccaatcagcatgtctcagaaggtacagcaatagggttggaggaaaaataatgtatgagaaaagtgaactgcagtgtgcttttaactcatttataacagttaatcaaactaaatatctgactggcaaattaaccactttgaagatattttgtcacgagagtgatggtggcgaaaggtacaggtgataccttgtatgtgccaatcagccatttatcttactggccagccagaaaatggctttcattagttacatagctttatggaactaaactcatttctttgaggtgtgatggcacaataaagagaatattaccatgtgactgaggccaatcttctgttttgcccaataggccactttccgagtgatagcattttcaaaatttgaggtttgtagggccagtcgctgaggccgatgactgcaggcaggtcccttttcctttgtttgggtcagtggccccaaggtgagctgtgctgctctggttcttgtttggtgtatacacgatggcatcctctgttcaggtctaaggtttca

SEQ ID NO: 715282 - DNA, 1620 bp, Homo sapiens
ttccagactttgtccatatttcatttttacctgttgttgtcatgttccttttttcagcaataatgagaagtcctgggccttctgtcctgggtcgtatctaattcatcttttcatctcagccattgtttgacagaaatgaaatcttcaatcaaaatttgatgaatgtttgaatgatgatgaatcttgtggcacaagaacctactttcctttcttcctatcagggcaccagtggccctgcagctgcaggtgccacctccagccaagctgttcttctgggtacccctgggagttcctggtgggctcaagtaaggtaagacagagaagaaaaaaatgacatgggagaaaaagaagaagaaaggaggagatagagaaacaggaaagagagcagagaggaagaaattgtggagtggagggctgccctgttccccacctcagggacataagtaagctgcctgtacaggttcacagaaaaatggatttgattccagagaccttcctcattgtgtatatttgcactatcatgttgtgtagtttttaagaacccataaaaaaagcaaaacctcgtgggyctgtaatgatctctacagaatgtcagataaaaagatgagttcaattctactatatttaaaaagccagcaggatgcaatggttcacacctgtattcccaacactttgagagttcacttgagcccaggagttcaaggctgctgtgagccatgatttcaccactgcactccagtgcagatgacagagagagaccttcttatctcttaaacaacaaaaaagccatcaacataaatgttaacagtgtgctgtggtccataccatcctctctctctctctctgagatgtctctacattccagtggagagggaatatgaaatctattgtcagctaggcctgggactggtcttccccagaggcaggatggctattttggcataatttagacattgacagaaagctgatttggccccctgaatatctagagttttctctctagtctgatattatgccaattatggtatactatgacaagttcttttgggtctcagagtcacctgctagtacatggaggaacatattaagcctctgtcagcccatctcatcacacctagtgcctgggtgtatgccggcgggtcctatagaataggtatcagcccatctcatcacacctagtgcctgggtgtatgccggcgggtcctatagaataggtatagaacagggttttggtttttgtttattttatgaggggctctggagcaggagagccagagcatggggggaggctatcaaggacagctcagtgccatagggtgagaaagcctacgccaccaagtgatgctgtgtgtctcctgaagtcataagcgataaggtttatggggaaacagaggaaatcactcaactaaatatcatcttcaatttcccctaatttctgaagtttgggaaatgctgagacccatgacttttcaaattatgcatggtctttttaagttaaaaaagagaagtgggtcaatgaattagaagggaaaaataagacagtcttctcccttcttttatgtggcaggcaggggtggcagggagttacttctgtaactcgaaaggcttctgagtttttaa

SEQ ID NO: 715283 - DNA, 1119 bp, Homo sapiens
tggctttctttccttgttgttttcaaggaatcaaactccatctaggttgttttctgatttataagttattttatctttctgcttgaaaataataaatttgtttttattgttgaagtctaacagttttactagcatatggctgaaagataattgttccaagtcattttccttgaaaatacattttcattgtgtatttttggatatagttcgaagtattaattttgttcatcattttggttttctacttcagaaacatcgattatatgtatgttggaccttcttttctgtctgtaattcctctttatttacttctttatatcatttttattctcttgattgtttttctggttttctgtaatgctaattattaaatttttaatgtatttttgggggtctctaatttagtctttattatataattatgccttctatttcttttttcaagttcaatcaactcttgtttaatttcctactgtgtttttataatttgaggtcatagaatttttccctggttcatactgttttcttgttttttttkttgttgttgttttttgtttttttgttttgttttgttttgttttattgttattgttgttcatattccccagtacttgtttaaaaatatgtaattcatcttgaagcactgtgttacagtttttggggtgatatttaaccaacacaaaagcttttatttttttttacattggcctgtgtacaatctgctttcttctattcctattcattttgtggacagagttcctagtttgagagtttcttctggcaggctggcattctgctaggcaggactttttgtggacgatggtggtggtggtgatggtagtataggaaaaaggaaaagactgaagcttcacaaaatccttcatttttctgtctgattcattattcctcctcacctttttgtctccagtaagtgtcaccccatgtatctgaaatgactatctaatgctgcaatttagcacttgtttgagtacctttcttacagcatttctctgaattgtgtctcaatccacgttccatatttttgcatttattagtgcatattttcttactgaggcgtgatttttcctgtcttctgcacatctttcacattcatctaca

SEQ ID NO: 715284 - DNA, 1119 bp, Homo sapiens
tggctttctttccttgttgttttcaaggaatcaaactccatctaggttgttttctgatttataagttattttatctttctgcttgaaaataataaatttgtttttattgttgaagtctaacagttttactagcatatggctgaaagataattgttccaagtcattttccttgaaaatacattttcattgtgtatttttggatatagttcgaagtattaattttgttcatcattttggttttctacttcagaaacatcgattatatgtatgttggaccttcttttctgtctgtaattcctctttatttacttctttatatcatttttattctcttgattgtttttctggttttctgtaatgctaattattaaatttttaatgtatttttgggggtctctaatttagtctttattatataattatgccttctatttcttttttcaagttcaatcaactcttgtttaatttcctactgtgtttttataatttgaggtcatagaatttttccctggttcatactgttttcttgttttttttgttgttgttgttttttgtttttttgttttgttttgttttgttttattgttattgttgttcatattccccagtacttgtttaaaaatatgtaattcatcttgaagyactgtgttacagtttttggggtgatatttaaccaacacaaaagcttttatttttttttacattggcctgtgtacaatctgctttcttctattcctattcattttgtggacagagttcctagtttgagagtttcttctggcaggctggcattctgctaggcaggactttttgtggacgatggtggtggtggtgatggtagtataggaaaaaggaaaagactgaagcttcacaaaatccttcatttttctgtctgattcattattcctcctcacctttttgtctccagtaagtgtcaccccatgtatctgaaatgactatctaatgctgcaatttagcacttgtttgagtacctttcttacagcatttctctgaattgtgtctcaatccacgttccatatttttgcatttattagtgcatattttcttactgaggcgtgatttttcctgtcttctgcacatctttcacattcatctaca

SEQ ID NO: 715285 - DNA, 615 bp, Homo sapiens
  misc_feature 116: n = A,T,C or G
tggctggatggctcgccggcctggtgagcagcggggagtggtcacctgacgtggcccccatgtgtgcatcggtgggcacggaggtatttctcggcatcatggtggggtgggggtcncggtgccctcccaactggggccgtcgtcctgccgtgtcccrctgtctcggccccatcctgcccgctcccgtcagggctggccaggttcccatcactgccgctgccaccatcatcgcctctgccaaaccacaccagctggccgtcccggcccactttctcttcccagccttcccgctagggggtctcgagggtagggagctggacgccggtcccacccccctcatccgcccctgccatccaggtacctagcgcattctggcgtggaggtttaaggacacttggggggtcgccggtccgcctgtgggtcaggtgcagtgggcccacggtggagtccgttcaggagggcccacccctccctcgcctcccctgctactccgatacatcggccagccggggccgcgccacactttggtgtcaccgctgatgccggtgggggctttatccagcggccatcgtgatgttgcacacatgccacgggtgtggcctgtgccccgcgctg

SEQ ID NO: 715286 - DNA, 848 bp, Homo sapiens
agggttgtccaggcgtcacattaaaggctcattaccaagttttcttagaagagataaagaacacaaagttacttttatgtgatggaaaacagagagaaagagtaaatgcaacaataaattttaggtaacaacagtgaaaaacaagctgtgggaaaaaatgaatggaaatgttttgtttggtattgatttcctatcctgatatcagaaagtatgggaaagaacaaagcacatttttttgagacagaacataaaacagatgaatgttaaagactgttttacagtgctaacaaaactatctgtgacttgttttttccctttaaaaatacgattttgtacaattacatttatataaattattgaaataaaattgtaaagatggagaacagactatggggttgccaaggggaaggggtggagaaaacgtgtcagagtgtcagcaaagatcccaagttggagcctggtggtgaggctacagttctgcatcttgactttggaagtggtagttacagagatctacaccacataaaaatgaacagaacacacgcacacacatacacacgtacaaaaatgaatgcatgcaaaayggttgcgatctgagtaagctttctgaattgtacctatgtcagtttccaggttttgataatgctctatggctatgtgagatgtcaccactggaattagtgaagagtacctaagacatccctgtaccttttgcaacttcctgtgaatctataattatttcaaaagaaagttgaaagtcatagcagactttcacttcaaagaggaaaaaaactgaagattaatgaaattgttgaaaaacatcaaatactcaatagtctgtatgagag

SEQ ID NO: 715287 - DNA, 2537 bp, Homo sapiens
  misc_feature 2, 3, 4, 5, 6, 7, 8, 9, 10, 11, 12, 13, 14, 15, 16, 17, 18,19, 20, 21, 22, 23, 24, 25, 26, 27, 28, 29, 30, 31, 32,33, 34, 35, 36, 37, 38, 39, 40, 41, 42, 43, 44, 45, 46,47, 48, 49, 50, 51, 52, 53, 54, 55, 56, 57, 58, 59, 60,61: n = A,T,C or G
  misc_feature 62, 63, 64, 65, 66, 67, 68, 69, 70, 71, 72, 73, 74, 75, 76,77, 78, 79, 80, 81, 82, 83, 84, 85, 86, 87, 88, 89, 90,91, 92, 93, 94, 95, 96, 97, 98, 99, 100, 101, 284: n = A,T,C or G
tnnnnnnnnnnnnnnnnnnnnnnnnnnnnnnnnnnnnnnnnnnnnnnnnnnnnnnnnnnnnnnnnnnnnnnnnnnnnnnnnnnnnnnnnnnnnnnnnnnnnccattttctctgaccttggacaaataattatcttatgcctcagtttcctcatccttagatggggcaaatcaagtaaatgagctaatctagttaaagcacttagcccagtgtctaaactctgtaaatattagctattgtattcttgtagccccagctcaggtatgagctctcccacaaagcctnttcttctcattacttgtcaacctcagactccttcaggaacccccacggcactctgggcctattcctactgtagtacttaaggttctattaaaaccatgcttttgtatcgggatcccctatcccacccagttcctccaggacacggatggcagattagtcaaatctcttctcaccccactgtccgactccgtgtttagtactaatagtaacagaacgtctagtgaatgaagggcacttcggaaggaatcgttaagtgcctatgaagcagagcattaaacgtaatcatatcagaaactggactgttttcaattgccgctaaaatgttctacattcgaaacttgggaacgtcagagctagagggaacctcacagagaccacccggcaccatagcggaaactgaggcccagggagggtggcacgcgcctcgggtgtctcaacagcgaattaacaacagaatcagagctagattcccagaccaggggttcccccgtgcccctcggctagacggtcaggaaatatatgacacccccacaggagttaccgggagccaagcaggttctgactccacgctagttcgacttaaaggagctcttctctgcccgggtcgttaggaggagggacactcacttggccgagaggtgttagagagatcttccaaactctgcgactccccctgggcggccagctctgcggccgggagagaactaggcgctaggacagctccaggtgcgacttggttgctggggcgaccgggcacctctcacccggaagcgaatacgcgaggggctgtagctgagccaatcagaaggcgccgggactgtgccgctgcagctgggccaccgcaggctgctccaagtgagaatcgtgagggtggccaagtccagtttggacctctgacccttgggcagcacctcccgacagccggctcgggacccaactctgcgagccaggtacgtcttccacttctgcggacaagtgatgcgcgttgtgcgcacggtgtgcgcgtcaccctgtttgtcagtgtgtctgccgcctcctgctccaggagtggtcgggatctgacgagcatcgcggcccagtgtgtttcatccagtctgcctggggccggtgaatctggaccagcaggatcccaggccctgataccgaaccaaggcgggctctgccgctgaggttgtccacgctcaaactgcaggttggggccggggggggcggggcgtgaaattcagtcttggagcaggctaaggggttgattgaagggatcaggctccgttctctgactccgtctgtgtggcttttttggggagaagggtggggacgatgtgagttcgaaaaaggatacgagatctggatatctggatggagctggatatattgtgatcagtcagagatctgcctgggaggagagtagtgtgtagtcacttttcagtgccttggctatcaaacaaagaatactcttacagccaaacttaggtccctgtatccatggtgaagaaagatagttggagtcttcccgggctagatggaatagatagtggaatctaaccacgtggattatacaacctaattcctattcccttgaaaactctgggagagtggtattggacaccattacagtcagtaaatcttcgtttaaaatgttaagcgcatatctcagatctagttgtaaaagtaacattttctgggttggtgtgagacaacttgttttgattcagcgtaagtatcctcttgctttttcctaatgtttctcagtacacaaatttacctgggctgcatggtttttgagatgaagttctaatctaactgatttgttatttcatttccctaaattttagaaataataggtaattattggtgcacaaccttacagaattcagtttgacctgttatttttcttgcctgttaagattttaatgactctacatttttgtgagtaaagttgacgtttgaacaacatgggtatgaactacccggctccacttacaggtggatttttyccaacccaacacagattgaaaatacagtatttcaggtcgggcgcggtggctcacgcctgtaatcccagcactgtgggaggccgaggcgggcggatcacgaggtcaggagatcgagaccatcctggctaacacggtgaaaccctgtctctactaaaaatacaaaaaattagccgggcatggtggcgggtgcctgtagtcccagctactcaggaggctgaggcaggagaatggcgtgaacccgggaggtggaggttgcagt

SEQ ID NO: 715288 - DNA, 2537 bp, Homo sapiens
  misc_feature 2, 3, 4, 5, 6, 7, 8, 9, 10, 11, 12, 13, 14, 15, 16, 17, 18,19, 20, 21, 22, 23, 24, 25, 26, 27, 28, 29, 30, 31, 32,33, 34, 35, 36, 37, 38, 39, 40, 41, 42, 43, 44, 45, 46,47, 48, 49, 50, 51, 52, 53, 54, 55, 56, 57, 58, 59, 60,61: n = A,T,C or G
  misc_feature 62, 63, 64, 65, 66, 67, 68, 69, 70, 71, 72, 73, 74, 75, 76,77, 78, 79, 80, 81, 82, 83, 84, 85, 86, 87, 88, 89, 90,91, 92, 93, 94, 95, 96, 97, 98, 99, 100, 101, 284: n = A,T,C or G
tnnnnnnnnnnnnnnnnnnnnnnnnnnnnnnnnnnnnnnnnnnnnnnnnnnnnnnnnnnnnnnnnnnnnnnnnnnnnnnnnnnnnnnnnnnnnnnnnnnnnccattttctctgaccttggacaaataattatcttatgcctcagtttcctcatccttagatggggcaaatcaagtaaatgagctaatctagttaaagcacttagcccagtgtctaaactctgtaaatattagctattgtattcttgtagccccagctcaggtatgagctctcccacaaagcctnttcttctcattacttgtcaacctcagactccttcaggaacccccacggcactctgggcctattcctactgtagtacttaaggttctattaaaaccatgcttttgtatcgggatcccctatcccacccagttcctccaggacacggatggcagattagtcaaatctcttctcaccccactgtccgactccgtgtttagtactaatagtaacagaacgtctagtgaatgaagggcacttcggaaggaatcgttaagtgcctatgaagcagagcattaaacgtaatcatatcagaaactggactgttttcaattgccgctaaaatgttctacattcgaaacttgggaacgtcagagctagagggaacctcacagagaccacccggcaccatagcggaaactgaggcccagggagggtggcacgcgcctcgggtgtctcaacagcgaattaacaacagaatcagagctagattcccagaccaggggttcccccgtgcccctcggctagacggtcaggaaatatatgacacccccacaggagttaccgggagccaagcaggttctgactccacgctagttcgacttaaaggagctcttctctgcccgggtcgttaggaggagggacactcacttggccgagaggtgttagagagatcttccaaactctgcgactccccctgggcggccagctctgcggccgggagagaactaggcgctaggacagctccaggtgcgacttggttgctggggcgaccgggcacctctcacccggaagcgaatacgcgaggggctgtagctgagccaatcagaaggcgccgggactgtgccgctgcagctgggccaccgcaggctgctccaagtgagaatcgtgagggtggccaagtccagtttggacctctgacccttgggcagcacctcccgacagccggctcgggacccaactctgcgagccaggtacgtcttccacttctgcggacaagtgatgcgcgttgtgcgcacggtgtgcgcgtcaccctgtttgtcagtgtgtctgccgcctcctgctccaggagtggtcgggatctgacgagcatcgcggcccagtgtgtttcatccagtctgcctggggccggtgaatctggaccagcaggatcccaggccctgataccgaaccaaggcgggctctgccgctgaggttgtccacgctcaaactgcaggttggggccggggggggcggggcgtgaaattcagtcttggagcaggctaaggggttgattgaagggatcaggctccgttctctgactccgtctgtgtggcttttttggggagaagggtggggacgatgtgagttcgaaaaaggatacgagatctggatatctggatggagctggatatattgtgatcagtcagagatctgcctgggaggagagtagtgtgtagtcacttttcagtgccttggctatcaaacaaagaatactcttacagccaaacttaggtccctgtatccatggtgaagaaagatagttggagtcttcccgggctagatggaatagatagtggaatctaaccacgtggattatacaacctaattcctattcccttgaaaactctgggagagtggtattggacaccattacagtcagtaaatcttcgtttaaaatgttaagcgcatatctcagatctagttgtaaaagtaacattttctgggttggtgtgagacaacttgttttgattcagcgtaagtatcctcttgctttttcctaatgtttctcagtacacaaatttacctgggctgcatggtttttgagatgaagttctaatctaactgatttgttatttcatttccctaaattttagaaataataggtaattattggtgcacaaccttacagaattcagtttgacctgttatttttcttgcctgttaagattttaatgactctacatttttgtgagtaaagttgacgtttgaacaacatgggtatgaactacccggctccacttacaggtggatttttcccaacccaacacagattgaaaatacagtatttcaggtcgggcgcggtggctcacgcctgtaatcccagcactgtgggaggccgaggcgggcggatcacgaggtcaggagatcgagaccatcctggctaacacggygaaaccctgtctctactaaaaatacaaaaaattagccgggcatggtggcgggtgcctgtagtcccagctactcaggaggctgaggcaggagaatggcgtgaacccgggaggtggaggttgcagt

SEQ ID NO: 715289 - DNA, 1476 bp, Homo sapiens
tgccaagtaaactttggtttaggagttycctgtctctttattcagtaccttcatagccccctcaggtagccagcgatgttatacagaaattgctctctcttcacctatcaaatattgcttttaataaagaaaactcattcgtctaagatgagcaagtactttttttctacatcaaacatggtattttaagttgatgggagtatataatgtgatcctttggattgtgaggtagggatggggtaagaagccttcccagaagctaaacattaggtcacacaagccatgacatgcttaccactactcttcccccccccccccccacagaaagctgctgaagtatcatttttttaaattttagactcaaggggtacctgtgcttatttattacatggatatatcacttactggtggggattgagtttttagtgtactcatcacccaaacagtgaacattgtacctgataggcaatttttcaactcctgttcccttcccaccttcccctcttttgcagtccccattgtctatcattttcttttcttttctttttttttttttttttgagatggagacttgctttgtcacccaggctggagtgcagtggcatgatttcgactcactgcaacctccacctccccagttccagcaattcccttgcctcagcctcccgaatagctgagattacagatgtgtgccaccacacctggctaatttttgtatttttgatagagacagggttttgccatgttgtccagggtggtctcaaactcctggcctcaattgatccacctgtctcagcctcccaaagtgtgggattacaggcatgagccactagacccagacttttttccatctctatgtttatgtgtatccacctttcctctttaaacatattttgtctgatgtgttataacagcaataccatatgtatgttttgttccattttcctgagacagggtcttgctctgtcatccaggctggagtgcagtggcatgattatagctcactgcagcctcgaactcctgggctcaagcaatcctcccgtctcagcctcccaagtagcttggactataggtgttcgccaccatcacaactggctaatttttttcattatttttggtagaggcagggtctcactgtgttgcctagactagtcttgctctcctggcctcaagtggtcttcacaccttggccttccaaagtgctgggattacagatgtgagccaccatgcccagcacccatatttctgtttattgggatttgatgacatataatttttattctctcactttcaactagtctgattcttcattttaattatatctctcataaatgagttatattttttaaaaagtccattagaactacctttgactttttaaataaacttttttgaaataattttatatttacagaaaagttgcaagtataatagtttctatatgccctttacctagcttcctctcatattaacata

SEQ ID NO: 715290 - DNA, 1476 bp, Homo sapiens
tgccaagtaaactttggtttaggagttccctgtctctttattcagtaccttcatagccccctcaggtagccagcgatgttatacagaaattgctctctcttcacctatcaaatattgcttttaataaagaaaactcattcgtctaagatgagcaagtactttttttctacatcaaacatggtattttaagttgatgggagtatataatgtgatcctttggattgtgaggtagggatggggtaagaagccttcccagaagctaaacattaggtcacacaagccatgacatgcttaccactactcttyccccccccccccccacagaaagctgctgaagtatcatttttttaaattttagactcaaggggtacctgtgcttatttattacatggatatatcacttactggtggggattgagtttttagtgtactcatcacccaaacagtgaacattgtacctgataggcaatttttcaactcctgttcccttcccaccttcccctcttttgcagtccccattgtctatcattttcttttcttttctttttttttttttttttgagatggagacttgctttgtcacccaggctggagtgcagtggcatgatttcgactcactgcaacctccacctccccagttccagcaattcccttgcctcagcctcccgaatagctgagattacagatgtgtgccaccacacctggctaatttttgtatttttgatagagacagggttttgccatgttgtccagggtggtctcaaactcctggcctcaattgatccacctgtctcagcctcccaaagtgtgggattacaggcatgagccactagacccagacttttttccatctctatgtttatgtgtatccacctttcctctttaaacatattttgtctgatgtgttataacagcaataccatatgtatgttttgttccattttcctgagacagggtcttgctctgtcatccaggctggagtgcagtggcatgattatagctcactgcagcctcgaactcctgggctcaagcaatcctcccgtctcagcctcccaagtagcttggactataggtgttcgccaccatcacaactggctaatttttttcattatttttggtagaggcagggtctcactgtgttgcctagactagtcttgctctcctggcctcaagtggtcttcacaccttggccttccaaagtgctgggattacagatgtgagccaccatgcccagcacccatatttctgtttattgggatttgatgacatataatttttattctctcactttcaactagtctgattcttcattttaattatatctctcataaatgagttatattttttaaaaagtccattagaactacctttgactttttaaataaacttttttgaaataattttatatttacagaaaagttgcaagtataatagtttctatatgccctttacctagcttcctctcatattaacata

SEQ ID NO: 715291 - DNA, 1476 bp, Homo sapiens
tgccaagtaaactttggtttaggagttccctgtctctttattcagtaccttcatagccccctcaggtagccagcgatgttatacagaaattgctctctcttcacctatcaaatattgcttttaataaagaaaactcattcgtctaagatgagcaagtactttttttctacatcaaacatggtattttaagttgatgggagtatataatgtgatcctttggattgtgaggtagggatggggtaagaagccttcccagaagctaaacattaggtcacacaagccatgacatgcttaccactactcttcycccccccccccccacagaaagctgctgaagtatcatttttttaaattttagactcaaggggtacctgtgcttatttattacatggatatatcacttactggtggggattgagtttttagtgtactcatcacccaaacagtgaacattgtacctgataggcaatttttcaactcctgttcccttcccaccttcccctcttttgcagtccccattgtctatcattttcttttcttttctttttttttttttttttgagatggagacttgctttgtcacccaggctggagtgcagtggcatgatttcgactcactgcaacctccacctccccagttccagcaattcccttgcctcagcctcccgaatagctgagattacagatgtgtgccaccacacctggctaatttttgtatttttgatagagacagggttttgccatgttgtccagggtggtctcaaactcctggcctcaattgatccacctgtctcagcctcccaaagtgtgggattacaggcatgagccactagacccagacttttttccatctctatgtttatgtgtatccacctttcctctttaaacatattttgtctgatgtgttataacagcaataccatatgtatgttttgttccattttcctgagacagggtcttgctctgtcatccaggctggagtgcagtggcatgattatagctcactgcagcctcgaactcctgggctcaagcaatcctcccgtctcagcctcccaagtagcttggactataggtgttcgccaccatcacaactggctaatttttttcattatttttggtagaggcagggtctcactgtgttgcctagactagtcttgctctcctggcctcaagtggtcttcacaccttggccttccaaagtgctgggattacagatgtgagccaccatgcccagcacccatatttctgtttattgggatttgatgacatataatttttattctctcactttcaactagtctgattcttcattttaattatatctctcataaatgagttatattttttaaaaagtccattagaactacctttgactttttaaataaacttttttgaaataattttatatttacagaaaagttgcaagtataatagtttctatatgccctttacctagcttcctctcatattaacata

SEQ ID NO: 715292 - DNA, 1476 bp, Homo sapiens
tgccaagtaaactttggtttaggagttccctgtctctttattcagtaccttcatagccccctcaggtagccagcgatgttatacagaaattgctctctcttcacctatcaaatattgcttttaataaagaaaactcattcgtctaagatgagcaagtactttttttctacatcaaacatggtattttaagttgatgggagtatataatgtgatcctttggattgtgaggtagggatggggtaagaagccttcccagaagctaaacattaggtcacacaagccatgacatgcttaccactactcttccyccccccccccccacagaaagctgctgaagtatcatttttttaaattttagactcaaggggtacctgtgcttatttattacatggatatatcacttactggtggggattgagtttttagtgtactcatcacccaaacagtgaacattgtacctgataggcaatttttcaactcctgttcccttcccaccttcccctcttttgcagtccccattgtctatcattttcttttcttttctttttttttttttttttgagatggagacttgctttgtcacccaggctggagtgcagtggcatgatttcgactcactgcaacctccacctccccagttccagcaattcccttgcctcagcctcccgaatagctgagattacagatgtgtgccaccacacctggctaatttttgtatttttgatagagacagggttttgccatgttgtccagggtggtctcaaactcctggcctcaattgatccacctgtctcagcctcccaaagtgtgggattacaggcatgagccactagacccagacttttttccatctctatgtttatgtgtatccacctttcctctttaaacatattttgtctgatgtgttataacagcaataccatatgtatgttttgttccattttcctgagacagggtcttgctctgtcatccaggctggagtgcagtggcatgattatagctcactgcagcctcgaactcctgggctcaagcaatcctcccgtctcagcctcccaagtagcttggactataggtgttcgccaccatcacaactggctaatttttttcattatttttggtagaggcagggtctcactgtgttgcctagactagtcttgctctcctggcctcaagtggtcttcacaccttggccttccaaagtgctgggattacagatgtgagccaccatgcccagcacccatatttctgtttattgggatttgatgacatataatttttattctctcactttcaactagtctgattcttcattttaattatatctctcataaatgagttatattttttaaaaagtccattagaactacctttgactttttaaataaacttttttgaaataattttatatttacagaaaagttgcaagtataatagtttctatatgccctttacctagcttcctctcatattaacata

SEQ ID NO: 715293 - DNA, 1476 bp, Homo sapiens
tgccaagtaaactttggtttaggagttccctgtctctttattcagtaccttcatagccccctcaggtagccagcgatgttatacagaaattgctctctcttcacctatcaaatattgcttttaataaagaaaactcattcgtctaagatgagcaagtactttttttctacatcaaacatggtattttaagttgatgggagtatataatgtgatcctttggattgtgaggtagggatggggtaagaagccttcccagaagctaaacattaggtcacacaagccatgacatgcttaccactactcttcccccccccccccccacagaaagctgctgaagtatcatttttttaaattttagactcaaggggtacctgtgcttatttattacatggatatatcacttactggtggggattgagtttttagtgtactcatcacccaaacagtgaacattgtacctgataggcaatttttcaactcctgttcccttcccaccttcccctcttttgcagtccccattgtctatcattttcttttcttttctttttttttttttttttgagatggagacttgctttgtcacccaggctggagtgcagtggcatgatttcgactcactgcaacctccacctccccagttccagcaattcccttgcctcagcctcccgaatagctgagattacagatgtgtgccaccacacctggctaatttttgtatttttgatagagacagggttttgccatgttgtccagggtggtctcaaactcctggcctcaattgatccacctgtctcagcctcccaaagtgtgggattacaggcatgagccactagacccagacttttttccatctctatgtttatgtgtatccacctttcctctttaaacatattttgtctgatgtgttataacagcaataccatatgtatgttttgttccattttcctgagacagggtcttgctctgtcatccaggctggagtgcagyggcatgattatagctcactgcagcctcgaactcctgggctcaagcaatcctcccgtctcagcctcccaagtagcttggactataggtgttcgccaccatcacaactggctaatttttttcattatttttggtagaggcagggtctcactgtgttgcctagactagtcttgctctcctggcctcaagtggtcttcacaccttggccttccaaagtgctgggattacagatgtgagccaccatgcccagcacccatatttctgtttattgggatttgatgacatataatttttattctctcactttcaactagtctgattcttcattttaattatatctctcataaatgagttatattttttaaaaagtccattagaactacctttgactttttaaataaacttttttgaaataattttatatttacagaaaagttgcaagtataatagtttctatatgccctttacctagcttcctctcatattaacata

SEQ ID NO: 715294 - DNA, 1476 bp, Homo sapiens
tgccaagtaaactttggtttaggagttccctgtctctttattcagtaccttcatagccccctcaggtagccagcgatgttatacagaaattgctctctcttcacctatcaaatattgcttttaataaagaaaactcattcgtctaagatgagcaagtactttttttctacatcaaacatggtattttaagttgatgggagtatataatgtgatcctttggattgtgaggtagggatggggtaagaagccttcccagaagctaaacattaggtcacacaagccatgacatgcttaccactactcttcccccccccccccccacagaaagctgctgaagtatcatttttttaaattttagactcaaggggtacctgtgcttatttattacatggatatatcacttactggtggggattgagtttttagtgtactcatcacccaaacagtgaacattgtacctgataggcaatttttcaactcctgttcccttcccaccttcccctcttttgcagtccccattgtctatcattttcttttcttttctttttttttttttttttgagatggagacttgctttgtcacccaggctggagtgcagtggcatgatttcgactcactgcaacctccacctccccagttccagcaattcccttgcctcagcctcccgaatagctgagattacagatgtgtgccaccacacctggctaatttttgtatttttgatagagacagggttttgccatgttgtccagggtggtctcaaactcctggcctcaattgatccacctgtctcagcctcccaaagtgtgggattacaggcatgagccactagacccagacttttttccatctctatgtttatgtgtatccacctttcctctttaaacatattttgtctgatgtgttataacagcaataccatatgtatgttttgttccattttcctgagacagggtcttgctctgtcatccaggctggagtgcagtggcatgattatagctcactgcagcctcgaactcctgggctcaagcaatcctcccgtctcagcctcccaagtagcttggactataggtgttcgccaccatcacaactggctaatttttttcattatttttggtagaggcagggtctcactgtgttgcctagactagtcttgctctcctggcctcaagtggtcttcacaccttggccttccaaagtgctgggattacagatgtgagccaccatgcccagcacccatatttctgttyattgggatttgatgacatataatttttattctctcactttcaactagtctgattcttcattttaattatatctctcataaatgagttatattttttaaaaagtccattagaactacctttgactttttaaataaacttttttgaaataattttatatttacagaaaagttgcaagtataatagtttctatatgccctttacctagcttcctctcatattaacata

SEQ ID NO: 715295 - DNA, 615 bp, Homo sapiens
gctgggattatagacatgagccactgtgcagtaataaactatcgcaatgatccctaacactagtctttgtgttcactagatacacattcttacttttcattcatccttaaacgtactttgtttgaaaagaccccaatattctgctacaattgttcttccaaagtcaccaatggctttagagtggataaaaattaatatttcatcctttttcgccctttcagccattggcctcattgaccactcctccctgtattctaagcagccgctctctgacagttctgctcctgcctcctgaaatgcctttcttcaatatcctgatgatgtccttctcttatcctgtagatgttgacagtacccaatttccaccatccacgttttctcactctgcacwctgccccccagcccctgtcccattttcatttccattcagatgggagtagaactacccacccaatctccatgatcggattgttctaagaatcaaagaaataatggttttgaaagtgactcaaattaagtaaagcaatttatggactatcatgtaaggaacacagattcttcattcatatgcaggtactttcggttattttttttccctgatgacaagtggaagca

SEQ ID NO: 715296 - DNA, 2012 bp, Homo sapiens
tgttcagtacagatgaaactgtccctttttttttctgaaaatttttgatccatggtttattgaatccatggatgtggaacccatacatacagaaagctaactgtactcactttacttttcaaatgtacatttctgttaacaaatactacatttgttaacaacattgggctagaaaagtcccaatgtttcatttttaggagtaacaaaaaaatggaacatttttgctttattggaaatgcaacttatggagtcatcatgaccaacagataaaaccagggtaatttattttttagctttatgtttccataattaataagcagggtcaaatgagcccttggatattttatctgtggtaattattcaaatttggacaaagttataataaaacttctgaggataagttgcacatttttctagaataatttattcaaaagtagtagattaaaactgttttttatggcactaagaataaaatgcaacaaaattggggtgggaagtaggtgcaatatttaaatggaaaggcatcatttttcaaagtgttttgccacactgcaagtcactacctattagtggatcataaaacccaaatttagtggatctcaatcaacaattatttttcaagaaaagatttaatgtaataaattagaatagaaaatataaaagtacatgtataagtcacacacacatagatatggatatatggaaatacgtatctatctctggataartggatagatagagattcattttaaggaactggctcatgtgactatagaggctggcaagtccaagatttgcaggataggccacagacttggggaagagttgatgttgcagtcttccggcaaaatttcttcttgcccaaggacagtcagtcttctgtctattaagaccttcaactgattagataaggcccacccacattatggtgaataatctgctttacacacagcctactgatttaaatgttaatttcatctaaaaataccctcacagaaacatgtagaagaatgtttgaccaaatatcttagtaccgtggcatagccaagttgacacataatattaaccaccatggcacatatcataaggtaggaggagatgtgccttatgaaacttttcctttcctaggccatggatggtgattatgttctattcgaatgttactagcttcagtgcctgccccagtgccttgtacagagtaggcacacaatgaatatttgttagacaaaatcactttcatagatagaaataagaacggctgtcatttttttgagtgactccaatcattgacattttatgtacactgtttcatattcttaaaataactctgcagatcaggaattattgtttcctaaatcagaaaccgatactcaaagaagttgggcaccttgcctggagtaaacagccagtaaactgtaggaatttgaacctaagactctgtcttggttcaaagcacattttctttactgtatatcatgaatagaaaataaggcctgacgcctgtgccaactccagtccattttgttgataagcaatgtttccatttctctctctgagaagagagccatgcgatggaggagaatgaggtgtgcacctttgaaatcttggcttcacattatattgtgtttcaaaaatgaaccgtgagatgcagtgagcaatttatccaaggtcattgttcaatatgataaggagagaatttaaaattcaccaatttttggcactgaatatgaaattgcactgtttatttctttcaggatctcattagcatttcatgtaagttgtctagttggatgtggacagacaagattgagaaatagaaccttgtctggtgaaagacaagggagataacatgatattttgtgtattttcaaagtcatcacaatgtctttggcacaactccttctttatacacaggggttaaatctaatgctttctttggactctgtgcttcaagaccaacttataaaaaattattttagtagttcagaaaaaataataataatacctgtgca

SEQ ID NO: 715297 - DNA, 2012 bp, Homo sapiens
tgttcagtacagatgaaactgtccctttttttttctgaaaatttttgatccatggtttattgaatccatggatgtggaacccatacatacagaaagctaactgtactcactttacttttcaaatgtacatttctgttaacaaatactacatttgttaacaacattgggctagaaaagtcccaatgtttcatttttaggagtaacaaaaaaatggaacatttttgctttattggaaatgcaacttatggagtcatcatgaccaacagataaaaccagggtaatttattttttagctttatgtttccataattaataagcagggtcaaatgagcccttggatattttatctgtggtaattattcaaatttggacaaagttataataaaacttctgaggataagttgcacatttttctagaataatttattcaaaagtagtagattaaaactgttttttatggcactaagaataaaatgcaacaaaattggggtgggaagtaggtgcaatatttaaatggaaaggcatcatttttcaaagtgttttgccacactgcaagtcactacctattagtggatcataaaacccaaatttagtggatctcaatcaacaattatttttcaagaaaagatttaatgtaataaattagaatagaaaatataaaagtacatgtataagtcacacacacatagatatggatatatggaaatacgtatctatctctggataaatggatagatagagattcattttaaggaactggctcatgtgactatagaggctggcaagtccaagatttgcaggataggccacagacttggggaagagttgatgttgcagtcttccggcaaaatttcttcttgcccaaggacagtcagtcttctgtctattaagaccttcaactgattagataaggcccacccacattatggtgaataatctgctttacacacagcctactgatttaaatgttaatttcatctaaaaataccctcacagaaacatgtagaagaatgtttgaccaaatatcttagtaccgtggcatagccaagttgacacataatattaaccaccatggcacatatcataaggtaggaggagatgtgccytatgaaacttttcctttcctaggccatggatggtgattatgttctattcgaatgttactagcttcagtgcctgccccagtgccttgtacagagtaggcacacaatgaatatttgttagacaaaatcactttcatagatagaaataagaacggctgtcatttttttgagtgactccaatcattgacattttatgtacactgtttcatattcttaaaataactctgcagatcaggaattattgtttcctaaatcagaaaccgatactcaaagaagttgggcaccttgcctggagtaaacagccagtaaactgtaggaatttgaacctaagactctgtcttggttcaaagcacattttctttactgtatatcatgaatagaaaataaggcctgacgcctgtgccaactccagtccattttgttgataagcaatgtttccatttctctctctgagaagagagccatgcgatggaggagaatgaggtgtgcacctttgaaatcttggcttcacattatattgtgtttcaaaaatgaaccgtgagatgcagtgagcaatttatccaaggtcattgttcaatatgataaggagagaatttaaaattcaccaatttttggcactgaatatgaaattgcactgtttatttctttcaggatctcattagcatttcatgtaagttgtctagttggatgtggacagacaagattgagaaatagaaccttgtctggtgaaagacaagggagataacatgatattttgtgtattttcaaagtcatcacaatgtctttggcacaactccttctttatacacaggggttaaatctaatgctttctttggactctgtgcttcaagaccaacttataaaaaattattttagtagttcagaaaaaataataataatacctgtgca

SEQ ID NO: 715298 - DNA, 2012 bp, Homo sapiens
tgttcagtacagatgaaactgtccctttttttttctgaaaatttttgatccatggtttattgaatccatggatgtggaacccatacatacagaaagctaactgtactcactttacttttcaaatgtacatttctgttaacaaatactacatttgttaacaacattgggctagaaaagtcccaatgtttcatttttaggagtaacaaaaaaatggaacatttttgctttattggaaatgcaacttatggagtcatcatgaccaacagataaaaccagggtaatttattttttagctttatgtttccataattaataagcagggtcaaatgagcccttggatattttatctgtggtaattattcaaatttggacaaagttataataaaacttctgaggataagttgcacatttttctagaataatttattcaaaagtagtagattaaaactgttttttatggcactaagaataaaatgcaacaaaattggggtgggaagtaggtgcaatatttaaatggaaaggcatcatttttcaaagtgttttgccacactgcaagtcactacctattagtggatcataaaacccaaatttagtggatctcaatcaacaattatttttcaagaaaagatttaatgtaataaattagaatagaaaatataaaagtacatgtataagtcacacacacatagatatggatatatggaaatacgtatctatctctggataaatggatagatagagattcattttaaggaactggctcatgtgactatagaggctggcaagtccaagatttgcaggataggccacagacttggggaagagttgatgttgcagtcttccggcaaaatttcttcttgcccaaggacagtcagtcttctgtctattaagaccttcaactgattagataaggcccacccacattatggtgaataatctgctttacacacagcctactgatttaaatgttaatttcatctaaaaataccctcacagaaacatgtagaagaatgtttgaccaaatatcttagtaccgtggcatagccaagttgacacataatattaaccaccatggcacatatcataaggtaggaggagatgtgccttatgaaacttttcctttcctaggccatggatggtgattatgttctattcgaatgttactagcttcagtgcctgccccagtgccttgtacagagtaggcacacaatgaatatttgttagacaaaatcactttcatagatagaaataagaacggctgtcatttttttgagtgactccaatcattgacattttatgtacactgtttcatattcttaaaataactctgcagatcaggaattattgtttcctaaatcagaaaccgatactcaaagaagttgggcaccttgcctggagtaaacagccagtaaactgtaggaatttgaacctaagactctgtcttggttcaaagcacattttctttactgtatatcatgaatagaaaataaggcctgacgcctgtgccaactccagtccattttgttgataagcaatgtttccatttctctctctgagaagagagccatgcgatggaggagaatgaggtgtgcacctttgaaatcttggctycacattatattgtgtttcaaaaatgaaccgtgagatgcagtgagcaatttatccaaggtcattgttcaatatgataaggagagaatttaaaattcaccaatttttggcactgaatatgaaattgcactgtttatttctttcaggatctcattagcatttcatgtaagttgtctagttggatgtggacagacaagattgagaaatagaaccttgtctggtgaaagacaagggagataacatgatattttgtgtattttcaaagtcatcacaatgtctttggcacaactccttctttatacacaggggttaaatctaatgctttctttggactctgtgcttcaagaccaacttataaaaaattattttagtagttcagaaaaaataataataatacctgtgca

SEQ ID NO: 715299 - DNA, 952 bp, Homo sapiens
agattgatacagggcttcaagttgattttaatccaggctcctatagtcagcgagtgaaacagagattttagttgaaataatgagacctggtgttactagtcagctctccatgctggagaaccataagaaattataccaaaggcaggaaaggggatagaatatggggatcatcacgccaagaataaggtgcagcccatttagcccctgggtcttaaagagacccatagctctggataatggcagatctatgcgtgacacagttatcatcttggtgcatcttcagagaattgtttttccttttactcctagggacaatgtcttaagtttgttagtaaattctattgaatttattaaagatgcttctgataaattctttttatattcatttcaaacaagaagcaatttcacactgacattgttattatagcactaaatacttttacactcatcaaattcctttgagactaactgaaatttctgacagccccacattctacaactttattgtaaattttctgccaaaaatgatgctttcctatacactcctaatacaagtataaatatattatttaatctagtcttaggttgatttaaaattttgaaaattcactccaaaaatatgttctgtaaccatatggccaccaatgagaaatgcattctttcaaggtaaatctgtgctgccctggtttgacctgggactctggggatactgcgcccctgtgctgagttactgagttgagccagccctgcagctgtgctcagcctgccccatcccctgctgatttgcctgttcctagagcacagccccctgccctgaagactttttataggctggtcacacccggagcaggagtcagycccagtcaggacacagcacagacatgagggcccccactcagctcctggggctcctggtgctctggctgccaggtaaggaaggagaacactagga

SEQ ID NO: 715300 - DNA, 2979 bp, Homo sapiens
taatattttcaaatacattgttgatcaccaaaaggagcataaggggtatattgatttgtagcagatgtattaatagcccagcccctattccttacctgtagctgctgggaagaaaaccactcttaacactctacaaggtctcatctccagaatttgcagctgtttctagctgaggactttctctagcagcatgggagcttgatactgggcaagtgggaagaaaaggtgaggataactaagaagaatctccctggattcagtgatgtaattctgaggcatgttccacatagcttcccatagaattaagccccgatatctaacacaggaacttgcctcttaacacgtgtggtactggcttttctatctttcctgttttattttgttctctcttccttgtctcactttcgctgtgtcctcactcctgctttaagaatacccaaacaaaaacactcatttttttttaagagtctcagaatacagttgatagtgtaacttgtaatctatgataatcagcttggatgctgtactgacaggaagatggtgaactcacaatgtctaattaagataaaattaaaaagtatattgattcatgtcaaaagatttaaaaaacctaagtggcagtgtcacaatttcttctttttagtttacatggtttcttaaacgcctacaattattttaaaggaagccttgaatctaggaaaaattgagacatatggaataaattactaacccatttctccttgaaatccattagatgcttgatgatttytcacatatatttctgaattgaaaagctagctgtgaattatttttatatgcatatccttaggtaatattttgtttttaacagtgaattgaaggtttaaagattaaattattctatccagagaataaaaagcaattatttcacaaggagaacatgtgtacgttgacacgacattttaaagtctagaatttaaaaaaggacccatatacttttgtgtcaaatagaatatgtttgtatcagtctgtctacagttttacacctgtcaaaatgtacttgaactacaacaacaaccttgaacaattttgaaattgatgattcctctgaaactgattaaaagaattatggtagagtgaaattctgattgacataatttgggagagaaattattccttggacatcaacctctgccaagatagtttataatgacattgaggctttttgatttacacaatttgttatataaaaaatactaagacgatggcagataatacacagactttaattaaaattgtactacaattaaatgtctaaataaattagaagggtacatggtacatctaattgtatgtttatatattttatttgtgcatttttttcctagggtttcttttgctttagtttgtaaaacgttcttatgtttataataatgtagcatatactaaataaagaaaaatcaggaaatagaaaatgaagaagaaaacattagctattgtcaaccaaacaaaaattgtgcaatctctaagcacatgaactatgtaatatttgtacagcatagtacaatgtttatgcttcacagggtgaggtagagactgcaaaaccttgaacttgggacaaacaagaaagtaaggaaattttcacaacatattaatattatagaaaatgttgaacttaacagttaagatacaagtagtgaaaaatgatagtatttaaggagatctagaaaatttaatctatacctgtaatgtgtgagaagtattagaataatgcttgtatttctggattgtcatcgatttctattgagactggaaacataatagaaatgagcaaaaaagaatttaaattgtggatacttgagttttatacctaggagttccagaaatacattttgttactatcaaagcagttggcacaagagggtacaaaattccctaattgtgtctatgtggagaagacatagacagagaatagcaaaacagaaatagcaaaaaaagcacaaataaattttacctgtattttgaagtaaaagccaattacagagggaaaacatgaaatttgtgttttatcaaaatttttctctttctcataatatagttgaatatattactggaaaaaatttgaagcactggtatgttcacacataaaagtaaaatataaggtcaaaaccatgggaatgcagggagcagacaaaatataactaaacacggaaactgatttttccctacggacatgtagcaaaatgaatgagtgcagattcctattgtcatacattacataggacagtaaaaaaatacatagattttcccaagatagggcatcacacaggagctcctccctacagctaagaccaacatttctatcctcagtataaggaagatcagaggtaaattagtcccatttcacattccctggaaatggcaaataaaaatgatttgagattggacggatttaaagaaactcaatcattaatgattaacagcaactaatttaaaaattgtttaaatgtgcagtccaaacatatgtccgaacacctttaggccaagaattaacataatgtggtcccagaatggtggtgcctttagtagaatcacaaaaaaattcaacttctctttggcaaattttctacttattaatctgcaaaagtgcacaaaaataattttcagagaaaaataaatatttgtcattcaaagacatctaagcatgcaaggaaatgatattccaccatttgaaaggaaagcagaaaaagactacaaacagatccacaaaggttcattagtagaaatatcactgttagattacaaagcacatttgcttacaaaaaattttttaaaaaatgaatatattgttaggagactaaaaaattcatgtagcaaatttgaaaagaagtttgtataaaaatgtagttattttaaattaaaaactcaaaaatgaattcatcagattagacatggccaaggtgagagttcataaatatttcagaatgcattacagaaaat

SEQ ID NO: 715301 - DNA, 2979 bp, Homo sapiens
taatattttcaaatacattgttgatcaccaaaaggagcataaggggtatattgatttgtagcagatgtattaatagcccagcccctattccttacctgtagctgctgggaagaaaaccactcttaacactctacaaggtctcatctccagaatttgcagctgtttctagctgaggactttctctagcagcatgggagcttgatactgggcaagtgggaagaaaaggtgaggataactaagaagaatctccctggattcagtgatgtaattctgaggcatgttccacatagcttcccatagaattaagccccgatatctaacacaggaacttgcctcttaacacgtgtggtactggcttttctatctttcctgttttattttgttctctcttccttgtctcactttcgctgtgtcctcactcctgctttaagaatacccaaacaaaaacactcatttttttttaagagtctcagaatacagttgatagtgtaacttgtaatctatgataatcagcttggatgctgtactgacaggaagatggtgaactcacaatgtctaattaagataaaattaaaaagtatattgattcatgtcaaaagatttaaaaaacctaagtggcagtgtcacaatttcttctttttagtttacatggtttcttaaacgcctacaattattttaaaggaagccttgaatctaggaaaaattgagacatatggaataaattactaacccatttctccttgaaatccattagatgcttgatgatttctcacatatatttctgaattgaaaagctagctgtgaattatttttatawgcatatccttaggtaatattttgtttttaacagtgaattgaaggtttaaagattaaattattctatccagagaataaaaagcaattatttcacaaggagaacatgtgtacgttgacacgacattttaaagtctagaatttaaaaaaggacccatatacttttgtgtcaaatagaatatgtttgtatcagtctgtctacagttttacacctgtcaaaatgtacttgaactacaacaacaaccttgaacaattttgaaattgatgattcctctgaaactgattaaaagaattatggtagagtgaaattctgattgacataatttgggagagaaattattccttggacatcaacctctgccaagatagtttataatgacattgaggctttttgatttacacaatttgttatataaaaaatactaagacgatggcagataatacacagactttaattaaaattgtactacaattaaatgtctaaataaattagaagggtacatggtacatctaattgtatgtttatatattttatttgtgcatttttttcctagggtttcttttgctttagtttgtaaaacgttcttatgtttataataatgtagcatatactaaataaagaaaaatcaggaaatagaaaatgaagaagaaaacattagctattgtcaaccaaacaaaaattgtgcaatctctaagcacatgaactatgtaatatttgtacagcatagtacaatgtttatgcttcacagggtgaggtagagactgcaaaaccttgaacttgggacaaacaagaaagtaaggaaattttcacaacatattaatattatagaaaatgttgaacttaacagttaagatacaagtagtgaaaaatgatagtatttaaggagatctagaaaatttaatctatacctgtaatgtgtgagaagtattagaataatgcttgtatttctggattgtcatcgatttctattgagactggaaacataatagaaatgagcaaaaaagaatttaaattgtggatacttgagttttatacctaggagttccagaaatacattttgttactatcaaagcagttggcacaagagggtacaaaattccctaattgtgtctatgtggagaagacatagacagagaatagcaaaacagaaatagcaaaaaaagcacaaataaattttacctgtattttgaagtaaaagccaattacagagggaaaacatgaaatttgtgttttatcaaaatttttctctttctcataatatagttgaatatattactggaaaaaatttgaagcactggtatgttcacacataaaagtaaaatataaggtcaaaaccatgggaatgcagggagcagacaaaatataactaaacacggaaactgatttttccctacggacatgtagcaaaatgaatgagtgcagattcctattgtcatacattacataggacagtaaaaaaatacatagattttcccaagatagggcatcacacaggagctcctccctacagctaagaccaacatttctatcctcagtataaggaagatcagaggtaaattagtcccatttcacattccctggaaatggcaaataaaaatgatttgagattggacggatttaaagaaactcaatcattaatgattaacagcaactaatttaaaaattgtttaaatgtgcagtccaaacatatgtccgaacacctttaggccaagaattaacataatgtggtcccagaatggtggtgcctttagtagaatcacaaaaaaattcaacttctctttggcaaattttctacttattaatctgcaaaagtgcacaaaaataattttcagagaaaaataaatatttgtcattcaaagacatctaagcatgcaaggaaatgatattccaccatttgaaaggaaagcagaaaaagactacaaacagatccacaaaggttcattagtagaaatatcactgttagattacaaagcacatttgcttacaaaaaattttttaaaaaatgaatatattgttaggagactaaaaaattcatgtagcaaatttgaaaagaagtttgtataaaaatgtagttattttaaattaaaaactcaaaaatgaattcatcagattagacatggccaaggtgagagttcataaatatttcagaatgcattacagaaaat

SEQ ID NO: 715302 - DNA, 2979 bp, Homo sapiens
taatattttcaaatacattgttgatcaccaaaaggagcataaggggtatattgatttgtagcagatgtattaatagcccagcccctattccttacctgtagctgctgggaagaaaaccactcttaacactctacaaggtctcatctccagaatttgcagctgtttctagctgaggactttctctagcagcatgggagcttgatactgggcaagtgggaagaaaaggtgaggataactaagaagaatctccctggattcagtgatgtaattctgaggcatgttccacatagcttcccatagaattaagccccgatatctaacacaggaacttgcctcttaacacgtgtggtactggcttttctatctttcctgttttattttgttctctcttccttgtctcactttcgctgtgtcctcactcctgctttaagaatacccaaacaaaaacactcatttttttttaagagtctcagaatacagttgatagtgtaacttgtaatctatgataatcagcttggatgctgtactgacaggaagatggtgaactcacaatgtctaattaagataaaattaaaaagtatattgattcatgtcaaaagatttaaaaaacctaagtggcagtgtcacaatttcttctttttagtttacatggtttcttaaacgcctacaattattttaaaggaagccttgaatctaggaaaaattgagacatatggaataaattactaacccatttctccttgaaatccattagatgcttgatgatttctcacatatatttctgaattgaaaagctagctgtgaattatttttatatgcatatccttaggtaatattttgtttttaacagtgaattgaaggtttaaagattaaattattctatccagagaataaaaagcaattatttcacaaggagaacatgtgtacgttgacamgacattttaaagtctagaatttaaaaaaggacccatatacttttgtgtcaaatagaatatgtttgtatcagtctgtctacagttttacacctgtcaaaatgtacttgaactacaacaacaaccttgaacaattttgaaattgatgattcctctgaaactgattaaaagaattatggtagagtgaaattctgattgacataatttgggagagaaattattccttggacatcaacctctgccaagatagtttataatgacattgaggctttttgatttacacaatttgttatataaaaaatactaagacgatggcagataatacacagactttaattaaaattgtactacaattaaatgtctaaataaattagaagggtacatggtacatctaattgtatgtttatatattttatttgtgcatttttttcctagggtttcttttgctttagtttgtaaaacgttcttatgtttataataatgtagcatatactaaataaagaaaaatcaggaaatagaaaatgaagaagaaaacattagctattgtcaaccaaacaaaaattgtgcaatctctaagcacatgaactatgtaatatttgtacagcatagtacaatgtttatgcttcacagggtgaggtagagactgcaaaaccttgaacttgggacaaacaagaaagtaaggaaattttcacaacatattaatattatagaaaatgttgaacttaacagttaagatacaagtagtgaaaaatgatagtatttaaggagatctagaaaatttaatctatacctgtaatgtgtgagaagtattagaataatgcttgtatttctggattgtcatcgatttctattgagactggaaacataatagaaatgagcaaaaaagaatttaaattgtggatacttgagttttatacctaggagttccagaaatacattttgttactatcaaagcagttggcacaagagggtacaaaattccctaattgtgtctatgtggagaagacatagacagagaatagcaaaacagaaatagcaaaaaaagcacaaataaattttacctgtattttgaagtaaaagccaattacagagggaaaacatgaaatttgtgttttatcaaaatttttctctttctcataatatagttgaatatattactggaaaaaatttgaagcactggtatgttcacacataaaagtaaaatataaggtcaaaaccatgggaatgcagggagcagacaaaatataactaaacacggaaactgatttttccctacggacatgtagcaaaatgaatgagtgcagattcctattgtcatacattacataggacagtaaaaaaatacatagattttcccaagatagggcatcacacaggagctcctccctacagctaagaccaacatttctatcctcagtataaggaagatcagaggtaaattagtcccatttcacattccctggaaatggcaaataaaaatgatttgagattggacggatttaaagaaactcaatcattaatgattaacagcaactaatttaaaaattgtttaaatgtgcagtccaaacatatgtccgaacacctttaggccaagaattaacataatgtggtcccagaatggtggtgcctttagtagaatcacaaaaaaattcaacttctctttggcaaattttctacttattaatctgcaaaagtgcacaaaaataattttcagagaaaaataaatatttgtcattcaaagacatctaagcatgcaaggaaatgatattccaccatttgaaaggaaagcagaaaaagactacaaacagatccacaaaggttcattagtagaaatatcactgttagattacaaagcacatttgcttacaaaaaattttttaaaaaatgaatatattgttaggagactaaaaaattcatgtagcaaatttgaaaagaagtttgtataaaaatgtagttattttaaattaaaaactcaaaaatgaattcatcagattagacatggccaaggtgagagttcataaatatttcagaatgcattacagaaaat

SEQ ID NO: 715303 - DNA, 2979 bp, Homo sapiens
taatattttcaaatacattgttgatcaccaaaaggagcataaggggtatattgatttgtagcagatgtattaatagcccagcccctattccttacctgtagctgctgggaagaaaaccactcttaacactctacaaggtctcatctccagaatttgcagctgtttctagctgaggactttctctagcagcatgggagcttgatactgggcaagtgggaagaaaaggtgaggataactaagaagaatctccctggattcagtgatgtaattctgaggcatgttccacatagcttcccatagaattaagccccgatatctaacacaggaacttgcctcttaacacgtgtggtactggcttttctatctttcctgttttattttgttctctcttccttgtctcactttcgctgtgtcctcactcctgctttaagaatacccaaacaaaaacactcatttttttttaagagtctcagaatacagttgatagtgtaacttgtaatctatgataatcagcttggatgctgtactgacaggaagatggtgaactcacaatgtctaattaagataaaattaaaaagtatattgattcatgtcaaaagatttaaaaaacctaagtggcagtgtcacaatttcttctttttagtttacatggtttcttaaacgcctacaattattttaaaggaagccttgaatctaggaaaaattgagacatatggaataaattactaacccatttctccttgaaatccattagatgcttgatgatttctcacatatatttctgaattgaaaagctagctgtgaattatttttatatgcatatccttaggtaatattttgtttttaacagtgaattgaaggtttaaagattaaattattctatccagagaataaaaagcaattatttcacaaggagaacatgtgtacgttgacacgacattttaaagtctagaatttaaaaaaggacccatatacttttgtgtcaaatagaatatgtttgtatcagtctgtctacagttttacacctgtcaaaatgtacttgaactacaacaacaaccttgaacaattttgaaattkatgattcctctgaaactgattaaaagaattatggtagagtgaaattctgattgacataatttgggagagaaattattccttggacatcaacctctgccaagatagtttataatgacattgaggctttttgatttacacaatttgttatataaaaaatactaagacgatggcagataatacacagactttaattaaaattgtactacaattaaatgtctaaataaattagaagggtacatggtacatctaattgtatgtttatatattttatttgtgcatttttttcctagggtttcttttgctttagtttgtaaaacgttcttatgtttataataatgtagcatatactaaataaagaaaaatcaggaaatagaaaatgaagaagaaaacattagctattgtcaaccaaacaaaaattgtgcaatctctaagcacatgaactatgtaatatttgtacagcatagtacaatgtttatgcttcacagggtgaggtagagactgcaaaaccttgaacttgggacaaacaagaaagtaaggaaattttcacaacatattaatattatagaaaatgttgaacttaacagttaagatacaagtagtgaaaaatgatagtatttaaggagatctagaaaatttaatctatacctgtaatgtgtgagaagtattagaataatgcttgtatttctggattgtcatcgatttctattgagactggaaacataatagaaatgagcaaaaaagaatttaaattgtggatacttgagttttatacctaggagttccagaaatacattttgttactatcaaagcagttggcacaagagggtacaaaattccctaattgtgtctatgtggagaagacatagacagagaatagcaaaacagaaatagcaaaaaaagcacaaataaattttacctgtattttgaagtaaaagccaattacagagggaaaacatgaaatttgtgttttatcaaaatttttctctttctcataatatagttgaatatattactggaaaaaatttgaagcactggtatgttcacacataaaagtaaaatataaggtcaaaaccatgggaatgcagggagcagacaaaatataactaaacacggaaactgatttttccctacggacatgtagcaaaatgaatgagtgcagattcctattgtcatacattacataggacagtaaaaaaatacatagattttcccaagatagggcatcacacaggagctcctccctacagctaagaccaacatttctatcctcagtataaggaagatcagaggtaaattagtcccatttcacattccctggaaatggcaaataaaaatgatttgagattggacggatttaaagaaactcaatcattaatgattaacagcaactaatttaaaaattgtttaaatgtgcagtccaaacatatgtccgaacacctttaggccaagaattaacataatgtggtcccagaatggtggtgcctttagtagaatcacaaaaaaattcaacttctctttggcaaattttctacttattaatctgcaaaagtgcacaaaaataattttcagagaaaaataaatatttgtcattcaaagacatctaagcatgcaaggaaatgatattccaccatttgaaaggaaagcagaaaaagactacaaacagatccacaaaggttcattagtagaaatatcactgttagattacaaagcacatttgcttacaaaaaattttttaaaaaatgaatatattgttaggagactaaaaaattcatgtagcaaatttgaaaagaagtttgtataaaaatgtagttattttaaattaaaaactcaaaaatgaattcatcagattagacatggccaaggtgagagttcataaatatttcagaatgcattacagaaaat

SEQ ID NO: 715304 - DNA, 1007 bp, Homo sapiens
aatttaagaggtaataacattttttatttgatatacaatttatcaacacaataaaaatctaacaattatcatgtgcagagtgtgaaaatctcatcagatcaaggaacacaaagacatctttttcatatttcgaatgtaaaactgttttggaaactgttatttttagaaacagttaaaaacattttttcattagtttttcatgtaaaattgtgacaaccagcatgaaataactgtcatcacagaagcatggtatattcgattccaaaacatattctttgtaagttttaatatatttatgtattatttatacttagattgtaacccataatgtacagatattatttttccttcaactcttaagaatattcttaaataataaaattaaaattaatgaattataatttttgttgcttgggaaaaagaatagacacacacgtgacagtgcatcacttcaccccatcatttcatctcatcatttcatctcatcattttatctcatttcatctcatcccatctcatctcatcatttcatatcatctcatcatttcatctcatcatttcaccaaatctcatctcatctcatttccatttcattttcattatttcatttcatcatttcatttcactatttcatttcatttcatctaatttcatttatttcattatgtcatttcatataatctcatttcatctcatctcatatttttgatatcatttttcatatcatttttcatctcatttcatctcaattcatctcatcatttcatctcctcatctcatcatttcctcctttcattayaacatttcatctcatttcttctcatctcatttcaatttcattatttcatctcatttcattatttcacctaatttcattatttcatctcatctcatctcagttcatctgatctcatttcatctcagcatttcatctcatcatttttcatctcatcatttaatctcatttcatttcatttgatctcatcatttcagctcatttcatgtca

SEQ ID NO: 715305 - DNA, 1007 bp, Homo sapiens
aatttaagaggtaataacattttttatttgatatacaatttatcaacacaataaaaatctaacaattatcatgtgcagagtgtgaaaatctcatcagatcaaggaacacaaagacatctttttcatatttcgaatgtaaaactgttttggaaactgttatttttagaaacagttaaaaacattttttcattagtttttcatgtaaaattgtgacaaccagcatgaaataactgtcatcacagaagcatggtatattcgattccaaaacatattctttgtaagttttaatatatttatgtattatttatacttagattgtaacccataatgtacagatattatttttccttcaactcttaagaatattcttaaataataaaattaaaattaatgaattataatttttgttgcttgggaaaaagaatagacacacacgtgacagtgcatcacttcaccccatcatttcatctcatcatttcatctcatcattttatctcatttcatctcatcccatctcatctcatcatttcatatcatctcatcatttcatctcatcatttcaccaaatctcatctcatctcatttccatttcattttcattatttcatttcatcatttcatttcactatttcatttcatttcatctaatttcatttatttcattatgtcatttcatataatctcatttcatctcatctcatatttttgatatcatttttcatatcatttttcatctcatttcatctcaattcatctcatcatttcatctcctcatctcatcatttcctcctttcattacaacatttcatctcatttcttctcatctcatttcaatttcattatttcatctcatttcattatttcacctaatttcattatttcatctcatctcatctcagttcatctgatctcatttcatctcagcatttcatctcatcakttttcatctcatcatttaatctcatttcatttcatttgatctcatcatttcagctcatttcatgtca

SEQ ID NO: 715306 - DNA, 653 bp, Homo sapiens
gatgggcaagtgaaatgtggttatgcatacagtagactgttactgaacctttaccaggaaggagattcttttttttctttctttttgtggaaaatgcagtcttgctatattgcccaggcaggtctcgaactcctgggttcaagctatcttcctacctctgcctccctaacagctaggataataggcgtgagcctataatattacccagccaggagggaaattctgagaggtgtgccaacacgcatgaaccttgaggacattgtgctagatggaataagccagccacaaaaggacaaatacattgcgatttcacttacatgaggggcccagaatgggcaaattcaaatacagaaagagcaatggttaacaaaaggagggagttggtgttcaatgggtatggtttccttttgggaagatgaagaagttctggaaatggacggtggtaggggatatgcgacaatgtgagtgcacttaatgccagttataacayggggagtgcgtgtgcacacggctctgggagttctcgtgcagcactcagagctcagcgtgggcgagggcgtcacccctctgggggtgtccatggggccttggagaagggaggctccggggcaccagagcagtctaccaggagaggccgggccgagcgcttgttc

SEQ ID NO: 715307 - DNA, 681 bp, Homo sapiens
tcatttttatttttattttttgttgtaaatctgccacttaaaaatacccagggtggagctaaaagtacagacactgctcaacttacccctggctgcggcccaataaggccgctgcgagtggaaaatgactgagtccacctgactaccgaatagcacagcgtgggggggcccaccttggcctgctgagaacackgccctgagcctgcggtgggcagaagcatcaacacgaagcctgttttgtagtcaagtgtcggatacctcatgtaatcattgactgctgtactgaaagtgaaaaactggccttgtgggactcacacgagggtttctgctgactgtggatggcttttgcatcactataaagttgaaaactgttaagtggaactgcggtaagtcgggtctgtgtgcactagagacctgagttctgccgctccatagctgtgtgactttggacacatatttgagcctgagtgtcttccacacaaaatggatttcttagcataacctacacttgtgtacgtgcccgtgagcgtgcacgtgtgtgtttgcatgaacacatctgtgtatgcacgagtgtgtgcacatttgtatgtgtctgtgtaagtccatatgttcatttgtgtgcatgtctgtgtgtgcatatgtttgtatgtgtgtgtgctatgcatgtgtgtgttaaggccc

SEQ ID NO: 715308 - DNA, 1231 bp, Homo sapiens
ttctctcgctgattttcagtgttgaactttttaagtgctgaacaycaaacaagcatcaaggtggcttttctctttgttaagtagagaaataagcagacataatatttattaaaattctgctcagtagcatgcctttttcaattacaccaaattattttgcagtcttttataatcatgtgggttattctctcccttctgtgatctcatgaaaattcacctctcttcctgacatcacgttcaactaaattctattgttttatatttataaaactgccttctagaattctgaaccagaatccaggtaaatcccttaacacaacagagactgagtttgttcacattaaactgagtttggtgcattaggggtgatgctcagattcattcgttcatttgttgcaaagataattattgagcacctactatgggctgggtgcttctctaacaacttaatgtaggaacaatgaacaaatcagacaaagcttctgctcccatagagcttaaactcatggagaaggcagattaagcaagtaaacaaacaaaccaaatactccgagatgacaacaaatgctagaaataaaataaaacaggctggtgtgagaaagactgatgggggtagggctctgtgttaatgaggtgctgagaaaagccaacctgggaggcgatattggagttgagattagaattagacaaaggagtctgtccgtcctgaaggcagagatgacagttgtaggcagatggaatagcaagggcacagactcatctgagggacggaaaaaaggccctcagggaggtgcagccaggagaggcgtggggtagaggtcagagccccacagtgtcggtggtcaccacaaggcatttggatttgggaagagctcccagagtcaccctcttaacaacaaggctccactgggtgacctggccatctcaaattagtcattctaaattctaggcagaatcagacatgcttttgcaggtagtttggcccaggttagccacctgcccctcagcattcacccaaagcttctggagccaatgtgagaatcataaagctgcccctcccccacctgccatcactgtcaccaatgatggaagtggagggtgtggcctcgcttgactcctcctcataaacccaaccctccccaagcagctggcgacagcaggtggcctctgcaggtccctggaccttctctcctttacccagcacttctgctcctgatgagccccaccactg

SEQ ID NO: 715309 - DNA, 654 bp, Homo sapiens
gtggcagaatgaatggcaataatgcattctgtacaygatccaaagctctcaccaggggagaaagcatacagtaggggagatttaaaagctacagcttgaagtatgtatgttctgaagactttgatagggaggggaagagagagactacttgggatcctattcattggcttgaataaggaataaataaaaccaggaggaacaggctgggacaccatcaagcagacatggacaaatatggatctgtagcagtagatcacaataccagatagtgactttattgaaaccaaaatgccttggctcttcagtcttcatttcacaaataaaagaattcccaagggtgaagtggaggatctaatacaccactccataggttgttgatctagtattttgaggaacatactaggatgcattacaatacctcaccttaaatgtatagaatggagtagcatctcttgatgggatcttctccagctgattgtctccagcacctctgagtcagatctggtgagatgtgcagctactatagagtacatatgtgtacagatgcaccacagagattcaaacacgaggggaatgtccttgttcacaatgagggattaccagatcctcttccccagtttatagccaggaatgttgccttccactggatcttcc

SEQ ID NO: 715310 - DNA, 885 bp, Homo sapiens
tatcaagagtttgcctttgaagctctaatgaattgtcttgatcttggactatttttgctccacaactttgaagtgaccactcaaatgtcattgtttaaaatgtagcaagaaaagcccgccctgctatataggagtggcttgcttctctggagagggaaactttggatggctccatgaaagcattctgggggtttggggaataagggtaggaaactgattgctcctctgcatatagaaagagaatgaaactcttttctgtttgaatttacatttaattttcatcaasctgactttgtcctggaagatgtggatattacaaagttttcacctctgggactcatgatgacaatccatcccttttccccatatttaaaggcagaattggcagcattctctttatttcatgaactgcttttaaatgacatgcaggagaagaaagacaccacagttaaatatataaaaataaattttcttggcttactggggtagcaaacaaatatctatgagtaatgcccctatatcaccagctagcaaggcacttaataaaatccaaacaactgtcacacacgggttataaggtcattcctcacatataagataaactagaaatctatccaaaggatagaatcagggagaatgttatgaagtttgctgtaaaataacaaatgagtttcacatgttatttcatttcccaagggcactttgataagcatacacacatattgtcaatgcatgctgggacctcagtgcatgtggcggacacagaaacaagcaagttcaaaaccataaatgtcatttagtaacaaattaaatatttgtcacaagtgacagcacaacaaataagtaaaacaacgcagtatactttttggctcccaacaatgtgga

SEQ ID NO: 715311 - DNA, 885 bp, Homo sapiens
tatcaagagtttgcctttgaagctctaatgaattgtcttgatcttggactatttttgctccacaactttgaagtgaccactcaaatgtcattgtttaaaatgtagcaagaaaagcccgccctgctatataggagtggcttgcttctctggagagggaaactttggatggctccatgaaagcattctgggggtttggggaataagggtaggaaactgattgctcctctgcatatagaaagagaatgaaactcttttctgtttgaatttacatttaattttcatcaacctgactttgtcctggaagatgtggatattacaaagttttcacctctgggactcatgatgacaatccatcccttttccccatatttaaaggcagaattggcagcattctctttatttcatgaactgcttttaaatgacatgcaggagaagaaagacaccacagttaaatatataaaaataaattttcttggcttactggggtagcaaacaaatatctatgagtaatgmccctatatcaccagctagcaaggcacttaataaaatccaaacaactgtcacacacgggttataaggtcattcctcacatataagataaactagaaatctatccaaaggatagaatcagggagaatgttatgaagtttgctgtaaaataacaaatgagtttcacatgttatttcatttcccaagggcactttgataagcatacacacatattgtcaatgcatgctgggacctcagtgcatgtggcggacacagaaacaagcaagttcaaaaccataaatgtcatttagtaacaaattaaatatttgtcacaagtgacagcacaacaaataagtaaaacaacgcagtatactttttggctcccaacaatgtgga

SEQ ID NO: 715312 - DNA, 1155 bp, Homo sapiens
  misc_feature 814: n = A,T,C or G
agaactgaatcccgatgggaatttatttcctattcagagaacgctgcacatggcaatctgaggcctattctaaagtataaggggaggaggaagttgagggttgtgacttatcttcagtttttaaaaaattcagtcattctgtattatcatgaaagcacagcttctggcaaggggtagttcattccagcatatccgatgcatgctatttaactacagaacagtagctgtgtgcatgagctcatcatgctctaatttttctatcaagcagaagtatacagttaaggtatctatcatcactgattttcttcaatgcactaagatatggttatggtaggttagaaacttcaggaagtccatatcacaaatttacccaagaaaaataccaagttcaaaaacactaccataggcaagaaattaattcagaagactctctctaatcaggtgtcagagaaatggtgtcagctctgctgaatttttattttatcttattattccattttgacaaatatgagagaattggagttgattcctttaaaggtaattattcctattcaacccgatggaagttgccctttttaatcaacgaatgattgatgctatactttagccatatgttctgatggtgtattttgaaatatttttaccctgattctaaagagagatgttgccaaaatattttattaaataagcaggtcaaaaatgttcttccactttatagtctctgtaaatataataaatttgaaagtactattgaagataattccaaagggagtggatttctttaactttacatttttcatccaaaygaaagtgnaaacagcacatccatctaatgacagttctgaatttacttttctcaagttacccagatgttgtctacatttatgattttaagaaaatcagtttttagttacaaaagttatacatgcttattggaagacattgcaataatgcaaaaataactaaaaccgagattctgactctaacttctactccttagtggttacaactaataacacttcagcattatgtttctagacctcttaaatttctgtaaaaaagtatatactgtatgtatatgtagaaatattttcttttacaaaaatgcaatacatgtatttactttttttgctttaaaaagattataaacaactt

SEQ ID NO: 715313 - DNA, 1155 bp, Homo sapiens
  misc_feature 814: n = A,T,C or G
agaactgaatcccgatgggaatttatttcctattcagagaacgctgcacatggcaatctgaggcctattctaaagtataaggggaggaggaagttgagggttgtgacttatcttcagtttttaaaaaattcagtcattctgtattatcatgaaagcacagcttctggcaaggggtagttcattccagcatatccgatgcatgctatttaactacagaacagtagctgtgtgcatgagctcatcatgctctaatttttctatcaagcagaagtatacagttaaggtatctatcatcactgattttcttcaatgcactaagatatggttatggtaggttagaaacttcaggaagtccatatcacaaatttacccaagaaaaataccaagttcaaaaacactaccataggcaagaaattaattcagaagactctctctaatcaggtgtcagagaaatggtgtcagctctgctgaatttttattttatcttattattccattttgacaaatatgagagaattggagttgattcctttaaaggtaattattcctattcaacccgatggaagttgccctttttaatcaacgaatgattgatgctatactttagccatatgttctgatggtgtattttgaaatatttttaccctgattctaaagagagatgttgccaaaatattttattaaataagcaggtcaaaaatgttcttccactttatagtctctgtaaatataataaatttgaaagtactattgaagataattccaaagggagtggatttctttaactttacatttttcatccaaacgaaagtgnaaacagcacatccatctaatgacagttctgaatttacttttctcaagttacccagatgttgtctacatttatgattttaagaaaatcagtttttagttacaaaagttatacatgcttattggaagacattgcaataatgcaaaaataactaaaacygagattctgactctaacttctactccttagtggttacaactaataacacttcagcattatgtttctagacctcttaaatttctgtaaaaaagtatatactgtatgtatatgtagaaatattttcttttacaaaaatgcaatacatgtatttactttttttgctttaaaaagattataaacaactt

SEQ ID NO: 715314 - DNA, 1155 bp, Homo sapiens
  misc_feature 814: n = A,T,C or G
agaactgaatcccgatgggaatttatttcctattcagagaacgctgcacatggcaatctgaggcctattctaaagtataaggggaggaggaagttgagggttgtgacttatcttcagtttttaaaaaattcagtcattctgtattatcatgaaagcacagcttctggcaaggggtagttcattccagcatatccgatgcatgctatttaactacagaacagtagctgtgtgcatgagctcatcatgctctaatttttctatcaagcagaagtatacagttaaggtatctatcatcactgattttcttcaatgcactaagatatggttatggtaggttagaaacttcaggaagtccatatcacaaatttacccaagaaaaataccaagttcaaaaacactaccataggcaagaaattaattcagaagactctctctaatcaggtgtcagagaaatggtgtcagctctgctgaatttttattttatcttattattccattttgacaaatatgagagaattggagttgattcctttaaaggtaattattcctattcaacccgatggaagttgccctttttaatcaacgaatgattgatgctatactttagccatatgttctgatggtgtattttgaaatatttttaccctgattctaaagagagatgttgccaaaatattttattaaataagcaggtcaaaaatgttcttccactttatagtctctgtaaatataataaatttgaaagtactattgaagataattccaaagggagtggatttctttaactttacatttttcatccaaacgaaagtgnaaacagcacatccatctaatgacagttctgaatttacttttctcaagttacccagatgttgtctacatttatgattttaagaaaatcagtttttagttacaaaagttatacatgcttattggaagacattgcaataatgcaaaaataactaaaaccgagattctgactctaacttytactccttagtggttacaactaataacacttcagcattatgtttctagacctcttaaatttctgtaaaaaagtatatactgtatgtatatgtagaaatattttcttttacaaaaatgcaatacatgtatttactttttttgctttaaaaagattataaacaactt

SEQ ID NO: 715315 - DNA, 662 bp, Homo sapiens
tttttttttttttttttttttttacttttagtagagatggggtttcacaatgttggccagggtggtcttgaactcctgacctcaagtgatctgcctgccttggcctcccaaagtattgggattacatgcgtgagccaccacgcctggcctcaacttttctaatgctttagttagtaattccttggagggctcagagtccacagagggggatctttctggagttagaagtgttaaggtataaggcagatctgggtgagggtactataaagagctgtacacagctacaaccccaggtttatgccacrtcaggcacgtgctgggcactgagcagatgggggtgaatgaaaggacagaccatgtcaatggttgctaggacgaatgcttagggatttgggaatcttcccgcagactagttttcctgcctcacatcatgccattttctttaccaaatcccacatagaacatggtcaatgccccgcacatatctcctattacgagacttttgcctgggttgctttttccattctctcagacataaatacttatagatcctttcatgcccatttcaaatgtctctacctctatgatctctgattgattccctgggcagaattaagctccctccttcccactttagttttattcttctagatacttctcac

SEQ ID NO: 715316 - DNA, 1109 bp, Homo sapiens
agcctcctatgtcttctcccactcttcattttgttagttgttttatttccgtgtcatcaagccaccttgtatttccatattcttctgatgcccttatccccactttttttttttttttwaattttaggtgtagcaagatatatccattgctcaccatcatttttatgttttttgccaaactttccccagatatttcttagttgggcagaattctgataaccccttcttcaagtagagaataagttttctctgcattttaccattttaaactatttctctgtagttttaataaatggatttttatgttatatgcctaaaggatagcttggctagatagaaaatccttgactcagattctttttacctatagtatttcttaggtgctgcttcactgtcttctggcactggatattgtggtagaggcaggagtctgatgttatcagacatcatatggaattttgttttcatagaagtgacttaatttttttatcccatatctggagagtcttccattatatttaacatccaacaactttactagaatgcatcatgaagttgactgctccagtcagcttcccctgggacaaaatgtaggctcaaagtttctctattttcagaaaaaaaattcttgaattatattttaaaatatctgtctttgttgtgggcttttaagaaatccaaatatgagccatgtgtggtggtgcacacctgtagccccagctactcaggaggatcaggcatgaagtttgcttgagtccaggagttcaaggatgtagtgttctatgatggcatctgtgaataatcactgtgctccagcctgagcaacatagcgagacccaagctcaaaaaaaaaaaaaaaaaaaaaaaaaaaaacagagaaaaaagaaatccaagtatgaatatattgattactgattactctttctctttcctctatatctttctagtcctttatttatatttcctttatttatattttagttatttatttctcgtttctatcaactttgttcttcatgtggctactggtagccacagcatctattctcctagtattctttccaataatcttaatttctgcaatcctttcaccttccttctcttttcct

SEQ ID NO: 715317 - DNA, 707 bp, Homo sapiens
atgaaacagagacaattgtgcaatgcaaagagtttgaacttaaataaaggaatttttattgccaatctggttctctgatgaaaactgtattagtgtcactagaatctctgcctaattttctaccctctgtaaaataagaatagttcctactttctctcagagctatgaccacatgaatatgtgtaataaactcaaataagtacaagtaaaatcaagatattaagatttttattgttctaatctgtccaaaacaacatacatgcattaggacttactattgtatcacatatctttttaaaaattgaatttcatttttaccttttgaatctacagcaaatataatgactccagaggaactgagactcctatcggaaacacacctttgctgataaattttcagagctacactctccacatatgttcttctgggcgtatgtcaataagatcctgatatgatacatgcttatgagayagatgcaaacgtggggttgcagaaatgcgagtcgggagcgtttgcctgatagggatttgtttcatacagagcttacagcggtactttccctcccctcacatagtcttatgctgagagcaatggaataacttcaacatataagcctctccccactaccttccagagatgcttgagataccactttggagttgctctgggtcagcagttcttcctcagaccccaggtctttctcagc

SEQ ID NO: 715318 - DNA, 707 bp, Homo sapiens
atgaaacagagacaattgtgcaatgcaaagagtttgaacttaaataaaggaatttttattgccaatctggttctctgatgaaaactgtattagtgtcactagaatctctgcctaattttctaccctctgtaaaataagaatagttcctactttctctcagagctatgaccacatgaatatgtgtaataaactcaaataagtacaagtaaaatcaagatattaagatttttattgttctaatctgtccaaaacaacatacatgcattaggacttactattgtatcacatatctttttaaaaattgaatttcatttttaccttttgaatctacagcaaatataatgactccagaggaactgagactcctatcggaaacacacctttgctgataaattttcagagctacactctccacatatgttcttctgggcgtatgtcaataagatcctgatatgatacatgcttatgagacagatgcaaacgtggggttgcagaaatgcgagtcgggagcgtttgcctgatagggatttgtttcrtacagagcttacagcggtactttccctcccctcacatagtcttatgctgagagcaatggaataacttcaacatataagcctctccccactaccttccagagatgcttgagataccactttggagttgctctgggtcagcagttcttcctcagaccccaggtctttctcagc

SEQ ID NO: 715319 - DNA, 1139 bp, Homo sapiens
gttcctttagaagcaacaggcagccaaacaaggactgtccccacatggctcctgactcatgcactgccagccatagtgccagggatctcagcatcattgcctgccacaagcggcaagaggagagctggcaggcagaggactagctaaggacttggggcatgtcctcttgggccacaaagggcaggctggaggatcgaggtgtctcaggtgtgtttcagaacaggcatcagggcctgcgtggtctgcgcctctgtctccctcagtggcctgggagtcttggaggtggctttgggcctcactcacctctgagtagctgcaggagcagctcatagctcctggttggaaagggagtgccagtcaaggggctgccttgagatggggtgaaagagacccaggtctcacagcaggaccaacagggtggggagtacaggggctgatcaaaggatgctttgaaagtagggctggagcacaggttgctgatgcttgacctttccttaaccgaggccaatgcctttcattaagctagtagagataactagtagagataactagttgaagtaacagaaggacaaacgcttttcaaagaatgcttggcctatcaaggcagggtgaatggtgggctcaagtcttctggattagcagtgcggaaagggcctgaggtgctgaggagagtgaggctcagcactaaagacagaaggggacagaaagaccccatgaggtcagggactggtggtggagggagtaggatgaagaacctagggttgggaagaaggagtgagccctgaggactggaaggccctggatggagcagaagaacaggctggggaagctcaggcaagccctgccaccttcgtggtcctgcaggcgggtgccagtacagatctgtgattcttggtgaacggtagaaactgtctgaggagatcatgttccctgagctgctagatgcgggcagagctgggctggtttttgtcttgggcaatgtaacataagccagcattgctrgggattgtgccccaggcctttgaaagacagtgccaagtttatctaaaaggactttggttcccagaggacttgttagtcaatacggagtttttagcaaagcctatgttattttatgtgaaccagagatggtgttgtgc

SEQ ID NO: 715320 - DNA, 2070 bp, Homo sapiens
tttttcgttggttcttacaagtcgttaagagttgtaacatgaaataagtagagatcaccaatctatccgcccccaaattaattttattttaatctgtgtaagggccactgctcctggctggccgtgtgtgaagcaaaatttttgtgcaataaaaattattccttcactagaattcattttttcctttgctatgaattccctgtcttcctaattttccactagcagagctagggagagccgagttgcactgaagcagagaaaggatggaaaattctttcgagctaagcatttatgaattgcttatgaatgatgtatgtgttaaaattgtttccaacagtaaaatgccccagggatactcggttgacagttttttaataagagaattcttcttgtgattgatttgatctttttttttcttttttcttctttttttttttacaaaaattttccctgttttaggtcgaactgaacatagacgtaccttttcacgatttatgaaataagatgtcaagtgacaaatacctggaaaatgaaaggatgaacacgatcttcaggaacctaagttttaaaacatattgtctgcgcgtttatactgggtaacatttttacagttttcagaaaagttattatggtagtttgtttgctccaaattaaatttggaagtctttgttccttaatttggattacattttaaaatctgagttgtcaacaaggccgtttcacgaaaaaaaaagtaagaaagaattacttcttttggcaggctatgggcctttatttaaacagaaattaaaattcacagccaaaattctttctctctccactggaaaacaaattacacctttccgattctgcaatttctgggcctccagcacagaaatgatagaggattccgaagaatttctgtattagtaagaagttaagagtgctctcagtggagaataatggtttgtggaaaattataagatcaaggggaatggaaaagttttcttgttaggtcagtatggtgtaacgtttattcttctaaatactttttgacatgtaacaaaggtaggaaaatttgcttaattactgtctttttaaatttacatcagtatgtggattacatttaactcaattcatatttaattttgtagtcttaaaagtaaataacttgaggcattattttatgcctcctccatgaaattatatccagagacattattccattgctaacaagtgattcagtgttaaaaataaatgttaattcctatgatattccaagcaattacagtaatgtatatccatcttaaagccaaaaacattgtcagttgataatttgtcaaattgttatttgaaattgaactctaggtaaagtagagtaataaaacattagcacttttatacacctggttcttagtaattataaaaagttaattttacaatctactaggaaataattacattttagtgttaattttaggcgttagctttatatgactgtgttagtgctgttttaataagctttggggtaatgaataaagtactattataatttaagtaatataactaagcattaaacccaaactatttattatttaaaccagactatcatgttatttttcatttttctttaatgaataaggtttttctggttatgaagtatatatgttcctgaaaaaatctgagaaatgccaaaaggcataacaagaaaaacccaaaatgtttatatgtattctcacaatcagtaagtaaatctgtttcctatattttcttcctatctttttctatgtattagtagtgaggtcatttttttgttttgctttagtacgaaattccagttgggttctatattaagaacttgcttctcaaagctcagatttattttgttcttattttctgcttggactataatttgactttgtaagaattcacagttttattacattcatatttttaacttctttttattataakaaatacacattcataaagtaaccactcagaactactgaaaagtagaagtaaaatatcataatgatctggccataaaaaattcccagtttgcattttttaaaaacacagtattatcat

SEQ ID NO: 715321 - DNA, 564 bp, Homo sapiens
gtgtcatgagggcactctaggmaaatcctactgggtaagaatactgggatggagaaattaaacaactattcaactatttaggaaggcttggatctgtcccacatttcaaaggatgtcaatgtgataaactatcctttggacttttccaataatgagtttttaaaaatagctttgcatcatgtattgaaataaatttcaatctaaccaaagagatctcatatgtacataaggaatctctcaaaagctattcaaaaggaagtaaaagtgaataataataaactatttttataagaaatactgaagagccctatcaaggaaaatatctaaaaggttgtaaaataaagtcatccttaggttaacacaagaaagccccaagaaagataagccaatttctctttaagaatattttcatcaagccaagagatttcaaataaatccaaactgaaaacaaaacaaaatggaagttctaacatcacctggcttatgtgtgttctgtcaacacttactaaataacacattcacctatttctgaacacacaaaaggaaaatatccttcatggacag

SEQ ID NO: 715322 - DNA, 564 bp, Homo sapiens
gtgtcatgagggcactctaggaaaatcctactgggtaagaatactgggatggagaaattaaacaactattcaactatttaggaaggcttggatctgtcccacatttcaaaggaygtcaatgtgataaactatcctttggacttttccaataatgagtttttaaaaatagctttgcatcatgtattgaaataaatttcaatctaaccaaagagatctcatatgtacataaggaatctctcaaaagctattcaaaaggaagtaaaagtgaataataataaactatttttataagaaatactgaagagccctatcaaggaaaatatctaaaaggttgtaaaataaagtcatccttaggttaacacaagaaagccccaagaaagataagccaatttctctttaagaatattttcatcaagccaagagatttcaaataaatccaaactgaaaacaaaacaaaatggaagttctaacatcacctggcttatgtgtgttctgtcaacacttactaaataacacattcacctatttctgaacacacaaaaggaaaatatccttcatggacag

SEQ ID NO: 715323 - DNA, 564 bp, Homo sapiens
gtgtcatgagggcactctaggaaaatcctactgggtaagaatactgggatggagaaattaaacaactattcaactatttaggaaggcttggatctgtcccacatttcaaaggatgtcaatgtgataaactatcctttggacttttccaataatgagtttttaaaamtagctttgcatcatgtattgaaataaatttcaatctaaccaaagagatctcatatgtacataaggaatctctcaaaagctattcaaaaggaagtaaaagtgaataataataaactatttttataagaaatactgaagagccctatcaaggaaaatatctaaaaggttgtaaaataaagtcatccttaggttaacacaagaaagccccaagaaagataagccaatttctctttaagaatattttcatcaagccaagagatttcaaataaatccaaactgaaaacaaaacaaaatggaagttctaacatcacctggcttatgtgtgttctgtcaacacttactaaataacacattcacctatttctgaacacacaaaaggaaaatatccttcatggacag

SEQ ID NO: 715324 - DNA, 1205 bp, Homo sapiens
acatctatctcctagttttgctcaaaatggaggttttccttttacgatttccaagaggagaaagggagagatgatgatttatgcagcaatgctcatagtgtaaatccacttcgaaatgttttaatttgacttattggaaatattttctgtgggaatcagcttttggttaatatactatacagagatgctcctcgacttacaatggggttacatcccaagaaatccattgtaggttgaaaatacgataagttgaaaatgcctttaaaggataagatggtcaagatggtgaaatgcagaagtcctgactcatgtgcaatggccattactgtttgcagcttcatgccgggaagttatcttgagtttcatctcaagaatrattgtcttcttctcatcagaagcaggaaacacagaggagtgtctgtagaaatgaagagatgggaaaacacgatatccaaaaaactgcaggcaatacagtccactgtgcagtattggctgttaccccgatggtcatggggctgcctggaagctgcggctcgctgcccctgcccagcagcaggagggagtattggacagcacgtccccagccccggaaaagatcaaaagtcaaaagtggaagtatggtttctactgaatgtgtatcactttggcagcaccgtaaagtcaaaaaattaagtcaaaccacggtaagtcagggaacatctgtctagctgtaggacaattcttgaagaactaattgcagtgctcccagcatggtgcaaatatgagggtaacattcagtttaattaaatgtcaaatcataggatggaaaatgacagtatctttgtccaaaaagcagatgcagaagcagcataatccacagaaattttcaatttcatttgctacccagcggctcaaatccattatatgttaagtattgttccagggcttcagcctccccggcagatttctcctgtttttgctgttgctgcagggactggccccgtcttctgaggaccaggcctccacggtggctgcacacctctgctttaaatacttttaaagttgcagaaaaggaccttcttgaagcaaaaaagacaccgtcctcttctgcatgggccaatgctcaacatacacatgcatggaaaaaaatttccaggaagtgataaactaagcatggggcaaataaaacaacacatgacctgatttcatctccaagtttgctcttg

SEQ ID NO: 715325 - DNA, 1205 bp, Homo sapiens
acatctatctcctagttttgctcaaaatggaggttttccttttacgatttccaagaggagaaagggagagatgatgatttatgcagcaatgctcatagtgtaaatccacttcgaaatgttttaatttgacttattggaaatattttctgtgggaatcagcttttggttaatatactatacagagatgctcctcgacttacaatggggttacatcccaagaaatccattgtaggttgaaaatacgataagttgaaaatgcctttaaaggataagatggtcaagatggtgaaatgcagaagtcctgactcatgtgcaatggccattactgtttgcagcttcatgccgggaagttatcttgagtttcatctcaagaataattgtcttcttctcatcagaagcaggaaacacagaggagtgtctgtagaaatgaagagatgggaaaacacgatatccaaaaaactgcaggcaatacagtccactgtgcagtattggctgttaccccgatggtcatggggctgcctggaagctgcggctcgctgcccctgcccagcagcaggagggagtattggacagcacgtccccagccccggaaaagatcaaaagtcaaaagtggaagtatggtttctactgaatgtgtatcactttggcagcamcgtaaagtcaaaaaattaagtcaaaccacggtaagtcagggaacatctgtctagctgtaggacaattcttgaagaactaattgcagtgctcccagcatggtgcaaatatgagggtaacattcagtttaattaaatgtcaaatcataggatggaaaatgacagtatctttgtccaaaaagcagatgcagaagcagcataatccacagaaattttcaatttcatttgctacccagcggctcaaatccattatatgttaagtattgttccagggcttcagcctccccggcagatttctcctgtttttgctgttgctgcagggactggccccgtcttctgaggaccaggcctccacggtggctgcacacctctgctttaaatacttttaaagttgcagaaaaggaccttcttgaagcaaaaaagacaccgtcctcttctgcatgggccaatgctcaacatacacatgcatggaaaaaaatttccaggaagtgataaactaagcatggggcaaataaaacaacacatgacctgatttcatctccaagtttgctcttg

SEQ ID NO: 715326 - DNA, 1205 bp, Homo sapiens
acatctatctcctagttttgctcaaaatggaggttttccttttacgatttccaagaggagaaagggagagatgatgatttatgcagcaatgctcatagtgtaaatccacttcgaaatgttttaatttgacttattggaaatattttctgtgggaatcagcttttggttaatatactatacagagatgctcctcgacttacaatggggttacatcccaagaaatccattgtaggttgaaaatacgataagttgaaaatgcctttaaaggataagatggtcaagatggtgaaatgcagaagtcctgactcatgtgcaatggccattactgtttgcagcttcatgccgggaagttatcttgagtttcatctcaagaataattgtcttcttctcatcagaagcaggaaacacagaggagtgtctgtagaaatgaagagatgggaaaacacgatatccaaaaaactgcaggcaatacagtccactgtgcagtattggctgttaccccgatggtcatggggctgcctggaagctgcggctcgctgcccctgcccagcagcaggagggagtattggacagcacgtccccagccccggaaaagatcaaaagtcaaaagtggaagtatggtttctactgaatgtgtatcactttggcagcaccgtaaagtcaaaaaattaagtcaaaccacggtaagtcagggaacatctgtctagctgtaggacaattcttgaagaactaattgcagtgctcccagcatggtgcaaatatgaggstaacattcagtttaattaaatgtcaaatcataggatggaaaatgacagtatctttgtccaaaaagcagatgcagaagcagcataatccacagaaattttcaatttcatttgctacccagcggctcaaatccattatatgttaagtattgttccagggcttcagcctccccggcagatttctcctgtttttgctgttgctgcagggactggccccgtcttctgaggaccaggcctccacggtggctgcacacctctgctttaaatacttttaaagttgcagaaaaggaccttcttgaagcaaaaaagacaccgtcctcttctgcatgggccaatgctcaacatacacatgcatggaaaaaaatttccaggaagtgataaactaagcatggggcaaataaaacaacacatgacctgatttcatctccaagtttgctcttg

SEQ ID NO: 715327 - DNA, 1205 bp, Homo sapiens
acatctatctcctagttttgctcaaaatggaggttttccttttacgatttccaagaggagaaagggagagatgatgatttatgcagcaatgctcatagtgtaaatccacttcgaaatgttttaatttgacttattggaaatattttctgtgggaatcagcttttggttaatatactatacagagatgctcctcgacttacaatggggttacatcccaagaaatccattgtaggttgaaaatacgataagttgaaaatgcctttaaaggataagatggtcaagatggtgaaatgcagaagtcctgactcatgtgcaatggccattactgtttgcagcttcatgccgggaagttatcttgagtttcatctcaagaataattgtcttcttctcatcagaagcaggaaacacagaggagtgtctgtagaaatgaagagatgggaaaacacgatatccaaaaaactgcaggcaatacagtccactgtgcagtattggctgttaccccgatggtcatggggctgcctggaagctgcggctcgctgcccctgcccagcagcaggagggagtattggacagcacgtccccagccccggaaaagatcaaaagtcaaaagtggaagtatggtttctactgaatgtgtatcactttggcagcaccgtaaagtcaaaaaattaagtcaaaccacggtaagtcagggaacatctgtctagctgtaggacaattcttgaagaactaattgcagtgctcccagcatggtgcaaatatgagggtaacattcagtttaattaaatgtcaaatcataggatggaaaatgacagtatctttgtccaaaaagcagatgcagaagcagcataatccacagaaattttcaatttcatttgctacccagcggctcaaatccattatatgttaagtattgttccagggcttcagcctccccggcagatttctcctgtttttgctgttgctgcagggactggccccgtcttctgaggaccaggcctccacggtggctgcacacctctgctttaaatacttttaaagttgcagaaaaggaccttctkgaagcaaaaaagacaccgtcctcttctgcatgggccaatgctcaacatacacatgcatggaaaaaaatttccaggaagtgataaactaagcatggggcaaataaaacaacacatgacctgatttcatctccaagtttgctcttg

SEQ ID NO: 715328 - DNA, 640 bp, Homo sapiens
agagcagtgcaagaacagactaatgcaaagggcaatgcgaattattgtgtgtatggaggcaaaaagcaaaattaatggggaggaaggacaataattgtttttttagtactacaataccaaagattggggaagaagtcaaagaaattatatcttttttatttttgaatattaagataaaaatcatacagccgaattcactctttgttttttgtttgtttgtttgttttagacgaagtttcactcttcttgcccaggatggagtgcagtggcaggatctcggctcaatgtgacctctgcctcctagattcaagcaattccctgmctcagcctcccaagtagctgggattacaggcatccgccatcatgcccagctaatttttcatatttttagtagataggatttcatcatgttggccaggctggtctcgaactcctgacctcaggtgatccaccgacctcggcctcccaaagtgttggaattacaggtgtgagccaccgcacccagccagaattcactttttttgacatagaattctgtgactcttgacaaacatatacattatgtaaacaccaccaaaataaagatatttaggctgggtgtggtgctcatgcctgtaatcccagcactttgggatgccga

SEQ ID NO: 715329 - DNA, 640 bp, Homo sapiens
agagcagtgcaagaacagactaatgcaaagggcaatgcgaattattgtgtgtatggaggcaaaaagcaaaattaatggggaggaaggacaataattgtttttttagtactacaataccaaagattggggaagaagtcaaagaaattatatcttttttatttttgaatattaagataaaaatcatacagccgaattcactctttgttttttgtttgtttgtttgttttagacgaagtttcactcttcttgcccaggatggagtgcagtggcaggatctcggctcaatgtgacctctgcctcctagattcaagcaattccctgactcagcctcccaagtagctgggattacaggcatccgccatcatgcccagctaatttttcatatttttagtagataggatttcatcatgttggccaggctggtctcraactcctgacctcaggtgatccaccgacctcggcctcccaaagtgttggaattacaggtgtgagccaccgcacccagccagaattcactttttttgacatagaattctgtgactcttgacaaacatatacattatgtaaacaccaccaaaataaagatatttaggctgggtgtggtgctcatgcctgtaatcccagcactttgggatgccga

SEQ ID NO: 715330 - DNA, 640 bp, Homo sapiens
agagcagtgcaagaacagactaatgcaaagggcaatgcgaattattgtgtgtatggaggcaaaaagcaaaattaatggggaggaaggacaataattgtttttttagtactacaataccaaagattggggaagaagtcaaagaaattatatcttttttatttttgaatattaagataaaaatcatacagccgaattcactctttgttttttgtttgtttgtttgttttagacgaagtttcactcttcttgcccaggatggagtgcagtggcaggatctcggctcaatgtgacctctgcctcctagattcaagcaattccctgactcagcctcccaagtagctgggattacaggcatccgccatcatgcccagctaatttttcatatttttagtagataggatttcatcatgttggccaggctggtctcgaactcctgacctcaggtgatccaccgacctcggcctcccaaagtgttggaattacaggtgtgagccaccgcacccagccagaattcactttttttgacatagaattctgtgactcttgacaaacatatacattatgtaaacaccaccaaaataaagatatttaggcygggtgtggtgctcatgcctgtaatcccagcactttgggatgccga

SEQ ID NO: 715331 - DNA, 396 bp, Homo sapiens
cttaaaacatatttttaacttaaaacaaattttaagttaaatttgttaacttaaaaataagtcaacaaataaaagacagcaatatgtatgttagagaaagcagctacagcaaagcttcttgttatcagatgcctgtgctccttttcttacttagatgacattggctgtgacatctcaccatgtgtgcaaaaacagttcccagccttccctgcagtggacataaaaagatttgaagggaggtgttatcattagcacataatggaagtgtcactgtttgaagataattatgtcaccagcttgggagatgagcaaaaaaaaaaaaaaaaaatagacaaaaaccctagaaatttaacaaaatcaaaaatcaacstacaaaataattccttttaaacagca

SEQ ID NO: 715332 - DNA, 640 bp, Homo sapiens
ccactatttttgtacagctatacaatgtgtgttgtaagctaagtgtttattacaaaagagtcaaacaaaaagcttaaaaaattaaaaagtttataaagtaaaactacagtaagtagaggttgatttattattgaagaaaagcttttaaaaataaatttagtgtagcctaaatatacagtgtttataaagcctacagtggtgtacagtaacgtcctaggccttcacattcactcaccactcactcactgactcacccagagcaacttccacttctgcgagctccattcattgtaaatgccctctacaggtataccattttttatcttttataccatattcttactgtaccttttctatgtttaagtatgtttagatacacaaataccattgtgttacagttgcctatggtattcagtacagtaatacgctgtacaggtttgtagcctagtagcaaaagaccatactaggtgtgtagcaggtataccatctgggttggtgtaagcacagtctggtgtttgtacaaggatgaaatcacctgacaactcattttcagagcataatcctatccagtgacactactttgaggtacctacctttgagcttaggtacrcagcagtgctgtgtgcaggatcagaaacaa

SEQ ID NO: 715333 - DNA, 621 bp, Homo sapiens
caaccaggctatctgcagttcctctgagccccctgtcattcctagaggccacctgcagttccttgccacctgtcttttcccaacataagcaattcatcaagccagcaaggagagtctctagagcagtctcctagtaagatggaggtttatataatgcaacataattccaggagtggcatctatcacctttgccatatactattggttgggagcaagtcccagatcccatccatgctcaaggagaggggcttacataaaggtttgaacactggaaagcaggatatgtgggagagtttagagtctgtccaccacaggtaatttatttagcctgcttgagtttctttttccccttctgctaagtgggaattgtaatctctaccctatagactgttgtctatgttgtgtgcatgacaagagggcagaacacaggacctggtgtggagtaggtcctyaacatatgagttaagtcttctgtctcgctctcttccctccctttcccttacagtgtgatagagcacagtatggcatccatgggttcttagaaactgtgactttaagcaaaataacatataataaaaccaatttcatcataggctagttgatataaacaagagttaagtt

SEQ ID NO: 715334 - DNA, 1878 bp, Homo sapiens
ggaaagagtgggacagtcaggacaactttgcccaagcctccagctcttctagtttcccgttcttttcatgtggaactcagttcaaagtactgggaagttcagaattcccatgaatactactttaagcttgaataatcaatagttatatttctatcgtctggcaccatagaattccaacaagaattctagctctattgggaattttctccattctcacttatcaagctgtctcccattctttctgaataattaagaaatccgtgtggccatgctttctctcagagttaatcataacaatatttcctttcgagctactgtttcttaaggcattggaatgtcaayggactaccctagtgaaggcagctatttttattgtttttcctctgaaccacttctgcttcaccagtcaaaatatttgtattctgtttattctgtccattcaatattatatttctcatatgttattacctgtgtactctccatcatccagacagagcctgagggagcagacgacctctgccactgcacttggctgaaggaaactggctgccatcatctctctctacacaggattctgaatccacactgcagatgggactgtccacttctctcagagctcctctaaccattacccccatgccttggcaaacttttcagcagtcaccaccgaagggccaaccttctcagtcttccattattctccaaactctcattctatcccgattcttatgcccctaatcacaaccagtccctaatactaccccatctcagccccaaatgctctattgtatctctacaactcagactgctggatcagtagcttttagtatattttcatgatttttttctgaatttaatgttcattatcagcccttaacaggtattcatctagaacttttcaaaaatgtctcccctttgaccttttagttgaatgctagttttctttcctagtggttggcaaggtttcctcctttatccccacttgggaatcattcttcctgactcatggcacatctgtgaaacatgatgcaacaagcacagactccaaaatccaatggttcaaaccccaactctactccttactagcctggtaaggattgacaattatttgacctcattctgcctcatcttactcatttttaacatttaaaaaataaaatgacaaaagcaccttactcaaaatgattttaagccttataaaataaagactaagtaaactgacataaacacagtaccataagcattactgatataaagtagatccactttcattactgaattaaaggttctaagaagaattgaaattaaatatagttttcttttattcaactcttcaaggcattttaaaatttatttttaaatcattaaataaaattgcatatatttaatgtgtatgacatgttttgaaatattaagctaattaaaaaatatattacttattttttatggtgaggacacttaagtctactctcttagcaatttttaagagtacaatatatttttattaactgtagccaccattatgtccaatggatctcttgaacttattcttcctaactgaaattttttatcccttgaccaacatcttcaagtgtatttgatctcagaacactccattctcttttcctaatgtaactcatacgttttcttgaaattcttattgcatagaattcgcttggagaaatgctgatttttaatttcaaacaaaaacaaacaaataaaagcataagaaaggtaaaatgaattcagtaagattatggtggttaataataagtataaattctaaattacaacccacatatcctagtactagaggatgcaaaaatttgattcataaaaagagaaccataaatagttgttgtaacggttcaataagcg

SEQ ID NO: 715335 - DNA, 1878 bp, Homo sapiens
ggaaagagtgggacagtcaggacaactttgcccaagcctccagctcttctagtttcccgttcttttcatgtggaactcagttcaaagtactgggaagttcagaattcccatgaatactactttaagcttgaataatcaatagttatatttctatcgtctggcaccatagaattccaacaagaattctagctctattgggaattttctccattctcacttatcaagctgtctcccattctttctgaataattaagaaatccgtgtggccatgctttctctcagagttaatcataacaatatttcctttcgagctactgtttcttaaggcattggaatgtcaacggactaccctagtgaaggcagctatttttattgtttttcctctgaaccacttctgcttcaccagtcaaaatatttgtattctgtttattctgtccattcaatattatatttctcatatgttattacctgtgtactctccatcatccagacagagcctgagggagcagmcgacctctgccactgcacttggctgaaggaaactggctgccatcatctctctctacacaggattctgaatccacactgcagatgggactgtccacttctctcagagctcctctaaccattacccccatgccttggcaaacttttcagcagtcaccaccgaagggccaaccttctcagtcttccattattctccaaactctcattctatcccgattcttatgcccctaatcacaaccagtccctaatactaccccatctcagccccaaatgctctattgtatctctacaactcagactgctggatcagtagcttttagtatattttcatgatttttttctgaatttaatgttcattatcagcccttaacaggtattcatctagaacttttcaaaaatgtctcccctttgaccttttagttgaatgctagttttctttcctagtggttggcaaggtttcctcctttatccccacttgggaatcattcttcctgactcatggcacatctgtgaaacatgatgcaacaagcacagactccaaaatccaatggttcaaaccccaactctactccttactagcctggtaaggattgacaattatttgacctcattctgcctcatcttactcatttttaacatttaaaaaataaaatgacaaaagcaccttactcaaaatgattttaagccttataaaataaagactaagtaaactgacataaacacagtaccataagcattactgatataaagtagatccactttcattactgaattaaaggttctaagaagaattgaaattaaatatagttttcttttattcaactcttcaaggcattttaaaatttatttttaaatcattaaataaaattgcatatatttaatgtgtatgacatgttttgaaatattaagctaattaaaaaatatattacttattttttatggtgaggacacttaagtctactctcttagcaatttttaagagtacaatatatttttattaactgtagccaccattatgtccaatggatctcttgaacttattcttcctaactgaaattttttatcccttgaccaacatcttcaagtgtatttgatctcagaacactccattctcttttcctaatgtaactcatacgttttcttgaaattcttattgcatagaattcgcttggagaaatgctgatttttaatttcaaacaaaaacaaacaaataaaagcataagaaaggtaaaatgaattcagtaagattatggtggttaataataagtataaattctaaattacaacccacatatcctagtactagaggatgcaaaaatttgattcataaaaagagaaccataaatagttgttgtaacggttcaataagcg

SEQ ID NO: 715336 - DNA, 654 bp, Homo sapiens
ccacggacctgggtgaatccgcgtcctgtataactgaggttgcagtaggtgagcttaacaaaggcacgtagctcattttgttgatgagttcagcaaaaacatttagctcattttgaggctggcctgctgaaaagtgttcagtctatagggttcacccgttaggcccagagagagcagagctgattcacagcagtacaacaaataagaaagtaaggactttcttatttcccttacctctttttctcccctcgtccaccctgatctgaatgaaaatgaggatcagaaacagtaattagtcagtggagaaagtcgcacgtgagaacgtgagacatgattcttccccaaggcgggctacctgcctaccacaggctctagcagtttgggtggaccaggggaaaggaaggtcttattcttgaatatagataggagttttcattcatgtattaaactgaatattttgatttatgattggagattaggcattcaagacttgtaaaagtgatccaaaaagccttggaacaacctgaattttcacccagtggcaggggaaagattatcctcactagtaggtttaaaagggcartcagggacaaaaataaataaaactagttgtatgactaagccctatgaattctgtgtgttcagagttctcat

SEQ ID NO: 715337 - DNA, 1320 bp, Homo sapiens
tggaaatggcatcagagaactgaatggaagatacacagctcaaatgcgttcctgagaacccttacattctatgacatcctagttaatgtgcactgggttgtaccaaaagctgcgcctattcagcagcagttctcaggctgatgtgatggtagacatatgcagtgagattctcaaagaatgtttttggggtaattcaactgtaatagcagatttcagaattttgtttataatcctaatgaatggcaaagatcctctatgatttaaggggaattttgctttaacatccactactctacaacacatctgtggattggggctggccaggtagtattatactcattttccagatgaggaaacacagcaatctctttgcccatcttagttcacaaagctcagtgaaaacttgtccctgggttctgtgccatgaatgccaatggcctaggtctacttcttagcttgccttgggggaaataaattgaaaacaatgatttctctgaggagctacttgtaggaaactcatcagctttagtttcagatacttgaataagacgctagtgtctcattcagcaagtccatctatcatccaacatttttgtaaccctcccttctgcaagatactttgctagcaaatgagtggaaagaagaggtgaggagtgttaggatttggagacttggtaacagcatatcagataaaaatcttgtcctgcccagtgggaatttacagaaaaaagaaagaaaaaaaggaaagaaaagacaccatttaccaagtgaacaggacctcaggagaccttaagaatattgcagtaccccagggttcattatagatgtatacctcaaggctagaagggacaaatggagagaatattcactggaacctggagtcagagagccaggtagagaaggaactgagagctttggccaaggttaccctgaagggagggagcagttgattctaatggagaactaacccagaggctcatcaacaggagagtggaaaataaatggtgatatatccatataatgagtagtatacaacaataaagggaataaattactcaggcatgctgcaatatgggtaaatcttaaaaataaattaagccaatgaaaccagacccagatatatactgtataattcaatttccatgaaattcaagaccaakcaaactaatctctgttgatagaaattatattagttatctcttgatgtggagactgagttggaaggaccattgaggacacttccgggatggtggaaatgctttatatttttgactcagttgtggttgcatggatatatatatatatatggatatatatata

SEQ ID NO: 715338 - DNA, 1320 bp, Homo sapiens
tggaaatggcatcagagaactgaatggaagatacacagctcaaatgcgttcctgagaacccttacattctatgacatcctagttaatgtgcactgggttgtaccaaaagctgcgcctattcagcagcagttctcaggctgatgtgatggtagacatatgcagtgagattctcaaagaatgtttttggggtaattcaactgtaatagcagatttcagaattttgtttataatcctaatgaatggcaaagatcctctatgatttaaggggaattttgctttaacatccactactctacaacacatctgtggattggggctggccaggtagtattatactcattttccagatgaggaaacacagcaatctctttgcccatcttagttcacaaagctcagtgaaaacttgtccctgggttctgtgccatgaatgccaatggcctaggtctacttcttagcttgccttgggggaaataaattgaaaacaatgatttctctgaggagctacttgtaggaaactcatcagctttagtttcagatacttgaataagacgctagtgtctcattcagcaagtccatctatcatccaacatttttgtaaccctcccttctgcaagatactttgctagcaaatgagtggaaagaagaggtgaggagtgttaggatttggagacttggtaacagcatatcagataaaaatcttgtcctgcccagtgggaatttacagaaaaaagaaagaaaaaaaggaaagaaaagacaccatttaccaagtgaacaggacctcaggagaccttaagaatattgcagtaccccagggttcattatagatgtatacctcaaggctagaagggacaaatggagagaatattcactggaacctggagtcagagagccaggtagagaaggaactgagagctttggccaaggttaccctgaagggagggagcagttgattctaatggagaactaacccagaggctcatcaacaggagagtggaaaataaatggtgatatatccatataatgagtagtatacaacaataaagggaataaattactcaggcatgctgcaatatgggtaaatcttaaaaataaattaagccaatgaaaccagacccagatatatactgtataattcaatttccatgaaattcaagaccaagcaaactaatctctgttgatagaaattatattagttatctcttgatgtggagactgagttggaaggaccattgaggacacttccgggatggtggaaatgctttatatttttgactcagttgtggttgcatggatatatatatatatatrgatatatatata

SEQ ID NO: 715339 - DNA, 1320 bp, Homo sapiens
tggaaatggcatcagagaactgaatggaagatacacagctcaaatgcgttcctgagaacccttacattctatgacatcctagttaatgtgcactgggttgtaccaaaagctgcgcctattcagcagcagttctcaggctgatgtgatggtagacatatgcagtgagattctcaaagaatgtttttggggtaattcaactgtaatagcagatttcagaattttgtttataatcctaatgaatggcaaagatcctctatgatttaaggggaattttgctttaacatccactactctacaacacatctgtggattggggctggccaggtagtattatactcattttccagatgaggaaacacagcaatctctttgcccatcttagttcacaaagctcagtgaaaacttgtccctgggttctgtgccatgaatgccaatggcctaggtctacttcttagcttgccttgggggaaataaattgaaaacaatgatttctctgaggagctacttgtaggaaactcatcagctttagtttcagatacttgaataagacgctagtgtctcattcagcaagtccatctatcatccaacatttttgtaaccctcccttctgcaagatactttgctagcaaatgagtggaaagaagaggtgaggagtgttaggatttggagacttggtaacagcatatcagataaaaatcttgtcctgcccagtgggaatttacagaaaaaagaaagaaaaaaaggaaagaaaagacaccatttaccaagtgaacaggacctcaggagaccttaagaatattgcagtaccccagggttcattatagatgtatacctcaaggctagaagggacaaatggagagaatattcactggaacctggagtcagagagccaggtagagaaggaactgagagctttggccaaggttaccctgaagggagggagcagttgattctaatggagaactaacccagaggctcatcaacaggagagtggaaaataaatggtgatatatccatataatgagtagtatacaacaataaagggaataaattactcaggcatgctgcaatatgggtaaatcttaaaaataaattaagccaatgaaaccagacccagatatatactgtataattcaatttccatgaaattcaagaccaagcaaactaatctctgttgatagaaattatattagttatctcttgatgtggagactgagttggaaggaccattgaggacacttccgggatggtggaaatgctttatatttttgactcagttgtggttgcatggatatatatatatatatgkatatatatata

SEQ ID NO: 715340 - DNA, 2459 bp, Homo sapiens
aatggtctttcagccgccaggctccaacttggctgactttagaagaaatcagccagccatggattgctggagattcagacacaagctttccaggccctgatgagtccttgttttcttccaggacaactgggttttgggactgtaagctatgacccagatcttggttcccatttcgcacatgaagagaagattggcccttaaaaagcaaaatgctttaaaacaaaaacaaagaaaagaaaaaaaaggaattcatttttttgcttgcaatttattgttttcttataatcttataatgaccatcaatttggattcagaaatacctgcatcaaaaggtcatatcggtgctaagacctgacttccctgcatctcagttgcctcctctgtaagatggcatcacaaacactccccatgccatcgggctgctgtcactggttcttgtgtgtggaaatgtcaatcccagggcctgaggtgtgcaaagtcaatagtggttctctccccacttccaccccccagtttttctcaaagcctgttgaatgtatgatgtgtcctaaatggaagtgcttccacggggcactgagaggatgggtgatctcttctcactgcagtcaactggctgaaacgctcaccttttcatcttagcatgtgagatgtgacactctgatccccggaattgtaaattcagactctcagagagctcaggatggcaaaatccaacctcttcgtttttaagatggggaaattggtttgcacaaggtcatgcagcaggtttgtggcagagctggaacccacacctgctgattcccaacctggtgctctgtctgtcatcstgggtgacaaggagccatggaggccgcagggaggaaggaccatgggatgctgtcttgatccctctggcctgtgactgtgagggaggctcactctgctctgtgagccccatcacatgggtgtcgtgtgtgatggtgagtggtgcctcccttatagaaacgaaaccccaagagccaggaagagcccatcatcatccagattcatagggaaagccagctcctatcagaggcatcgaggggtgaggaggcctgccaaacttggagttgagtcccattcctgcctcttgccaactgtgtgccctgggcaggggatttcttgagttgagcctgtttccttacgaactgaggagagtagaattacaaacccataggttaatgtgaagattcaacaagttaatataatactaatacttaatgagcatttactatgtgtcaggttgggttctaaactctttatatgtatttgcttatttaatcttcataacaacatagtttgctgctaagggaatggaggttcaggatggttaaacaaaccccagggacaaaactggagaggacagtgtagattttgagcccaggtagcctggctctggcactctactcttaaccactgtgctctttgacctcaatttcggcagaatccagtgcttagcacatagaagctccaaaaatgtccacccctcccttgctgtctgtaaccagccttcctcatccaccccttctggacctcaagagtgggttctagaagcagggttctgttatttctcagacaccaaaagttgacccaactcgattgctctatcttgagttattttacttctctgttttgttgttggttttggtttttattgccttttctttgatcaaaagcaagactgaattgcctacaaaggcaaatctgattctgtgctcctgagcaccaagtgagcctcagcgatcggctcagcttagctcctaatgccaaccagtgaaggagcatggtttcttggtttctaactgctcacattcatggctaaacccccagccctagacgagcttccttgaccaatctgggggaaaaatacaccttcttgattgtgggtttctggcgacacttgttcaatttcctggttactatagagaccttgtcaacacatccaaatactcttcttagcaaagaaattttcttctccccagtctctgcatagccccaaagaacacagggtctcaggaagaagcaggaaaggcttagcctatgggccttctgagcccagcccaggctctggttccctttcagctgcttgcagactttgagcctacagaggataaaatgagggaatgaacaaggagcgctgtttgagtgggactgagcttcagggcaaataaagggaagtgaatcagaacaatggaaaatctggccagggtatttaaacattcaaatttctttctttttccagtgacctaaggacaggcaatctgcactgggaatctggatcccttactcgtaatattatggctggaagggcaaggtcaagactcccagtggactggatactagggttgggtctcaggtctgctcctgatggccgaggccagcagctacattgcatttatacaaatggttagcggagctcccaagctggctcctgtctttcc

SEQ ID NO: 715341 - DNA, 1473 bp, Homo sapiens
tgcttgcgatcttagatgttttaaagctgcttgtgggaatacatatttcattttctattaggaatcaattaggtgtgaaaatttctcagttcaatggaggatatggccactacaaaataagaaaaaaaaattattacattagaatttctaacttccttcccttttcacccaccctagaagccctctcaagaatgtcaagagaatctcatgcctgtaatcccagtgctttgggaggccaaggcaggaagatcactggaggccaggagttcgagaccagcctgggcaacatagtgagactctgtctgtacaaaataatttttttcaaattagccaggtatatggtattacacatttgtagtcccaactacttgggaaggtgaggtgggagatctgcttcacttgaacccaggagttcaaggttacagtgagctatgactgtgccactacattctggcagaaagagatactgtctcaaaagaaaaaaaagaaaaaaacaaaaaacagtgtcaagagttttaaacatccctaatgaaggataatcatcttttgcttctggaaacctggcttgcttgtgtctccatccacatatctgtctttatctctctctaatctcagtttgcctgagtcataccaccatttatagtataggctagcaccttttcctaaaatcaagagcaaaagagaatcatttttctaagaccagatttttgaaaccagcatccaggcctgcaccccaggaaatacaggagtatctgatgaaagccattccattcagaggaggatgctcctccttctttatgcttttttccaaaatacttcaaaaacaaccaccacaaaaagacatgtggccaatctgtctcctttgagagtccactcgctgagcttggaggggtgcttcctgttcttagtcacagatattatctagatatttctaatgccccttccttccccccgtcccacctgcaaactggaattgaagaaagaagtgtctcaaaaacattaaatcctctcttgcctggygagatatctttattcctgagtaactcctccaaataacacccctgagtctctgaaaatgtaaaaattgcctgtctagttgaggcaaatgaaggctaaattgagtcataatttccctctagattctcattcacctctagctgtaggaagcatcaccaatacagaattgatgaaaagtgtataaacatattatccagattctcaggctgtcacagggagcatttttgttgttgttcttgattttaatgtaagcaaagctgagcagtgggagtgttcaggttttagaagagatttttctttctgaaagataatatttctcattctgaatgattttcttctttttcttttaaattccaaggcaaattctgaaatctgtttcgacttgacttatttttggatcctcacctgtatcttaattacgtagcaagaagtaagcacaattgatgagcaatccat

SEQ ID NO: 715342 - DNA, 1473 bp, Homo sapiens
tgcttgcgatcttagatgttttaaagctgcttgtgggaatacatatttcattttctattaggaatcaattaggtgtgaaaatttctcagttcaatggaggatatggccactacaaaataagaaaaaaaaattattacattagaatttctaacttccttcccttttcacccaccctagaagccctctcaagaatgtcaagagaatctcatgcctgtaatcccagtgctttgggaggccaaggcaggaagatcactggaggccaggagttcgagaccagcctgggcaacatagtgagactctgtctgtacaaaataatttttttcaaattagccaggtatatggtattacacatttgtagtcccaactacttgggaaggtgaggtgggagatctgcttcacttgaacccaggagttcaaggttacagtgagctatgactgtgccactacattctggcagaaagagatactgtctcaaaagaaaaaaaagaaaaaaacaaaaaacagtgtcaagagttttaaacatccctaatgaaggataatcatcttttgcttctggaaacctggcttgcttgtgtctccatccacatatctgtctttatctctctctaatctcagtttgcctgagtcataccaccatttatagtataggctagcaccttttcctaaaatcaagagcaaaagagaatcatttttctaagaccagatttttgaaaccagcatccaggcctgcaccccaggaaatacaggagtatctgatgaaagccattccattcagaggaggatgctcctccttctttatgcttttttccaaaatacttcaaaaacaaccaccacaaaaagacatgtggccaatctgtctcctttgagagtccactcgctgagcttggaggggtgcttcctgttcttagtcacagatattatctagatatttctaatgccccttccttccccccgtcccacctgcaaactggaattgaagaaagaagtgtctcaaaaacattaaatcctctcttgcctggcgagatatctttattcctgagtaactcctccaaataacacccctgagtctctgaaaatgtaaaaattgcctgtctagttgaggcaaatgaaggctaaattgagtcataatttccctctagattctcattcacctctagctgtaggaagcatcacmaatacagaattgatgaaaagtgtataaacatattatccagattctcaggctgtcacagggagcatttttgttgttgttcttgattttaatgtaagcaaagctgagcagtgggagtgttcaggttttagaagagatttttctttctgaaagataatatttctcattctgaatgattttcttctttttcttttaaattccaaggcaaattctgaaatctgtttcgacttgacttatttttggatcctcacctgtatcttaattacgtagcaagaagtaagcacaattgatgagcaatccat

SEQ ID NO: 715343 - DNA, 1266 bp, Homo sapiens
gaagagaaaaagctgaactgaaatgcagttgcaagagaggcctcagtgaatcacacagaagtctaaagctaaaatggtgtcacctatgatttgatgcaggctctgcctaaggagggagcagacctggagcattgccagcagtactatctggggtgagtcacattccttcagcctagggaaatttgtgttggggaactcagctgtgcacccttagcaggcaccactccaggcagctgagggaataagacccttggtcctgcagtgtggtatctggatggtgtgtccacaccacccactataaaattttagggctttctggcccttgcttaatattaacatttaccagaacattcatattcttcatgaagttttaaccagaaaaaaattcagacgtcactcacccaatctatcttacactcaaggatatcataaaagatttaaacatttaaatttggaggccaaattcctcagggaaataaagacagagtttgtctgccatttctccatttttttctgtgtagaatttataccgaacaattaaatgacattgagtcaacataactcactgagcaatgaatatgcatcgagttaccatgactcaaatattcctaactgcatcatgaattgtttattgaacaacttattctagaagcttggttttgccggggataaacctcatgcttgctggttttcagtttctagaatcctgtctcattctgggtctaggaataagtagagtgttagttcagttcagttcaggcctttcgcctttttttctcttctctaaaattcctcatagatcattggtggtaatcatatttttgatgtcttaataacagtgccaagactttttctgccgctacctccttctcatcagctcagctaagtgtattctattcaaagaacttcccactatcctctgcttaggccaagctcctcttacggcccaagacaattttcagtagtgtgatttttatcttgtcatccttatgtcatacaaaagaaaagaggttgaggctatcacttattagaagactgaaaagtgatgcatcctaaccctgatagtaaataagcaagtttttgttagattagtataaacacaatcaataaaacattaattattcccatggtatccagaaataccaataataagcctggaattcataagaaaacccatcctcaaaggctatagaaagtcacaaacctgcaacgaaggagtgctcrcgagaaattattcaaaatgagcacaccaagagtttatttgtt

SEQ ID NO: 715344 - DNA, 1834 bp, Homo sapiens
tgcatagcaacagagatgccttggacctaaagccttggtaaccctttgttaacatacttagataagagaaattttcgagactgtctattcacctttaaaacaaacaaaagactctgtctttgctttgttgcgtgcagactaaagctctgaggtagtgattgacttccccaagccccacatctagaaagaggagttaatatgacattatatatcttatggaggagccatcagcagatcatctgtggcagattgtggaatttgagtgaaaagatgaaccactataaaagccaaaaagcaaaaaacaacacaaaaccccaataaacaaaaggttggtccaactgctgtttgcctgaagctggcatctgagaagaactttcccagaaacaaacaacacctgaaattaccatgtgtaaatatgatgggaaggaataactatgacagaaacttgaaaaatccagggtcttactgtttgcttcttgcagctttgcatgtgtgtagtttcttctctaatatgcagaactctttaaagtaaaagcaacaagggaacttctctaggactctcattcccttcttggatttctgcctgtccaccatgatttctcctgtccacaccatatctgcaaggtgggccatcctgaattcatcatgttgtctttattctatcattttaagactttgtagatttacattaaacccttcaaagattttcctaattgagaattcaaaatctagaaatattaattgaaatattatatgacaggcactgcactcaatcctgggattacaggattgagccaaacagatataattcctcgctttgctaagcttaaaaaaggccatatacatatttccctatttccctgaactcctatattggattattcaaatacttctttttttttttttttttttttgctttctacgggccaattactctaaccttgtgacattacctattgactgttttcacatttatctctgatatgcacaaactttcaaagctaacaatatattggtctgaaatcatatgttattttaaggaacattatttacattatatttccaagtgccttcaggctgtttctatttttatgtgggctgcttcctctcctttgttttctgagtctaattaagcttgagaggtatcatgaaataggtcagacatatttggatttgaatttttgcttctctgtctctgtccctctctctttccctatatatatgcataaatttggaaattttaatgtactatctctgagcctcagtactctcagttaaaatggggatgatattaccatgtaaggtggtgatgaagattaaaatatgtgtgtatatgagtgtacttatgtatgtgtataaatatatacatattatacttttaaatggagagatatttatttaaaaccatgactggcatataatgggttctcattaagtatcatttgcaactcttcctagtcaattattcttattaaatgaggactcttttggttccctttctcctcaggcctaccactggagtctgtgtaaaggtccttgcattagcttcctatagttttttctctttaatcctgcacttgtaattccccaggtgctttcaccatgttactcccctgcctaggtgcatactcaaacatgagaggacttccgaaagttcatggaaaatgcatattatggaaaactatgcatggatttaaaaaaaatttttgcaccaaaataaactcatactaacttgttataacatatctgaacaaaatgtagtttgaggcactragaagaagacatctgtttgaaaagaaccccatcagaacaacatgaattctgctaaaattaa

SEQ ID NO: 715345 - DNA, 1742 bp, Homo sapiens
gggtcagctgtgtataggggcccacacagaatttggaatccaaatacatctctggatccccaggcctgtgtttgactcgccaggtagtaatgagatgtctccattttctgcaggctgaatgattccctcagagcagaagtataagcatatttattgtttttccttctatcataaacagttattagttgtggccctttctcccttccaaataggtgcccaaatttctggaagtggaaagggcccaactttcccatatcagggggtgggccccactgggcgtgagccaatcagtgtcttctgtcctgtgagctcccgatttatgctggtctataacctgagatggccttctcaggatggacctccagggattgctggaacttggactcttgtcagcctggtaaatggtatgtcttagatctgctgcagccgtcgtggaaaacttgaagctgccaggagagaggggttccaacatgtggtggctaaagaatgaatccaactcaaaggaagcagagccaagaaatggatccatgctgtttgaatcttggatcaaattgtgcctggatctccagtgagacaataaattcctgtattactcaagcctatttgagattgttttctttcacttgaaacattaaacttttaaattgatacaccctagttaaattataaactgtgtgacagcagggactgtgtctctctcttttttttctttcttttttttttgttttgaaacagagtttcactaccgtcacccaggctggagtgcagtggtgtgatcttggcttactgcaacctccgcctcctgggttcaagtgattcttgtgcctcggcctcccaagtagctgggaccacaggtgtctgccaccatgcctggctaattttttgtatttttggtagagatggggtttcaccatgttggctaggctggtctcaaactcctgacctcaaatgaccaaccaacttggcctcccaacatgctgggattacaggcgtgagccattgcgccyggcccaagactgtttctcttgatcacttatgtgtcccctggcacgtggtaaggattcaataaataacttttgaatggatgcattttagctgcaaggaacacccataaactctcttttactcagctgacagctaaggaatctggtgttatataagaaagtgatgatgtggatctataagttggaccttaccccaacactgggatttttctaatcacaggaaatcttccagtaaatatgttggggtctttgaggaggccccaaaatagcagtctgctcccttctctgtgaattttgaattgaatcagaagatagcagcaagctagatgaggaccaaaaataaccttttctactgataaagctgatattagagaacgtggcttatatcatcagacaatcgagcttcccgatactcaacttcagagttaggcagacttggcggctcgatgacaggcagctgagctggaatgggcctactcttcccaccccacgggagcgaagcttgctcccaagaagaaaagagaggatgatataaggcacagttcctccttccaaactcaccagtcatattaaaccactcctccttctcagggaagagggggcgggtggagagaagcaaggagtgtttggactcctttcagaagaaagaaaacatcaggagtggaaagacccagtctccctcacacacacacgtgtgatttggtcaggtcattgattctactttgttttcaatcaaaa

SEQ ID NO: 715346 - DNA, 600 bp, Homo sapiens
tttttttcctgtgaatggtctaagcttcctatttcctgtttctttgtatattttgtggttttttgttgagaacgttgcattttaagtgttacaatgtaatgaccctcaaaatgtgattctctcagtcacctgggattgctgggttttgcttgttgaggtctgaagctccccttttgttacttttccaaactatttttgcaaagtgtttcttccttgtgcttgtgtggtcactgaaatttgtttcattatctctgcagtcagccagccacctaacatggatttccttaaatagatggctttaaatggggtggggcagaggaggattttgtctctttgataaaatcttctgaaggatgtccctggggaagccactgttgctgagagggccaaataaaccaaggcaagcatccgggctggtcctcagagacccattggacccaccaaggtgcagaacccayggttttggaggacagagttccgctgctcgccctggcatcagccagctgcttcaggaactcaggctcaggaatgggggagtgttggctggttggcacatgccactcactcgtgaagatcagcagcctctctcttcattgttta

SEQ ID NO: 715347 - DNA, 1636 bp, Homo sapiens
gggtgatatctcatttttattttttaaactacatatacgctttgtacactttcagatattagaacttmaataaaattataaaaaaagaaacagagagggaaaaaataattaagtataattgtcaagatggagctaaaaaataacacgggtgaacaaggtgccacccacatctaagcttccttcccatgtcatgcaatgcctctcctcatctgctccatcaatcaataaaggcataatcactcctgtgatacctttaagaaaagaacacgctttaagaaaagaaacgctctctcgaagccgagtgcggtggctcacacctgtaatcccagcactttgggaggccgaggcaggcggatcacctgaggtcaggagttggagaccagcctggccgacatggcgaaaccccatctctactaaaaatacaaaaattagctaggcatggtggcacatgcctgtaagcccagctacttgggaggcctcagcctcccaagaccatgagaatcgcttgaacccaggaggcagaggctgcagtgagctgagactgtgccactgcactccagcctgggcaacagaaagagactgtctcaaaaaaaaaaaaaaaaaaaaaagaacatgctctcttattcaaggttacccttctatcactccaaggattcaccccataatcttatctttcttgatatgttacactcactaaaatgttcacatcaaatcaagtttgtagacacttgtccttaccaccttacaaaaagtgagatggtatcaacagaggtaagacactgcttttacctgcatgtcacttttggcagctttcgcagcattgaaaagatcattggctggtggctctgactgtttccggctatgacgatgtaccgcttgggaccctttctttggatattttgccacctgatacacataaaaagatcagaaatatgaaaaaaaggtaacagtgacattaacacttggtttcatcattatcacacaagtaggcttacgctgccaattccacagcagtctgagttagactcagtcctgaaataattgatttttatattatgaagtttattaacttttttccctttaaaaaaaaaattccttgagtctccttcccgtatctctataaccaaacatccttttcttttcttttctcttcgaaatttctcttcttcctatttccgtcccttaatactttgtaaatcttgtccttttttgaaccatatcacctgaacctcttaggttttctcttttttttgagacggagtctcgctctgtcgcccaggctggcgtgcagtggcgtgatctcggctcactgccagctctgcccccggggttcgtgccattctcctgcctcagcctcccgaatagctgggctgcttcccccacaagattcaaaagaaaactggctgactcaccggcgttgttttcagtggtcgttttgctgctttcttcttcacaccgcgattgaagctgtcctcaaatcattttcttgtcttcttgtctatttgtatgaattactgagttacattctcattgctacttatttaagcaaagtattcttagtttgttaagaacaaagaactacaaattgtgttcattttctgtcctttcctgttcttagactaaattacctgaaata

SEQ ID NO: 715348 - DNA, 1636 bp, Homo sapiens
gggtgatatctcatttttattttttaaactacatatacgctttgtacactttcagatattagaacttcaataaaattatraaaaaagaaacagagagggaaaaaataattaagtataattgtcaagatggagctaaaaaataacacgggtgaacaaggtgccacccacatctaagcttccttcccatgtcatgcaatgcctctcctcatctgctccatcaatcaataaaggcataatcactcctgtgatacctttaagaaaagaacacgctttaagaaaagaaacgctctctcgaagccgagtgcggtggctcacacctgtaatcccagcactttgggaggccgaggcaggcggatcacctgaggtcaggagttggagaccagcctggccgacatggcgaaaccccatctctactaaaaatacaaaaattagctaggcatggtggcacatgcctgtaagcccagctacttgggaggcctcagcctcccaagaccatgagaatcgcttgaacccaggaggcagaggctgcagtgagctgagactgtgccactgcactccagcctgggcaacagaaagagactgtctcaaaaaaaaaaaaaaaaaaaaaagaacatgctctcttattcaaggttacccttctatcactccaaggattcaccccataatcttatctttcttgatatgttacactcactaaaatgttcacatcaaatcaagtttgtagacacttgtccttaccaccttacaaaaagtgagatggtatcaacagaggtaagacactgcttttacctgcatgtcacttttggcagctttcgcagcattgaaaagatcattggctggtggctctgactgtttccggctatgacgatgtaccgcttgggaccctttctttggatattttgccacctgatacacataaaaagatcagaaatatgaaaaaaaggtaacagtgacattaacacttggtttcatcattatcacacaagtaggcttacgctgccaattccacagcagtctgagttagactcagtcctgaaataattgatttttatattatgaagtttattaacttttttccctttaaaaaaaaaattccttgagtctccttcccgtatctctataaccaaacatccttttcttttcttttctcttcgaaatttctcttcttcctatttccgtcccttaatactttgtaaatcttgtccttttttgaaccatatcacctgaacctcttaggttttctcttttttttgagacggagtctcgctctgtcgcccaggctggcgtgcagtggcgtgatctcggctcactgccagctctgcccccggggttcgtgccattctcctgcctcagcctcccgaatagctgggctgcttcccccacaagattcaaaagaaaactggctgactcaccggcgttgttttcagtggtcgttttgctgctttcttcttcacaccgcgattgaagctgtcctcaaatcattttcttgtcttcttgtctatttgtatgaattactgagttacattctcattgctacttatttaagcaaagtattcttagtttgttaagaacaaagaactacaaattgtgttcattttctgtcctttcctgttcttagactaaattacctgaaata

SEQ ID NO: 715349 - DNA, 723 bp, Homo sapiens
tttacagaaaagaaaattaaggcctagggggaagttagctccccaagttcacacaggtctaaaatttgaacccccacctgactccaaagttctgaaactagagatggactagttttagggggttatgactttaagaaaaataaaaatctatgaaaacaaagtttggtacagggccttagaaaggatttacacaagtgagggtcttgaagcttacatttcattagcttcatgattacacagcatcctagtgaaaattatgctgtctccaaagataacagacaagcaaaccagaaagattaggatgcaaagaggttttatctttcctaccactctccttgctgaaactgcctcctttaaaagtatttcccaggtgtgttcctggaatctttcctaaaagcagaaagcaggaagcaagtgtttttgcttttgtcagaatgtcagtgtcagaatgagagacagaagaaaacagaaatttagtaaagatgttcataagtgggtctccgacatcaaggaagagaaagagatcaagaagcaacaaaagtcccccagacatctaggtggacacaggccagcagtgaaagtaaagctgctgtatgtcaaaatgtgtggtctgggagtttccggayagctgaacacatggaggtccccggaggctggcgtgcccagggagggcgtagaagctccatgcccctggccccatacctgaccctatgcatctcttca

SEQ ID NO: 715350 - DNA, 1025 bp, Homo sapiens
attttctttgaaacatatggctacttgagataatgggagtgctaaaagcaaggagcccgcaagtctagacccattccaaaggccacgaggggttttagaccctggacccctgacatgttccaagccctgcctcaggttstctcccaacactcagcttttctcccaacactgtggacatatcctgcccagcatcatcctacagtgtttactggtcacctgatatgcacagcacattgtgccagaacagagaggatagtcatttggttttacagactggttacaaagattaagacaaaaaacaaataggtgaaatttatgaacttaatgttgagagaataaagcaagtttcgggagaatacatacagtgtgatcccatttctgttagttaagaaacaagcaaaaataaatctatcactagggattcacatgtagtgaaaccatagaggaaaacaaagaaaggaaacacacaaaatgcaggatcatggatatggtgaagggcaggattagttatttatacattttgcacatattaaataatttttgtgtagatgtttaatgaaaatcatgggggaaaggagaagccacagtacagaggactgaagaatgccagacgaatcacagtggataggaactagtgacctgctttccaattttgagatagctgatcttctgccagtcccactctcttttgtctaagatgacagtgccaacgatgttgccaccttctccaaaagggttgagtagcctggaagacaaaaggttagccattgtcattgtgacagtgccaactcttcggggacctggagaaggcttagggcaggggtgtccaatcttttggcttccctgggccacactggaagaactgtcttgggccacacataaaacactaatgatagctgataaactaaaaaacaaaacaaacaaacaaaaacttgcaaaaagaatctcataatgctttaagaaagtttacgaatttgtgttgggccgcatgcggtccataggctgtgggttggacaagcttggca

SEQ ID NO: 715351 - DNA, 1641 bp, Homo sapiens
tgcatggagtactcaatgtatgccctattctggaaagcctgtcttggggctgtgtcttttagggtactatagagccttccggaaattttagcaatgctttatagttgaacactgagccacaatgactctaaaaatagatattttcttctgcctttctactgagattttctagtcccgctcatcactcagcagctgaataatagaattatagatgaaaatataataaataatacataaaataaaataaaataggtgagattatcttctgctttccaaatgtgatttctcagacccttctcagaaaccagcacctgatgaaaaaggttgaataataaacctatgtctggcccagtctagttggtctgtgcatggtgaacatccaattctgaggagatattaaattccaagaaggtatacgttcttttgaatttctaagtggattaaatgaagcttatcggtacaacacataggatatctgtagtacattagctcttataaccttgtagaagataagagaggaccttgcctcaagattttcagattagttactcatgtgagttgaaattttaaaatcttagtgtgaatttatttaatcctttgatagttatgaaagtgttggctgggagcagaatttgataataagggaaagagtgagtataggtcaattttttaaagttgcaaacaataacatttcctccagctattatagtttaaacagtgagggatcgattaagggggagagctagctcccacaattactgggatagctgaatggattaattcaaagctggacttctgggaatagctcctaaaaacacactgcagagccgcagtcctcacttgcaagccagatgccacacaccgtgcctgtgtcccctcatgactcagttcccttatgaatgcatctgaacagcaattccctaagtcatctgcaaaacagttgtgagtgaggctgggaaatgtagttgttatttctttttaaaagtttgtttaattttgttttctgctttttgcttttccctttctgcttgctggaagagagttggagtggatattgagcaagccgagacacgatatatatttggaggtggggaaatcagaaggccctcagtgaaatgtctctctggagacacgtggggagtgagggctgccaggagggctcagtttcagcaagatgaatgagagagrggggaacgagaaggaagataaaggaatctactttatctaggtacttgtaggaagtacctagaagtattttgtaacaataccacatataaataacacctggcagagtacataaaatattaaatatcaccatataaaattattttacagttttcattatatttagtcttttttctttttcatttgattatcacaagaatactgtgtggcaggtaaagagtagtaaattagtttgaattagttttaatatcacctaattcattcactacccaatatatatgttttatacatttgtcgtatgggtagttgttttaaactggagtgtaactttattgaaaatttaagagttttcaatttttttattttaaaaattggcattttctagcctttttcttacttttttgtctatttttggaccaggtgttgaaaatctctccagtggttaatagcttcaca

SEQ ID NO: 715352 - DNA, 1641 bp, Homo sapiens
tgcatggagtactcaatgtatgccctattctggaaagcctgtcttggggctgtgtcttttagggtactatagagccttccggaaattttagcaatgctttatagttgaacactgagccacaatgactctaaaaatagatattttcttctgcctttctactgagattttctagtcccgctcatcactcagcagctgaataatagaattatagatgaaaatataataaataatacataaaataaaataaaataggtgagattatcttctgctttccaaatgtgatttctcagacccttctcagaaaccagcacctgatgaaaaaggttgaataataaacctatgtctggcccagtctagttggtctgtgcatggtgaacatccaattctgaggagatattaaattccaagaaggtatacgttcttttgaatttctaagtggattaaatgaagcttatcggtacaacacataggatatctgtagtacattagctcttataaccttgtagaagataagagaggaccttgcctcaagattttcagattagttactcatgtgagttgaaattttaaaatcttagtgtgaatttatttaatcctttgatagttatgaaagtgttggctgggagcagaatttgataataagggaaagagtgagtataggtcaattttttaaagttgcaaacaataacatttcctccagctattatagtttaaacagtgagggatcgattaagggggagagctagctcccacaattactgggatagctgaatggattaattcaaagctggacttctgggaatagctcctaaaaacacactgcagagccgcagtcctcacttgcaagccagatgccacacaccgtgcctgtgtcccctcatgactcagttcccttatgaatgcatctgaacagcaattccctaagtcatctgcaaaacagttgtgagtgaggctgggaaatgtagttgttatttctttttaaaagtttgtttaattttgttttctgctttttgcttttccctttctgcttgctggaagagagttggagtggatattgagcaagccgagacacgatatatatttggaggtggggaaatcagaaggccctcagtgaaatgtctctctggagacacgtggggagtgagggctgccaggagggctcagtttcagcaagatgaatgagagagaggggaacgagaaggaagataaaggaatctactttatctaggtacttgtaggaagtacctagaagtattttgtaacaawaccacatataaataacacctggcagagtacataaaatattaaatatcaccatataaaattattttacagttttcattatatttagtcttttttctttttcatttgattatcacaagaatactgtgtggcaggtaaagagtagtaaattagtttgaattagttttaatatcacctaattcattcactacccaatatatatgttttatacatttgtcgtatgggtagttgttttaaactggagtgtaactttattgaaaatttaagagttttcaatttttttattttaaaaattggcattttctagcctttttcttacttttttgtctatttttggaccaggtgttgaaaatctctccagtggttaatagcttcaca

SEQ ID NO: 715353 - DNA, 597 bp, Homo sapiens
acacacactcatactcacaccccacggttctttttgttccgggccaggagcactttcacaagtggttagaaagtcttgggcgccatctaacgggagcagcaaaaagttgacgctgggtggaggttaggcccgacaggagcccaggatgggcggaggagatcctctctcccactctctgcactcctgggtcttgaccccctgcttcccaattaccaccaccaaaaacatacacacacactcgagaactgaggggcctccggaaacctccttgcccagggcctgagggcagccctgactgcccgctcggggaccctcccctgagccccagccttgcatgccttcgggcgttccctaaggcgcacagaagaggaaggatcgttttgcgcctgtcttaatacggmcccggtgtcatgcaagctctcgctggttttcctttggcctgtgatggaaagtccgaagaggcccgaggcaggcgcacctgcttctggaaaggaacagccacgcaattaaggagtctgcagccagaggggcttttagaggagagagagggagttcaaagaggataatggcaaggaagcaattgaggacttggtccag

SEQ ID NO: 715354 - DNA, 599 bp, Homo sapiens
ggagttcaagaccagcctgaccaacatggagaaaccccgtctctactaaaaacacaaaaaaattagcctggcatggtggcatgcacctgtaatcccagttactcggaaggctgaggcaggagaattgcttgaacctgggaggcagggattgcggtgagccaagatcgcaccattgcactccggcctgggcaacgagagcaaaactctgtctcaaaaaaaaacaaaaaaagatgtacatggcagcattagtaccatcatataaatgttctgaagaaattaataaaacgggaaaatggctgcaatttattattaaatttaaaaatcaaggctgggtgcgttggctcatayctgtaatcccagcactttgggaggccaaagtgggtggattgcttgagcccaggagttcaaggccagcctggacaatatagcaagaccccatctctacaaaaaaatacaaaaaattagccaggcatggtggtgcacacctgcagtcccagctacttaggaggctaaggtgggaggatcacttgagcccaggagacagaggttgcagtaagccaagatcgcaccactgcattacagcctgggtgacagagtga

SEQ ID NO: 715355 - DNA, 248 bp, Homo sapiens
caagaccctggctctaaaaataattaaattaaaaaaaattttaaaaacaytatctaaaaaaaagaaaaagatacttgaggaaaaaaatttgcaatgcacatgagaggtcaaaatttaacattcaaacttattaaaaagttcttttaagtaataatttaacttctaaaaccaaaatagagatataggcaacaaacatgaaaaattcacagaagaggacattcaaatgtccaaaacatactagggagaaa

SEQ ID NO: 715356 - DNA, 1400 bp, Homo sapiens
attcccttcttgagcaggtggttaagtccacacccaaaccacctttcttatgggattctcacacacctcccactccagggccactatgcctcagcccccatgccctggagcctggtaccagacaactaggacagcacttatgccccagaaattactcaaattagccaatccaaagggagcctttgaaacctaaccacaccctgcttgccatgcatactccaacaagctgctaccctgcctccaggtgggtgcccctatgtggccctgcctggcagccttctctcattcagagctgcaagtaacaaaatagtctgcctttcatctatccaagcgtcattatgttatgtcttgccatcaaaagaattttataaaagagcaggacactgtttaagagggcttcattttcaggactgaatgcatggactcaattggcttaagcaacaagaaaattttctctcttctgtaacaagaaatccaaaagatggcagcttcaggtacacactgttgaaggcttactttcctcttctctgtatttctgaaggttctttccttcttaaatgctgatttttcctttagggtgttaacaagataattcccattgttccaggcatcctgaccagatataacaatggccataggtaagaagaagaaaagaaaacaaaactcttcctgttatcttcctttaagagtgagaaaaaaactctttgagaaactcccacctccctatacccaaaagactttcccaggaacatcatcagacaaaatcctattgtatattacatccctaatcctgcaccaatcactaaaaagggaagaaccaacagattcaattgaacagaattctgaatgaggtcagtctcccttgaaacttgtggcaacatgaagaaggtaacatgccagaaaaaaattgtggatctgttttttttgtttgttttgttttactttgttctatttttttttgaagaaagtataaatggatgttgagtatgggacccacagtgtctgctgcacctagctatgcaccttatttacctttatcttctaaacttactgttataagctcttattaccagcttcataaccttgtgcaagttacgtagactcyttgaacttggatttcctcatgtatagtgtaattttaggaaaaattatccatgcacttttctcatctttaatacataggccaaagcataactaatggctagtatttcttgactctttagacaaagtcatatcttcctatgtgaggaatctgctttagaatgtgaatatttctgagaaggggaataacttactctaccactagggagtggctgatgttagatcctgctctgtgatcaggtttggcaggggaacatgaaacatggaagagcctaaacatactggggatttgaaatttg

SEQ ID NO: 715357 - DNA, 627 bp, Homo sapiens
agcctgtcgcaaaagaccatgcattgtaagattccatttttatgaaagatcttaactgggcaaatgcataggaacagacaagtagcttagtgattgcttatggctggataaagatgaggagaaataactgactgctaatggatacaggattccatttggttgtaatgaaaatgttctaatattgatagtggtaatggttgtacagctctgtaactatatggaaactattgaattatttactttaaatgaataagttgtaagctgcataaattatatctcaataaatctattaacaattttttcagtcaaataagtcaagaaataaatagactataagaatggtggggccaacttatcaaataaaaatcataatcaccattgaaggtcagaagaaaaagagaggaagaagaagagagaaaacaagagggaaggagagccctagagagagaaggtgcacctattacacccaaatagtaacttagggaagtgattcatccttttgtttttctctgaggttcatagtgaggctagaagmaaaagccctaattcatttccattttccaaaatgtgcctttgagcctattataacctttgtgcattaaaggatcagtgcaagaagtctgccca

SEQ ID NO: 715358 - DNA, 649 bp, Homo sapiens
ttattagtttactaacatggaaacacattttaatattaatttacctcattacatgtatttaaaagttttaagctaaacaacaaaatcataagacaagtagagtacatttcagtattacaatttaacttcatttttaagaagcatataatgaaaatatacaaatagtagacttttcaataggaagagcttttggatcagtgagaccaataaaaagtttgttttatcatttgattcacattttcctgagctcagtttttaaaaactatcagaaaagagattyggtatatttggtttgcaatagcacattgcaaatagcatattaatgtacatttgcacattaaaaggcaaggttggggggccagttttttcccaggctacataaatgacatacttggtcagaccaatctcctggaccctatgcaaatcagacaccacctcctccagcttcctaatataactggctgttccccaccccccacccccacacttggggatccctctctctgcttggggcccacttccttctgtctctgtacagggagctacttccctctttcttgcctatgaaacccactaatatataattaaattgtatatttcaaaacattttgaagcatacaaatgactataaatttataaatagtaattt

SEQ ID NO: 715359 - DNA, 513 bp, Homo sapiens
tgtatatttagtagagacgggatttcaccatgttggtcaggctggtcttgagctgctgacctcaagtgatatacttacctcagcctcccaaagtgctgggattataggtgtgagccaccatgcccagcccatctatagaaatttttaaattaatgacaacacgttcaacaatggagaaaagaatgggaaagcaccaggcacagtggctcatgcctgtaatcccagcacgttgggaggctgaggcaggcagattacttaaacctaggagttcaagaccagcctgggcaacatagtgagaccccgtctctaacaaaaatcaaaaattaaaacagaattgggctgggtgcagtggctcacacctgtaatcccagcatctggggaggctgaggtgcacagatcactttagcctaggagttcaagacgagtctgggcaacacagtgasaccccatctcccccccaaaaaaattaaaattaaataaattttattttacttatttattttatttatttat

SEQ ID NO: 715360 - DNA, 1077 bp, Homo sapiens
gagtcccatcgccggaaatcgctctgcagataataaccctccggtgtctggaaatgtttaattaccgcgaactctccttcctccagcgccacccgccgccggtgcagcccggaaggacccagcgccgcgggtgcagtaggtggctctatctgcaggattccaccctaactattcacaattccgttcaaactactgttctccaacatccccggctgattagacattgccttgtttctaatgcacttatttacaccttggaaaaaggaaaagttcattaaccttagtacatagatctggatgtgtctaaaatagtctgacaactcaaatttgtgtaaaaagtaaaaacccatgccgtcttttacatacattttacatttgatcttcacaacagaagacatcatcattccattttcccgatgatcgtatgcccatgcaattccatgctmgtatttatgcttcatgtcacacatatttttacaaaccaaaggtatatgtgtgtgtgtgtgtgtgtgtgtatgtattgttacatttattaaggtgaaagagttacatttgtgtgcccgtaaagaacttaccaaacgggaactgcctggaaaaacagttcactttccctttcagttttgatactgtaacttgtctgtcgctgtcacaacaaaaaacacccgctcttgcgttcacctggcatctgttctcttaaggaccctggattgcattacgttatcagaggtgttatctgaacaaatgtgcgcaggagtcctgttacctacctcccgtgcttaaaaatccttcccacccccaagctggattttgacctgattgaccgtaatggttccagaggaactattgagccattactatccatcatctaaatgaatacagagggacgcctaaatctccaggttatttgaaagccctgtacatgcgtaagggggtttctaacgagcagacccccaattgtctgcaaagtagttacaggaagtagttgcgttggaagcaaaaattcgcaagtgctgagcaaacttcatttgaaaaaatgaggacttttttttttttttttaggctatggggtgcggagag

SEQ ID NO: 715361 - DNA, 1077 bp, Homo sapiens
gagtcccatcgccggaaatcgctctgcagataataaccctccggtgtctggaaatgtttaattaccgcgaactctccttcctccagcgccacccgccgccggtgcagcccggaaggacccagcgccgcgggtgcagtaggtggctctatctgcaggattccaccctaactattcacaattccgttcaaactactgttctccaacatccccggctgattagacattgccttgtttctaatgcacttatttacaccttggaaaaaggaaaagttcattaaccttagtacatagatctggatgtgtctaaaatagtctgacaactcaaatttgtgtaaaaagtaaaaacccatgccgtcttttacatacattttacatttgatcttcacaacagaagacatcatcattccattttcccgatgatcgtatgcccatgcaattccatgctagtatttatgcttcatgtcacacatatttttacaaaccaaaggtatatgtgtgtgtgtgtgtgtgtgtgtatgtattgttacatttattaaggtgaaagagttacatttgtgtgcccgtaaagaacttaccaaacgggaactgcctggaaaaacagttcactttccctttcagttttgatactgtaacttgtctgtcgctgtcacaacaaaaaacacccgctcttgcgttcacctggcatctgttctcttaaggaccctggattgcattacgttatcagaggtgttatctgaacaaatgtgcgcaggagtcctgttacctacctcccgtgcttaaaaatccttcccacccmcaagctggattttgacctgattgaccgtaatggttccagaggaactattgagccattactatccatcatctaaatgaatacagagggacgcctaaatctccaggttatttgaaagccctgtacatgcgtaagggggtttctaacgagcagacccccaattgtctgcaaagtagttacaggaagtagttgcgttggaagcaaaaattcgcaagtgctgagcaaacttcatttgaaaaaatgaggacttttttttttttttttaggctatggggtgcggagag

SEQ ID NO: 715362 - DNA, 611 bp, Homo sapiens
ttcacctcttccctagagtttaagagttataaattgataacttttcaatgtcttaatatcagttatatctttttctaaatcttctcccttactgcaaactcttagatgatgtttacttcttgtcacctccastgtgtctgtccctagaaggcttgtacgctttctaatttgccatttcaattcagctggaataagaaacccagttattagtttttcaagtattatctaaagtacgggttaaatagatcctaagggggtggctcaaggctctcacttgaggttagactttatgagccatgtttaagtggccacagagacagcgaaccctttatttatattattttaaataaaaataatcaggaaaggcttcctagataggtgtcattgcctagtaaaggaggttccttgggctaagggaacagcataagcaaaagcactgaggcaggatggtctctcagcagtcctgagcagtgattgtcaggaggctgtacctcctgagttactgtacctctgtcctccctgctgagcctggagatcatttcctgatccccaaggagacccataatctgacaaagattccaggtagaaaaagtagtctgggagttgtaatt

SEQ ID NO: 715363 - DNA, 1572 bp, Homo sapiens
tatgctcttttcaatttttttcctgggtactttatttgctaggggaagtaaaacgtagtgcaatgatacaccgttatgtgatatggaagctctctactgaagttaaatctcaccattaccagggtgaatatccaaatctgtagtgttagcgtttttactttgtgcatgccagtggctgaggcttgatgtgatacttcactccatgagtgttttggtatcccttgttctagtctgggactttgcaaatgaggtgagtatgcagccgaatattcagagaagtacagaatacagaactggaggaaacctcagagattatcctgcttatatattttctttttaaataccaagagaacaatgctctgagaagcaaaaatgtgttgcctacagtcggagagctggttagtgaacattaataacccaggtattctgacttcgagtctcatgatctttctgtagatcatatagtcttctgcctttcctatccttcatgggtaaatagttgcaatacggaggttgctctaattcatgtattatgcttggttactattgaaattgggcaaaccataccttcttcacgtaagagcaaactggttggctgaacatgtctgaagggagatgtattaatccgttttcatgctgctgataaagacataccaaagactagacaatttaaaaaagaaagaggtttaatggactcacagttccacgcagcgggggaggcctcacaatcatagtggaaggtgaaaggcacatctcacatggcagcagacaaaagaagagaacttgtgcagggcaactcccctttataaaaccatcagatctcgtgagacttattcactgtcacgagaacagcatgggaaagacccacacccatgattcagttacctcccactggatccctctcatgacaagtgggaattgtgggaactacagttcaagatgagatctgaatggggacacagccaaaccatactagaaggtgagatgtttgaacactgtagaaagattttccccagctacaataatatactcttccttcattgccatcactattcaaggccagacatgaaagctgtggaggatttgctgaagttgatattctaagacatcgtaataataccattgtaaaacatggtgacacatgaattccttgtacttgcagagcaaaacttccaagaaaatcaaggttttcaagagcctgcccttttagaactgaggcatatcataatagactttgtaggtcaatagttaatactcagggtgaacttgtaaactgatagtagtgttccttaatttatgttagggatgcataataacgtagtgatttagcctatagactttggagtgtggtacctggggtttgaattctggcatgccacatacttgctcttaggcaagtcatttaatctttccycagtttcttatatatatgaaatatatatgttatatataaattatatataaatatattaaatattaatatatataaatatatcaaatatatattatttaattatatatttatatatttatataagtgtatatattatatatttatataatatatttata

SEQ ID NO: 715364 - DNA, 2276 bp, Homo sapiens
ctgatcattctcttaaacagctgcacactgttcatactgaggaacacattgattcctcaactcagggtttctcaaccatgacactattgacattattgcctggatcattctttattgtgggcagctgaactttgcattgtaggatgtttaacagcatccctggcctctacccactgaatgccaacaacacctctgcagttgtaataactcaaaagtctgcagacatttccaaatctttcctagggagtaaactcaccccaggttaaaaaggagactaaagagaagcactcaaatgcaatatgagatcccagaaaagcacatttgtggaaaatcttatgaaattcaaataaggactttagtttacttaatagtattgtatcaattttacttcctggttctgctttttatgccatagttacataaaatgttactttaggaaacactgggtgacggatatatagacattctctgtgccctttacaaatttttttggtaagtctaaaattcattcaaataaaaatttaaaaaaatatctgagttgtcatcaccatttcctctagtcctgtatttctcaacctattttgttgatgttattatacctccttcgactgcccaagagccttttgagacatttttatcctaattgtcctccccatgaattttgaatattatagagaatatatctgtttatgcaatgaatatctgtgctttctacataaaaagacttagttttttttaattctctccaccctccagaaccaatttttgccttttttgaaaatgcatgctctagtcagaagcagtaatagtctcctctcagcttccaaaactttycttacatcaattatacaattatcaaatgttactttgctttctaattaaaataagtacatgtaatatggtttggctctgtgtccccacccaaatctcatcttgtaccttccataattcccacgtgttgtgggagggacctggtaggagatgattgactcatgggggtgggtctttcctctgctgttctcgtgatagtgaatgggtctcatgagacctgatggttttaaaaacgtgagtttctctgcacaagctctctctttttgcctgctgccatccacgtaagatgtgatttgctcctccttgccttctgccatgattgtgaggcctccccagccatgtagaactgtgagtccaattaaacctctttcttttgtaaattgcccagttttgggtatgtctttatcagcagcatgaacacagactaacataacctgtatgtcttttctaccagactcattagcttcttaagatcagtgatgctatatccttcactttatatgccttccacaacagcagacacacgaggcactcaaaagcctgcactggtttaaggcagagattatattcagctgagatgacttatgtatttaataaatgtggtagaattaaaatagatagaaagtactggaggtcaaaccaagaataaagttaataaagtaaaaaaaaaaaaagaaagcaagtttgtaaatggtgatatctattatttgagtagagttttatttgggaggaatagtaaggaattaggcagaaagatgggtgtaacaaatttgaggtaacaaatttcatttacaatgtgatttattgaaaagaatatagaatttttaaaaagctaccagttacacaaaccatggatagaattttaacgtttcctggaaagatgtatgtgtaacctagtcagtaaagtgagttgggctccataagataacagaaagcaactgcagtcctctgtttgttgtttccttctcctgcatgaaagtcattcaaggtcaaaagcttttccagtgagtttcaggtaataaaaaacggtattttttccttaatattataagtcttgttctgtattatactaaaactctgagctttaccaattaatattttttccttcaaccaggctgggaaacttgcggtggggaaagagtcatagactgtcattctttagagtgttcatgggtgagttttagagtcagtgacctgatctttatctgtgaaacttcaggtcacgtatgtcatgctctcccaggggttcccatgaagccaccctcagttggcttcagaggagaagaagccttccctgttcctgcatcttggaaaggggaagacatactgatctctgtctccaaatggatcctcactactattgtcctcaatttcctgtcactcttctattcctcatgtagctgctggaggtagttaatgggctaatgctggcagaaagaagcatt

SEQ ID NO: 715365 - DNA, 1149 bp, Homo sapiens
tctctcatagatgtttcccccatgaaaaaccacacatagttgcccagccttagtgtctgcttctcagaggagccagtttaataggggccattactagacctctagaatgataaagccctatgggtttaggacctgttagccggcccagatctgaacctgcagagttatccagagggaaaaaaaaaaaggtaaggtataggaagaagctgtggagaaaagtggtctctagattgaggcccctctgaaggctcagcccctccaaactggattatctgctcttctacatccagaaaagagcaggctctccatattgacatatatggggccagggtcctgctgccacccagtggccctggtaggtaaagcacctttgtggcctcccactgggtcctttgattccgctggtgaaggtaggagtgaagaatttgttctgctggttggggttctctccctctctcatttacagcataaattacaaaaatcctgacttccaaacttaattcccaaactttcctcctttaaaattaaaaccatagtcggctgagcactgtggcccacccctgtaatcctagcactttgggaggccgaggtgggtggatcacctgaggtcaggagttcgagacaagcctggccaacatggcgaaacctcgtctctactaaaaatacaaaaattagccaggcatggtggcgagcgcctataatcccagctactcgggaggctgaggcaggagaatcgcttgaacccgggaggcggaggttgcagtgggccgagattgtgccacttcaccccagcctgggcaaaagagcaaaactctgtctaaaaaaaaaaaaagcaccatagtcacacacatctgtgaatgtactacaaccattgaattgtctgttttaagtgggtgaattttatggcacgtgactctatctcaataaagctgttttaaaatcagcaccataagaagaagtgggtgaggcttttagtacgtgaagatgaggatggttgtttccgtttcttaggatatccccaaaccgatatgaaagarggtcacacagtaggtactcaacagatctttaataaattactagtgttgttaaatggagccagtttttttttcttttttttttttgtaattccttttttttttttttgagcca

SEQ ID NO: 715366 - DNA, 807 bp, Homo sapiens
ttacaaatacaaaagtttaaatggcttttttgaaaatgttataaacttaattcaagttccaaagaaacacttttgataaaaagtgtttcttaagtaattaatatgattttcaggccgggcatggtggctcatgcctgtaatcccagcattttggaaagccaagatgagaggatcacttgaggccaggaaattaagaccagcctgggcaacatagggacaccccatctctacaaaaaaaattaaaatatgtaaaattttcaaaagaaaattaatcccagatcccataaaatggaaacaggaataattgttgtagcaatgctaacactcttttgttaggaataagtacatgagcatacataagaagggatggagatttagagaaaaaggtggactaggcaggcttggagagccataatgacttggccaacatgtacggaattgaggagatgttgaaaagatggttctatatttgggctccctggaataatagcagcccctcaggctttcaggccaacacataaaatctcagttccctgtcacccatcattctgacagcctygttgtcactcaccccattctagcccaagagaactccatttaaaacaggtaagtgattttttttattgctgtgagtaaaattacagtctagataggaaaggccccatctagactagatgttatgggacctaaagtaggtggctgaaagcactagtactattgtctggacttgggtagacagagttggagagactaaagcagtgtggggtggagccacttgtactggctcatctgtgcatattccttgca

SEQ ID NO: 715367 - DNA, 1520 bp, Homo sapiens
gggcccacctggataatcccractcaaagatcagctgattagccctttaattccatctgcaaccttaattcttcttgccatgaaacctaacatattcacagttctagggattagtatgtggacctattgggggaggggagcattattctgcctactatagaagagaaatttgaggcagatatgggggaaaatattccaaacagaggaaatatcaagggcaaaggcttcatatactaagcaaaccttgtcctctgagagtgtttccaatttctctccatctcccacgcaaggacactgcggaagtcagcaagttagtcaggtctttgagtttttctgtttaactggcttgtgactatccccaggggctgaagttacccccacaggtatgtgtcacagtatctgcagccacagaatatctacctactgcctattacaaatgcctattaagagataccttaaaattcttattaatcaataatctaataaaatgaaaaaataattgtgagagatcattactaaatttggtctctagtttcttaccaaaggccagtggagatgacacaggatggatattgggactgtgggtgggaggcaatgctgctgaggcaccaggagctgaggaatatcacctatgggatgcctgagatcaaccctgcctttgcaacaccaggaggcttacagtttttggtctggccacagctgttatacagtacaggtacttggttcaggagtgggccccctgccatcatttattttcagaaaggattaattttcattacaaaaatatcctccaattcacttaaattaaggagcattccttctttggcattctttccctggctacatagcagaggagagctgagttaccccgaggcagccatttctgactgacagcactgatgaaatgttccccaccccaccccaccacagctccccttgagagataataggtggggtattctcaggaataactataagtctttcaggacatagagccttccctgtaacagtttatcatgttccctcagctcaataaggagaaatccctcccttattcccccttcttgcatttgctctttgagtgatagaaaacaatcaataatgtttgtctatggcttttatcatgacaggaaggtttagggcagcaggaagttaagtatttcactgtttcatggctgagatctcatcttcagtactcggggtggaatgggtgaacacactgtatagggctttgccatttctatgtgcagaacagtaatggttctaacagagaacagcaatgctgtgccagaatcagagcctctttctgggcctttgggaactgaacccaagctccagggctcatcctgaggggcagtatcaagtgagattctcctggggtccctttctgttcttgaatggctgcagccctggcctgggccgtgggagttgtcccagagagctccccacacagagtgatgcaatcagcgcaaatgtgcctcctttgcatgttccattatgtgcattctcagtgtgtttca

SEQ ID NO: 715368 - DNA, 628 bp, Homo sapiens
ttatataaaggactcaagcatccatggatttttgtacccatgggaaggggaggggcctggaaccaatcccccagggataaccagggacaactgcaatcacagttttatttaaggaagatttctagtgtaaggtggaagattaataaagtcaagaaggatactggaaactggaattaagaggctaattcaatagcccaagtaagtagtaatgaaagcataaaatagtataggcacagtgataaaggagaagaatagagagtaaaagataatgcagacagatatctgacaactgttatctgtagaataaggtaacaggatgcaaagataacaccaagtctctaagtaaatcaattttgtaagcaaccactccactagaggatagcagcattgtgcsgggaaataagggcagaacaatagtaacagacaaaaaagcagctggaatgatgagaaacctggtatcaggcataggctcaggaaatgagaggttcaacaccggaatcatgctgaaatcagtcaggcaaactgtgatcagaatccaaagctcaagactcaaaatcaaggatatgagatctcgattctggagtactataatataaagtcaagatgatttcagagtcataagtctatg

SEQ ID NO: 715369 - DNA, 681 bp, Homo sapiens
ataaaacatttttatcataccttttaaaacccaactatattctcaagataatgctacccatagttaagaaatactgtcacattttctgttcctaacatcattcacttccctatatcctgcttcctttacaaaaaaaaaaaaaagactatgatgttcaggccatggcaaattttggaccaatgctcattttcctgtacagtactcttcatacttcaatccattcctgttttagacatcacttcattcaatttttcttttacaaaaaaggagttcacctgcttgaatatattatacaagattcaaattaataaaccacctaagaatctagaaaattataatcatctaattatctgttaacataaactttaacaaatagctatgatccaatcctgccatctactgtttcaaatgtgaaactatacagctcaaaagtataaaacatgctcagtaataccagaaaatggttaacacagaatttgtgccaattccaatattatattaacataattagaaagctgagtaaagaaaaaacttatgacaaactcacacaaggatcagtatccttcctggctttcaaaagacaaagtactgtattattaaatcctttgttatcagggtaaatgtatatatttacattcgggagatttcagctcctgcatttycccagcctcatttacttaa

SEQ ID NO: 715370 - DNA, 947 bp, Homo sapiens
  misc_feature 847, 848, 849, 850, 851, 852, 853, 854, 855, 856, 857, 858,859, 860, 861, 862, 863, 864, 865, 866, 867, 868, 869, 870,871, 872, 873, 874, 875, 876, 877, 878, 879, 880, 881, 882,883, 884, 885, 886, 887, 888, 889, 890, 891, 892, 893: n = A,T,C or G
  misc_feature 894, 895, 896, 897, 898, 899, 900, 901, 902, 903, 904, 905,906, 907, 908, 909, 910, 911, 912, 913, 914, 915, 916, 917,918, 919, 920, 921, 922, 923, 924, 925, 926, 927, 928, 929,930, 931, 932, 933, 934, 935, 936, 937, 938, 939, 940: n = A,T,C or G
  misc_feature 941, 942, 943, 944, 945, 946: n = A,T,C or G
aataaaagaataaaatcactaaaacactgttttttagaataattcttttctgtacaaattcttgagatgtttaaagtgtgcaaaaaaatctgagcttttctttcattcccatttgtctaacaagatttggaaagtcacctaaccaaaataaatgtaaatgttttttccacataaagtttgacttttttttccattatattgtgacatcaaagcctcagccatcttctcttttcttttaaaaggcttttagcggtaattttgctcatttagcaatgtgcccagttagcacctttgctacacttttatccacagatagattattttatctgctgccttgacacagatctctagagatattggacatatttgacacatatttacaaaataattcttactgtgattaagctagctttagtcattcttttaactgtttaggaaatttggtttgtaaagttgatgaattcttatgcaagtcctgtgaaccctgttctattgtagttgctgctgctgtatagtctatcttttttttttcttttttctttctttttttttttttgagatggagtctccccyatcaaccaggctggagtgcagtggtgcaatctcggcccactgcaacttccaccttgcaggttcaagcaattctccttcctcagcctcccaagtagctgggactacaggaatgcaccaccatgcccgctaatttttgtatttttagtagagatggagtttcaccatgttggctaggctgctcttgaactcctgacctcaggtgatccaccacctcgacctcccaaagtgctgggattacaggcatgagccaccatgcctggcctctatacttttnnnnnnnnnnnnnnnnnnnnnnnnnnnnnnnnnnnnnnnnnnnnnnnnnnnnnnnnnnnnnnnnnnnnnnnnnnnnnnnnnnnnnnnnnnnnnnnnnnnnt

SEQ ID NO: 715371 - DNA, 1286 bp, Homo sapiens
tcaaaaaattgtaacagaaaatattaactgaaccaaatcagtatttcagaagcttttttttttttgcaacttaaattatccactattaagaaaatgacttttttttttgagatggagtctccctctgtcatccaggctggagtgcagtggtgtgatcttggttcactgcaacctcctcctcccaggttcaagtgactctcctgcctcagcctcctgagtagctggaattacaggcacatgccaccacacctggctattcttttttttttttttttttttgkagttttactagagatggggtttcaccatggccaggctgatctcgaaatcctgacctcaagtgatccgcctgcctcggcctcccaaagtgctaggaatacaggtgtgaaccactgcaccaggcctgcagtcttacttttaatcttacacaggcctactttttctcatggttctcttctcatctctgaaataggaatcactacctggcacataatggactggtacttaacaagcagaccatgtgtagaccacccatcctgaaccaagattcctgggcaaggctcttaattcatctgttactgaacaaaagcaaaactgctccacacatgggccacataatatagccacttgtttatttaaatttttgacctatgtgataaatcctgatgctcagttgtctaaaaatgtctttgtaagcatctgaatatacctaatactgaaataagagtttaaaaagctgacaacacaatccaagttttacatttatttactcataattaactcaataaacatactagattttacatttaatatatgttaaaatgtctgaacaaaaatatttagcgtaattttcttttttttggagatggagtttcactcttgtcgcccatggtggagtacaatggcacaatcttggctcactgcaacctctgcctcctgggttcaagtgattctcctgcctcagccttccgagtaactggaactagagatgtgcgccaccacacccggctaattttttgtatttttagtagagacggggtttcaccatgttggccacactggtctcaaactcctgacctcaggtgatcaccttggcctcccaaagtgctgggattacaggcgtgagccaccgtgcctggccagaataaatattaagataaaatattttaattttaaaataaaaatcaatgtaatcatggttgttctaaacacaatacccaataatgttggaatacttcattataaataaaactaaaggtcagaaaactatgaagttgacctagaat

SEQ ID NO: 715372 - DNA, 1286 bp, Homo sapiens
tcaaaaaattgtaacagaaaatattaactgaaccaaatcagtatttcagaagcttttttttttttgcaacttaaattatccactattaagaaaatgacttttttttttgagatggagtctccctctgtcatccaggctggagtgcagtggtgtgatcttggttcactgcaacctcctcctcccaggttcaagtgactctcctgcctcagcctcctgagtagctggaattacaggcacatgccaccacacctggctattcttttttttttttttttttttgtagttttactagagatggggtttcaccatggccaggctgatctcgaaatcctgacctcaagtgatccgcctgcctcggcctcccaaagtgctaggaatacaggtgtgaaccactgcaccaggcctgcagtcttacttttaatcttacacaggcctactttttctcatggttctcttctcatctctgaaataggaatcactacctggcacataatggactggtacttaacaagcagaccatgtgtagaccacccatcctgaaccaagattcctgggcaaggctcttaattcatctgttactgaacaaaagcaaaactgctccacacatgggccacataatatagccacttgtttatttaaatttttgacctatgtgataaatcctgatgctcagttgtctaaaaatgtctttgtaagcatctgaatatacctaatactgaaataagagtttaaaaagctgacaacacaatccaagttttacatttatttactcataattaactcaataaacatactagattttacatttaatatatgttaaaatgtctgaacaaaaatatttagcgtaattttcttttttttggagatggagtttcactcttgtcgcccatggtggagtacaatggcacaatcttggctcactgcaacctctgcctcctgggttcaagtgattctcctgcctcagccttccgagtaactggaactagagatgtgcgccaccacacccggctaattttttgtatttttagtagagacggggtttcaccatgttggccacactggtctcraactcctgacctcaggtgatcaccttggcctcccaaagtgctgggattacaggcgtgagccaccgtgcctggccagaataaatattaagataaaatattttaattttaaaataaaaatcaatgtaatcatggttgttctaaacacaatacccaataatgttggaatacttcattataaataaaactaaaggtcagaaaactatgaagttgacctagaat

SEQ ID NO: 715373 - DNA, 576 bp, Homo sapiens
tcagggaacagagctgggcctggatgcaaatgtaacatgttcaggacatggaaatacaggcatgaggctgggcgtggtggctcacgcctgtaatcccaacactttgggaggccgaggcaggtggatcacctgaggtttgagaccagactgaccaacaaggtgaaaccccgtctctattaaaaatacaaaaattagccaggcatggtggtaggtgcctgtagtcccagccactcaggaggctgagacaggagaattgcttaaacccaggaggcagaggttgcagtgagccgagatctccaggctgggtggcggagcgagactccgtctcaaaaaaaaaaaaaaagaacagaaatacaggcrtgaggcaagggcaacgtggctgaggacgaaatgccttacttgggccttggctcaacggccacctgactgcatccatttatgtgccagttcccttggagtcgtgaggaagacaaaccactttcactagggcaacacggagcgtggaaacgaccccgctaaaaacccagctgcttgctaaaaacacttctcctttacatttcttcaaactcttgggta

SEQ ID NO: 715374 - DNA, 2406 bp, Homo sapiens
agagtagattatagctgctctcaccacaaaaataaggtaactatgtgagatactacatgtaatttgctttattatagtatccatttaactgtatataaatgtcaaaacataatattgtatatcttaaatatataataaaatacataaagacatctgtaaaaaataagattcatgtataaaaataaattgaaatgttttaaccttacttgctgctttcacatgatgcataatcactgagcttttgaagcttattaattgaaaatccttccaaattggcatgaaacaaagaatagcaattttcttcccagtgatttgaaggatgtgaaatgctaaaagatacaggatttacctaatgaatgtttacataattattctcagttaccacccttctagtttttaattcttggtaagttataaagattatttgtgakgctttcttactggccaatactccaaatattccatcattcttacacttctgtcattctgcattgaagtttgatgaaaaatagcgatccagagaagtttgtacttgttcaataactgtccattgattcattaaaacatgatatcttgtaatcatttaaaaaattgtctcttgaaaacaaccattctaagattcagtctatttagacttccaatatttagttaaaatattagaatatcattgataaattgtaaaacagttaaaaatataaatgaagtgttatataaaatattttaaatcttttgattgttctgagtattgtaaatataattaaacctgaacaaaatatttgtaaatttggatttagttatctacattaacaagtcagctctaaatcagtcaacatgtaaactatgtaggttctacatggtttacatgttgactgttttagagtattttacacatattcacacatgtcatgtgtaaaataattataattgacctatttaaacctaagtgaaccacaaaaaattattgaaatagtaataactttattattttctaccatagaaccaaatgttcacattttattttgatagatcctttaggataataagataatgttatacattgaagtcagcaaatgtaagaagttatgcctgaaaaatttggggtatacacaaagagaatgcaaaaaaaaaaattaacgatgtcaatagatagatgagtcttttattgaagtctttatccaatttaaatattctgtgaagccttgctgtctaaatattgtgagaaggtagctagaattctttcaaatataatagaaatggggggaataaaattaagtcaaagctaatatttttttcacatgtggccatacagtaagcccgttcaatttgtagttagtaatttaggttttgatactgaagcctaaatagtcaaagtgatgaccttaatctgatgaatgagtcctgcaaagtgtttctttaccctagaatgtcatagagatggaaacaaagttcaatttccaaaattaggagcaacttgaaaatctagaaagcttggggccagaagaaatttaataaggctcggttacatgacagcaaccagagagcataaattcaagagcttctattattaagacaacaaagcaacaatcagtaatacccacaggatcccagtgtaagcccaggatatatgttgatcctctgggaacatatatacttctgtaatcccattttctctagcccttgccagttgctgcattctaatatgtttataataaaaacagtgctgcaaaggtcaccagctaatgtccttatgtgcataatactatacttcaattcactgagaaaaatctctttttcctcagcctgcatttttgcattacatatacttgtcaggatgtccatcttcttttttgcacacacttcctcacatttagtgtttgctactgataaaatttcataaacgcattacttcccaactgactctgttgctgctgctttttcttagtgttttcatccctgtacaagctctgcatctaagctggtaccgaaattcttctttatcccccgcgtgtctctcaatttttcaccacttacttcccatttcttcaaatttaagagtaatactttgttctctcttcacttttcattctccagcatgtaatcggttaaatgagtaacttctattattttttaatttggacatctcagacatccagaaatttgcagaaatagtaccccaaatttctatatattccttacttacattcttccctccaccctctttcattctctcccatctcctgtccctcttgctatctctctcttctctctctttctctcatttgaatttctgatattatgccttctttctctgtaatactctattgagtgtaacacacttaacctgtggtattattatctaatctaaaggcatttttcaagttttggcaattgtcccaataacgcaat

SEQ ID NO: 715375 - DNA, 1752 bp, Homo sapiens
tgttagaagagagcatgcctgaggatcaggaacctgtgtctgcctcaacacatattgcatcttcactgggaattaatccacatgtcttacaggtgaagttctaacmcaccttttttgtaacagaaagccaaactaatattttatctccattgcataggatcaggtctcttccttggttattaagatcattgagtgctcactgtaatggggaaaaaaaatacaagaatatggccaatgtctgggcctcattctcttattcaaggagataaggctatattgagaactagtagatagggtttctggttttaactgcattagaatccagagtcctagttccaatcccaattttgttgtgttttgtttttgaggcagagtttctttgctctgtcgcccaggctggagtggagtggtgtgatcttggttcactgcaacctccacctcctgggttcaagtgattcccctgccccaacctcctgtgtaggtgagattacaggcgtgtaccaccaccacacctggctacttttttttttttttttttttgtatttttagtagagaaaggggtttctccatgttggtcagtctggtctcgaactcctgacctcaggtgatctgcccgcgttggccttccagagtgctaggattataggcatgagccactgagcccggccccaatcccaattttgtaactttattactttgtgcaagtcatataatagctgtgagtactgatttttctctataaaatattactttgtctacatcacagggtacttttaagactctgtatgtgctccacaaaatttaaaaattttagtacctagtagcacaggtttctttaagctatgtctttacttccctttatcccagtgccttttggtgtgttatgtgtttaacctttggcttatgtttgactttaaaattattttatcagcaaacatagcaactgctgtgtgccaggctctggtgagacgctatagatacaaagaagagaagtattatatgaattctgcctttcaggcacacacagtgtaatggggtccatccatcacacaaatatactagctctgtacacagccttgaggaggaacaatatttttggttgttgtaaactgcatttttttttggtatggccttttgattctgggaagcacattcattctatagatattgcctttttagatcatgaaagcatcattgcttactgatgaagaagatgtagatatggcactggatcaacgcttcagtcgcctgccttccaaagcagatacttctcaagaaatctgttctcccagactccccatttcagcatcccactcgtcgaaaactcgttcactaggtacagtataaaagatgctattttacaagaaagctgtacagtcatcaagtcctgcttttcacttttcttcttctaacccaagtggacttctctagcaagtatctgccaaacaactatacctgtgacataagggtgctaagagaaattgtacttataagtattcattaagagtagccaggttttttgtttttagagacagggtctctctctgttgcacagactggagtgcagttatgcagtcgcacttactacagccttgaactcttgggctcaagcagtcctcctgtctcagcctcctgagtagctaggactatgggcatatacccactactcaactaattatttttttaaatgtttatagagatggatcttgctatcttgccccaggctggtcttgaacttctggcctcaactg

SEQ ID NO: 715376 - DNA, 1846 bp, Homo sapiens
ggtctcaatctcctgacctcgtgatctgcctgccatggcctcmcaaaatgctgggattacaggcatgagccactgtgcccggctggttctgacatatttttaagaaagtttaggctgatgctatggtaactcagttattgatgatacatgtcatcttgtaagtaggagtattcaatattcatggttttgaagcaatttcagagtactataatcaccacacttgacagacttcagaattcattgaaaatctctggaaataattagcaatttgttatcatagactctaaacagaccttcaaaatgcattacatagatttggtaaaacagattgtcagtctgccaaaagtaatcactttggtttgatttgcattgaatgaaaattttaaaatgtaaagctaaactcttcaggatcactgcactgggtttctataggacaacactgaacagggctgccactgaaacaccttggatgagagcctcaaactccctgaacacagcttccagcacactactgggagaatgattgggactcaaaaatatgtgcaatgaatgtacttacgaccttgttggaaaggaagtaaagaggttgtatgtaattacctcaaattaatactgctacagataaagtagtaattagcactgacaaagtaatagtagcgctaaagtagtattaatagccctacactagtagtagtaataaagtggcatcgctattgattctatccgtctacctacctacctgtctggataggagggcataggatttgactgtaagattgggcttagcagtgaaaacaaaagagctcatgcatgctttggacaggtatgcactcaaacttggtatcatgtgactgttctgaattccagaaccaaggctaaaaggtggaagttttgtttgactgtgtctcacattttccttttggtctattgtctaacacatgttgctagaattctttttattctgactaccttttatgtatagacaacgccattattgacgagatcactcccaagcggattggagattgtcccaatacttagacctatagcaaggccttgggagaaatggtggtgcagcaggagagcaggaacctaaccattgccatcctaaggccctccattgtgcggagcaacgtcgcaccagcttttcctggtaagcccacttacctggattctgtgttttgctttcaaactaaggttcttctagcccaattattttctgatgtctttcttcttcttcttctcctcaggatttatagctaagtgcagccaatcaaatattaacccattatactagggcaaaattccactttgggatcatgtggctcttctggcagttaccctatcttagagttggatggagatcttaaattagcttctaactactctagtctcaaaattcccatgggtgatgttttcatatcttggctttcccactgtagcttaaacatatcagaatgttcttgatggccaaattggtagtattgcaactaactgccagggttacaaagctcacagaaggatctcagtttgggaatactaattttttttaacctcagtatactgctatgtccttttgaaagtactttgaattataccatcttcttcaaagcaagtccgtgaagctttgggggcagatacattccagctccaccacttactggcaatgcaacatttttgagttgttctttcggtagaacaggacagatactactttggagagttggtttaatgagacaatgtatgaggagtgctcagtctctagtaaaaggtagatccctactaaaaggctcaacgaatattagtcccttcatcttctcctcccgtatatctggtctcccattat

SEQ ID NO: 715377 - DNA, 1475 bp, Homo sapiens
tgtggctgatgaaataatctgcmgtccaaatctccatgatacactttacctatataataaccctgcacatgtacccctgaaactaaaagaaaagttcactaaaaagaaaagaaaatgccttttccctcacatttgccaatactggttatttttcaaataaattaatgcctggaaaaatggtaactcattgttcgctgattttcatttttctgattaacgggcaaggctgaatatcctagtaaaactataaaatttgttcatcatgaatattagcccaaattagggttagtttgacagcacatagttatcttctattcaatgttgccataggcttacctgtgatactcttcactttcgttgtcaggaaattgctgattttcaggtgttctgctcttcctttgaggaattaatccattatcaccattgccagcagtgacaccattagtcaggttttctagtaatcccacattattactttcatgcttcttcatttcttcttcaaccttgagtgggatattaaggatagttatcactttattgaataaaaagaacctttttaattgattctatcaattgactcagtttgtcattattttagtcattaaaaatatttcacacttaaatttgatcatatatatagaaatattaccatataactttaagatgtaattatcatctcattaatatatcacagaaatttttgtaaagtttgcttcatttctgtttcaatgaatgaaacagaattttccaaaattcaaaaagggccctccttcattttgtgcttttattctcaatcactcttcagaatcttatgtatgtatttaccccatttgattcatgggaacacacaaataaaaagacaaagatgcaaaatgtgtcctcttccgtctttaccacctagattttacattaaacagtcagatttagaggatgacacactgtgcggcttcaggaatagaaaggaagtttgcccttttctgcgctaagatattcttctaccccactgcctttgagcattcttttttcatttggttgctgggatatcaaaaacatgatggtgctcactgaaaatgggagccaaagtttgccacaacacaagaagcagagtgaaactgctgacgtgcaagcatggaattccagaaaatgagatgctccccaaatttcacattgaatagccatacaattttctagctggaagatacacagaataaaaagctatcttctttagccacattatctattgataatcagactaaaaccaagaaagataaaatgattggtccaaagctcctaaagtggcattacctagcattttatagcaccattcaggattgttccataataatcaaagaatatctctaggctttgtatctcttgaaaactcaatgtacagaattctttctgagttaaatattaactttttcactgatgatttatgctacttacatgataggatcatgtatgcctacacttac

SEQ ID NO: 715378 - DNA, 643 bp, Homo sapiens
actcaaactctcagccagtagatgtctgttaggataatgctttatattgatgttcaattccagctgacatgggagaccaaaagtctactttyattttttttttagtttccacggagaagtagcaagctgacattctgtaattttcgacatacatactaacaatatattttgcacggaacatgttattcagctcaaagtcatctcatagaccatcttacatgactatttttgcagcacaaatcacaatttcaatatttgggtggcacccattttgctttgattcacactatttcctcagagctagtcagcaaaaatagtcaaatgaccttccagtgactgcacaaaatatggaatgcttcaaagatctgtcctgcctccttatgcagaagccacgctaactttccccgtattgttccaattttaggatatgtgccgccgaagcaagcacaaagccctacttttacatatgattagtgatgcgtcatggacaaggcttggctctgtgaagtccaactaacctacttgagattctgagaattctcttcaatggcttcctgtgagctagagtttgaaaatatcttaaaatcttgagctagagatggaagtagctccgataattttcattatcatgtaaatcagatca

SEQ ID NO: 715379 - DNA, 643 bp, Homo sapiens
actcaaactctcagccagtagatgtctgttaggataatgctttatattgatgttcaattccagctgacatgggagaccaaaagtctacttttattttttttttagtttccacggagaagtagcaagctgacattctgtaattttcgacatacatactaacaatatattttgcacsgaacatgttattcagctcaaagtcatctcatagaccatcttacatgactatttttgcagcacaaatcacaatttcaatatttgggtggcacccattttgctttgattcacactatttcctcagagctagtcagcaaaaatagtcaaatgaccttccagtgactgcacaaaatatggaatgcttcaaagatctgtcctgcctccttatgcagaagccacgctaactttccccgtattgttccaattttaggatatgtgccgccgaagcaagcacaaagccctacttttacatatgattagtgatgcgtcatggacaaggcttggctctgtgaagtccaactaacctacttgagattctgagaattctcttcaatggcttcctgtgagctagagtttgaaaatatcttaaaatcttgagctagagatggaagtagctccgataattttcattatcatgtaaatcagatca

SEQ ID NO: 715380 - DNA, 643 bp, Homo sapiens
actcaaactctcagccagtagatgtctgttaggataatgctttatattgatgttcaattccagctgacatgggagaccaaaagtctacttttattttttttttagtttccacggagaagtagcaagctgacattctgtaattttcgacatacatactaacaatatattttgcacggaacatgttattcagctcaaagtcatctcatagaccatcttacatgactatttttgcagcacaaatcacaatttcaatatttgggtggcacccattttgctttgattcacactatttcctcagagctagtcagcaaaaatagtcaaatgaccttccagtgactgcacaaaatatggaatgcttcaaagatctgtsctgcctccttatgcagaagccacgctaactttccccgtattgttccaattttaggatatgtgccgccgaagcaagcacaaagccctacttttacatatgattagtgatgcgtcatggacaaggcttggctctgtgaagtccaactaacctacttgagattctgagaattctcttcaatggcttcctgtgagctagagtttgaaaatatcttaaaatcttgagctagagatggaagtagctccgataattttcattatcatgtaaatcagatca

SEQ ID NO: 715381 - DNA, 643 bp, Homo sapiens
actcaaactctcagccagtagatgtctgttaggataatgctttatattgatgttcaattccagctgacatgggagaccaaaagtctacttttattttttttttagtttccacggagaagtagcaagctgacattctgtaattttcgacatacatactaacaatatattttgcacggaacatgttattcagctcaaagtcatctcatagaccatcttacatgactatttttgcagcacaaatcacaatttcaatatttgggtggcacccattttgctttgattcacactatttcctcagagctagtcagcaaaaatagtcaaatgaccttccagtgactgcacaaaatatggaatgcttcaaagatctgtcctgcctccttatgcagaagccacgctaactttccccgtattgttccaattttaggatatgtgccgccgaagcaagcacaaagccctacttttacayatgattagtgatgcgtcatggacaaggcttggctctgtgaagtccaactaacctacttgagattctgagaattctcttcaatggcttcctgtgagctagagtttgaaaatatcttaaaatcttgagctagagatggaagtagctccgataattttcattatcatgtaaatcagatca

SEQ ID NO: 715382 - DNA, 649 bp, Homo sapiens
aaattctatagctttgaacaggtggtatttctgatacaatacaacatgtttatttcactttctcattgaatcagttcatccaatgaatagatatcaattcagtgtactcatgtgtcaggcattatgatagatggtaggaatacagtggcatgtatgaaagaaaaggactttgttcacatctatagcttatattatagaaagagagaaagacaacagtaatctgcaataaactttctatgtaaaaatagattgttacacatgcttttaagaaaataaagtactccaatagaaaattttatggaggggtataaaataaggtagttaagtaaggtagttagaacatcttctttgtgaaatttatatttaggctgagatacaaagtatgggaaatgacccaacattatgtatacrtatagggggctggaatgtggacctaccgaaaagttgtgtataatgactaaagtgaagaaatgacaggacagaagccagagagtcagacacaatcacagtaaagaaatttgggccaggtgcagtggcttaggcctctaatcccagcgttttgagaagccaaggcagtaggactgcttgaggccaggaactcaagaccagcctgggcaacatagtgagactccgtctctacaaaaaaaaa

SEQ ID NO: 715383 - DNA, 593 bp, Homo sapiens
tcatcccgaagtgcaattccaattcatatgctagcaggaattgtgtttgcatatgtgttggtatatgtaaatagacaagctgattttcaagtttaaatggaaacatgaaaggcacaaagctagccaaggtgatcttgaaaaaaaaaacaaatttggtccactgaaattttcataaatctattttcattataaaattatagttattaaggcagtatggtatatgtgcctggacagacacagacaaatgraacagaatggaatctagaatagacctacataaatatcattactgttttgtgacaaaaaggacagaggaatgcagtgtagaaaggatgcctttacaaaaaatgacgctgggacaattcaatatacataagaaatagtctttacctatttggtttatatatagaacctaatttcagatatattgttgataaatgtgtaaaggtaaaaaaacacaaaacaaagtgtaaaacataagcgaatatgtagtctaataattttctctaaatgtcaatattacctaatatttacaaattagatgttgataaaataaaatatcagataagagatttaaagggtagattatacaa

SEQ ID NO: 715384 - DNA, 1679 bp, Homo sapiens
catttcaatctttacttcttggtgtaattaagcttattcttctgaaaaagcctcaaatgattcttttaggacaaatgggtaaaattccctaagaggagccttttgatgaaataataatgacatgttcaatagagacagatcaatggctaaaaatgattattctcattgaggatgaactttgataattagatttcaataatttcaagtacaaaaagtgacatagattatctttcagagcatagtctagaaatactcttagcctcatagagaagccagtattttacccaatgatagattacaaatggcaaaatacagcatccatgggataagataacctttggtatgtttgtggcatagaggggatctaaaagttcttaaatttttaacagataagttaaatatactggaaatatctgtatgctgggagaaattgtggatcaaaatgaaggttgtgtatactgcagaaatgtactttctaggtatcatgacaggaatgataggcacaataaaatgtgcagaaagagaaatgcaattagccactctcagcaaattttgtttaataagtgaccaggctggccaagctatatcaaagtggggcaagtgactaattctcccagagtgcggtaaaatatgaatggtctaagacaactagaacttagagaacaaaattgggctctataatgggaatgaagtcgtgtcttcacgctgagttaagcatatacatttcaattctgctattaagacagttgcatttagttgttgtgcaccataaaataatgttttagtttggcatttttcagttgttatactatcaattaacagtatgttaccattatgcagtactcacttggaacttgttatcattaagagataaactgataaggaactttttgctttccacttccagggatgttctctgtggaaaattagcttgtgttcagccacataaaaatgctaataaaagtgacgctcaatctacagtttattcatatattcaagaccatgtatgtgtatctatagccactggttcctccatgagatcagatggaacagacaatgcctatgtggctgatggcaccatgtgtggtccagaaatggtaacaaaatgtgataatttatattcagctgtgttaaattatgtgaattatcagatactgcattccatgatgactatcacaattatattgaatggatttaaacttgtgctggcatttatttcccatgtgatatttaaatgataattaaaacaagcctaagttatccaattacattgctttttggattaaaatattatcagtccttatgttaaaaaaagtacatatatattttaagcacaagattttactaactgacatctggtagctttaaattgtaaaatgctaatacaaagttttccattttccttgcttcacaaagaacattaattgactttacatatttcttaaattatttgatttgtatctgatcaaaatataagtgtacaaaaggtttggaaccaaacaagawtctatactaggaaacattgctatagtgcatatacaggctcatgcgtatatacatgcatgaatatatatgaacacttctatctatgtagtcataacataaaaagagaacaaaaaggctttagagacttggttaatcttgcaatataagggcacatgttccagaaaacatgataa

SEQ ID NO: 715385 - DNA, 639 bp, Homo sapiens
tagattaactgggccccttttgattggttactgagaatgttctgtttttattaaaactggctggcttggctattatctctccctggattcttgaaaggtcagctctttcaagtaaacaacttaggttttagtttattaacatgaaactttagcataagtcaccccattcgaggccttacatccttttttttttttaaattgtaagtgttataattatatttctatatttagttgttaaaatcaaagttgaaaactgtttagatgcatgggattttcaagtggggagcactctgctctttaggtaagctctgtatcttcatatttttgtcatsggggaaaagcactattaattagacatggttggagtgttaattggggacattaaaatattacatttaatcctctcttttcaggagttgttccctttccaaaggccctttattagaacctgcttatagtggagagatgtaccactgatctccttgaaaagaggagaagatttggaagttctaactgcttcttttttgatgttgtttttaaaaatctttattgaaatgtaacttatattttatgatgttaaactatgtgaaatgtaaaattccatggtttttagtatatttacagatttgtgcaaacaat

SEQ ID NO: 715386 - DNA, 570 bp, Homo sapiens
aaatgtcaaccgtatgttagattttacccacttaaagaaaaaaatcccacaagaaacgttataggataatggaatgtgcaaaattaatcgcttttcaagggrtcgttccgagttttattctccttggttgaattccctccccaatttgcccctcagatatgcattctcttattgaacgatgtgattgtggcgactgtactggagcccactttgagtcaacgtcgcatttatcaaacagttccctctcacccaaatattcccagtgtagtcactgctagcaatcctcctttatttgtactctccgtttgtacctggtggattatatattatattaattcataataccagctctgccaggctccctacagttacaattattaaagctgtaactgaaacgttatctctcatattgatcttcaaccagaagttcttgtcccgaagcttttgtttcacattaagacactaatgatcaccttcaccaaatgagcagcttaatagtcacaaaaagctaaatgaaaagactttgatcaccacctttgagagcactgtgttccaacatctctcccatcc

SEQ ID NO: 715387 - DNA, 1152 bp, Homo sapiens
aaattttaagggtcacctttcaactagcaggacactacaataaactgtcattcattcatccacaaaatttccaaggcaaatgaggcatattttattacttcatgttacaaatgaggaaacagatgaaagggtataaaaatacatctataaaaattatcyctcttcatcccaacctgtaaatctggaagtagaagccttatttctccttcatctcaactctcaaattgttagtattaagtagttaaaaactaaaatctaaatttaaaagactaaaataaaaataaacaaaagctcgaaagaaaatgagagcactttctcaaaggggaaaaaaatatatccattctttccactgctccttcaaaactccattttataaaaagttcacaaattgaggtgtgtgatacagtcttttaaagtaattataatttgagtgtctttagatgaaataagacttttcaaatggcaaagtctctaccactccctactgtcttaatacctgcctgtttagtcttagctcctgatgtatctaggtttacaactctctgctttaaagaagtaaaatcttttgaagtaatcacatattgacattgacaattatattaacagaatgtgattcatcagaaataaagctaatctcctggagataaataaaaaataaaaataaaaaaattaaaaaaattaaagtcttgatgttttaaagattccccaaaataaggctgaggcaggcagatcacttgagctcaggagttcaaaaccagcttgggcaacatggcaaaaccccatctctacaaaaaacacaaaattattagctgggtgtggtaacacatgcctgtagtcccagctacttggggggctgcggtgaggggatcaatcaagcccaagaagtcaaggttgcagtgagctgagatagcaccactgcactccagcgtgggtgacaaagtgagacctcgcaaaaaaaaagaaagaaaaagattcctcaaaatatactcattattatatgagactgtcataatatagatcttagagttaactaattagaactgacaaaactgtgcttcctgaaaagacagtgattaatactgaagttattaaacttgtgttccaaaagaatttttatgagcattattttctgaacaagtacataagaactcc

SEQ ID NO: 715388 - DNA, 1152 bp, Homo sapiens
aaattttaagggtcacctttcaactagcaggacactacaataaactgtcattcattcatccacaaaatttccaaggcaaatgaggcatattttattacttcatgttacaaatgaggaaacagatgaaagggtataaaaatacatctataaaaattatctctcttcatcccaacctgtaaatctggaagtagaagccttatttctccttcatctcaactctcaaattgttagtattaagtagttaaaaactaaaatctaaatttaaaagactaaaataaaaataaacaaaagctcgaaagaaaatgagagcactttctcaaaggggaaaaaaatatatccattctttccactgctccttcaaaactccattttataaaaagttcacaaattgaggtgtgtgatacagtcttttaaagtaattataatttgagtgtctttagatgaaataagacttttcaaatggcaaagtctctaccactccctactgtcttaatacctgcctgtttagtcttagctcctgatgtatctaggtttacaactctctgctttaaagaagtaaaatcttttgaagtaatcacatattgacattgacaattatattaacagaatgtgattcatcagaaataaagctaatctcctggagataaataaaaaataaaaataaaaaaattaaaaaaattaaagtcttgatgttttaaagattccccaaaataaggctgaggcaggcagatcacttgagctcaggagttcraaaccagcttgggcaacatggcaaaaccccatctctacaaaaaacacaaaattattagctgggtgtggtaacacatgcctgtagtcccagctacttggggggctgcggtgaggggatcaatcaagcccaagaagtcaaggttgcagtgagctgagatagcaccactgcactccagcgtgggtgacaaagtgagacctcgcaaaaaaaaagaaagaaaaagattcctcaaaatatactcattattatatgagactgtcataatatagatcttagagttaactaattagaactgacaaaactgtgcttcctgaaaagacagtgattaatactgaagttattaaacttgtgttccaaaagaatttttatgagcattattttctgaacaagtacataagaactcc

SEQ ID NO: 715389 - DNA, 639 bp, Homo sapiens
tccactcttgctcggtttaagatgctgaatttgctgggtttttctctcttattaaacaggttggtcaggccaaagatgaactgctgaccaatcagctgatagaccatctcctgggggagaacgatggcatgcctaaggtactgaacacgtgggcttcgtgtgcatcctcaggtctcagttacagtttgattctgcctgtttttacccatcatgcttttacaacatagacatgaaaaattttctctctgccagtagtgtagatcatctagaccaggagcgtccaatctttttgcttccctgggtcacattggaagaagaagaattgtcttgggccacacataaaatacactaacactaacaatagctgatgagtttaaaaaamaaatcgcaaaaaaaactcataatgttttaagaaagtttacaaatttgtgttggactgcattcaatgctgtccagggccacatgtggcctgcaggctgtgggttggacaagttgatctagacagaccctgcgttttggaggataacgtatattcactctttaaaattggctttgccacctatgagatagccatgcccctctagataacaatcctcaccacatacaatttttctcaaatgttataattttgtttattct

SEQ ID NO: 715390 - DNA, 639 bp, Homo sapiens
tccactcttgctcggtttaagatgctgaatttgctgggtttttctctcttattaaacaggttggtcaggccaaagatgaactgctgaccaatcagctgatagaccatctcctgggggagaacgatggcatgcctaaggtactgaacacgtgggcttcgtgtgcatcctcaggtctcagttacagtttgattctgcctgtttttacccatcatgcttttacaacatagacatgaaaaattttctctctgccagtagtgtagatcatctagaccaggagcgtccaatctttttgcttccctgggtcacattggaagaagaagaattgtcttgggccacacataaaatacactaacactaacaatagctgatgagtttaaaaaaaaaatcgcaaaraaaactcataatgttttaagaaagtttacaaatttgtgttggactgcattcaatgctgtccagggccacatgtggcctgcaggctgtgggttggacaagttgatctagacagaccctgcgttttggaggataacgtatattcactctttaaaattggctttgccacctatgagatagccatgcccctctagataacaatcctcaccacatacaatttttctcaaatgttataattttgtttattct

SEQ ID NO: 715391 - DNA, 656 bp, Homo sapiens
tggatggatcgcctgaggtcagaagtcctagaccagcctgaccaatatgatgaaacctcatctcagctaaaaatacaaaaattagccggacgtggtggcatgtgcctgtaatcccagctactcaggaggctgagacaggagaactgcttgaacctgggaggtggaggttgcagtgagcctgtaatcccagctactgtaatctcctgccccagcaggagaattgcttgaacctaggaggcagagattgcagtgagccaagattgtaccactgcactccagcctgggtgacagagcgagactccgtctcaaaaaaaaaaaaaaggaaagaacataagaatatcaaaggaggatcaccccttctatataattaaaatttctcagcacagacactatrtgccttccccctcctaaaattcaaacatgtcagtttaagaacccctgagtactcattaattataatgttaatcattaaaattataattcaaaaatgtttattctgcattttgtggaggtataaaatgcatggtattataacattactaattgaaatctaaatgtgtccaaagagaacagattgtgtaaattacaaaaacatatacaaggaaaaatatcaccatatattgagtgctcatgtgggccaggcatttttctaagca

SEQ ID NO: 715392 - DNA, 1386 bp, Homo sapiens
gggtaaactatcaaagtcctcaaccttgatcacatctgaaaaatctttytttttttttttttttttgccatgtaaagtaacatgcacagattgtgaggattaggacttgtatatgtaaatttgggagggtcagtctgccaaccacatcattattctgccaaccacagcatcccagagataccagaatccttgaaatagttggcttcttaggtggttttgtttattactttaacttgcctagcttactctttagttatttagactacagtaaacttcttgtgagtggtcatgaattctagatgactggagcatattctatgtgcactgtatatggatttgtcatttaagtgttgctgattaaatgctctgtattcactcaactatcactgcaaaagaagatggatacaacttccagactcatctctcatccttcttcaaataagattttccagatttttttgcacctggtttctagctaaattccatccgtgggggcctactgagagattagactgcaggaagaaggaagcagccaaggtatttctgcctttctagtttggcttcatggggtagtttcctgcagtgattgcatttctttttggttccacctcccctgagaagccacctccatgattctagcttgagctggaaggactggcttcttggttctaggactaatgagtcctccctgtgggtacttgtggcttcctgctgttgctaatctctgggttgcctccatttcctaattggtttcttagctcttccatcatggtgcaaccaattcactatattacattttcactgtttgaaatagctagagtagtttctgttttcctgacttaactttcactgatagcatggagaataaagctgtgctaacttcattcttgcattcacaaaaatttttttcctcgtcaatctgaaagggctcttgtactcttaaaaaaatgcacaaagtttgacagaaaacccattcagtttgttcagaagtatataaaaaattagcacccttgtggcatttctgacatgagatatgtggctcattgtttgcttacggagactgatgtcatagggtaagctctatgggtacataagaaaagaatttcaggaagccactctgtgaactgcttgggattagatttctgaatgatgagcccagtggtgttggtggagcagaggacagcaccatatcccactgccagtgtcaatcaagaatactcaatcatggctttggggcacaaagggcaggataaagagaattccacatgtctaagaagtagttttctctgcctcaaggagggaaaaaactaggacaaggatgcaatctggggtggtgggtggctggctgtcactcatttcttctcacacacacacagtggaaaaggg

SEQ ID NO: 715393 - DNA, 577 bp, Homo sapiens
tggtctcgaactcctgacctcaggtgatccgcccgccttggcttcccgaagtgctgggattacaggcatgagccaccgtgccctgccacaattatgctaactttctaaaggactctttaagaattaccaacaactatggtttacccttctttactcagtagcaccgttctccacttacctttacaatagtctcagtatactgagcatttctttcttcctttcactacatgatcaagatcataatttcggagtgtcttctatctatcacttgatgaatatgcctgaacacttatacaggtgtctttacacatagtgaaaaaccaggattttcccttggggcagatgcagacaagagttagctgaaacatggagattatttttacatttctcataaactctagaaggcyagggaaacattttctacagtgttggtagactgaataattgctacaaaagtatatatatgcacttatccctgaaaaccatgtgtatgttatgctacgtgacaaaggcattttgcagatcttattaagattattaaactactttttattttatttttttaacttttatttta

SEQ ID NO: 715394 - DNA, 591 bp, Homo sapiens
tgtagaaagtgagaagagagggggtaagtccagaagacatgaatggggaaagaaaaygtgctatctgttgagatatttcaaagggacacccatttccacctacatgttccagttactatgctgcataatgcgttacccagaaacttcacagcttggagcaaccctcttaacatgctcacagattctattggtcagggcttcagacctgttggtcagggcccagcagaggatggctcctctctgctccatgctgtccggacctcagctgggaagactccatgccaggacttgagctggagctgctgaaccaagcatcttcccatgggccacctgtgacacttgggcatcttcccagcacggccaccttgaggggtgtttagacttcatccttgacagctcagggacacaaaagctagtgaccccacaaacaagcagaagcctaatggacttttcaaatggacccaggcttggaagtcactctgtgtcatatctgccacaccatttgggtgacaaattagtcacacaagtctatccagattcaagctccaaggggtagagatcactcaaagaatttgtaatcatacaaaggaa

SEQ ID NO: 715395 - DNA, 648 bp, Homo sapiens
atggtgaaagctgaaaggacagcctatcttcaactaacacccaaccagatttatggaacaaggaatagataaaaagtgatttaatctagagatgtacattaatataataatgctgagagtgacggtggcaacataattttacagtgagttagggcatctttctaagccttttcattgtattaactcaattatcacacctataaagacgaaacatgtactatattattatatcttcactttacagcaaaataaactttgataaagactttaaaatttatccaagttcacacagctagtaagtgtgaattcaaaaacagtcttcctctagaaccattgtaagctgaaaaatattaatgacccttttcaaatgtctgtgctgtataaacctccccagcccacacacctcttacctgcccccagmaatttcaataactcaaggtttctctttgtcataaataggttattattgctttgacagttttcagattaagaatgtctgttattgtgcggtcaaaccttagacagttgcatcattaatgaaaaccccagattgctttccagaatctagatagccttctgcaagtaacaaatagtatcctccagttctatttttcattgactgtttttccatcataaaatgtgtattta

SEQ ID NO: 715396 - DNA, 1373 bp, Homo sapiens
taagaatatatgtattatacatatacataagaatatatgtattatacatatacataagaatatatgtattatacatatacataagaatatattatacatatacataagaatatatgtattatacatataaatatatatatatatatatacacatctacaaccactaaaggactttagttatttccttactatataaaaacctcttatcgtacattcatctcttcaatttattcagcactaacttgtgctgggcaccagacaatgtttaggccctggagtctcagcaatgaacaaagataaaaaacggtcctcatggaacttacattctaattgagggaaagagacattcactaaaaacaaataaataacatgtaacaatgtaagtattactgggaaaaatagagaagaggatggaagtacaaggtgagaagrgggagttggaattttaaatgagatggtcatcactgagaagataatatctgagcaattctcaaaatgatggtgaagcagatactcagtggatatttagggaaagaatgttccaggcaggaaacacagcccaggcaagggtgaagtgggaatgtgcctactgtttatgaggcacagcacagagaatcaaagggaggaagcagagtgagctcattgttttaatcccctggtcattttgggctggctcctgccctctgaaaaaagccacagctcctgtcacgtggctctctacacctagtattctgtcttcagattctggtaatcgctgccttcaggcctagaggtcacattttaactagtgctgatatacgatcaatccccaggtacctgcacagacctctgtaaatagtcaaaatacctcaatttaagtgtgccatctcgttcctggcaatgccctaattcagaaatctagggcaatagtccaggtgggagacagtggtggcttggaccaggatattagcagtggactgataagaagcagttaaattttgacctactgacagattcaatgtcaaacacagctccagattctggcctaaacactgaaaggatggagtgccataaactgagattcattttttaaaaatcacaaattaacagaaaatatgtgcaaatatactaaaagtagctcacaggaaaagggatactgaaggcttacaaacaaatatgaagacactcagtcttactgttaattaaagaaatgcaaattaacataacagatactatctcctcctataaaactgacgaagatttaaaaatatgctaataaatgaggttgccatgggtttcaaaacacaactggaggggtgtaaacttctgtgagggaaagtatacaatacctaacaaaactttaaatatacatacattttgatccaaaaatctcc

SEQ ID NO: 715397 - DNA, 1303 bp, Homo sapiens
tttaattgctccaagtayatttgtgaaataagtatttgtgagtggtaaagggagggaggcgataaggaaaacaagtcttgttcaatctagatgaaatgctctgttattgttttcatcaaatttcaaattaaataataaaataaagattactggttggccgggtgtggtggctcaagcctgtaatcccaccactttgggaggccaaggtgggcagatcacctgaagttaggagtttgagaccagcctggccaacatggtaaaaccccgtctctactaaaaatacaaaaattagcagggcgtggtggcgtgcatctgtaatcccagctactcaggaggctgaggcagaagaatcgcttgaacccaggaggtggaggctgcagtgagccagaatcgtgccattacactccaaactgggtgacaagagcgagactccacctccaaaaaaaaaaaataaataaaagattactggcaaaaacaaatatatattcgtaagaatttaagttcaaataaagtaagaaattttgggtaaaaagttcagttttaccaacagtgcctaaagcatcaccattaaatttataatggcaaagcttaagagtcttcattacttgttgaatggtatgcagtgtcaacatctatttcatttaaagacctcactctctttaagggacagggtctcattctgttgcccaggctggagtgcagtggcctgattacagctcactgcagcctcaagctcctgggctcagtcagtcatcctcccgcttcagcttccagagcaattgatactacatgtgtgagccactgcacaagccaatttttttaatttttttgtaaaggcgagatctcactactgtccagtctagtctcaaactcctggcttcaggtgatcttccctctttgatctcccaaagcactaggattatacgcatgagccaccacacctggccttagacctctctttaagaacctaatccaatgagaattaaccctatatttgggaatttgtcatattatttgttctaaattgcttcagttggacttattcaattgaataagttcaattcccttattgaatattactggacttaagttattacactatacaactgctgctccttccatctttattatagacctttacctcattcaccactctaaaaacaagataacccaacagatttaatcctaaatgaactatcaaaaacttgtacaaaaatttctgtatatttacaaagatatttattacatgatcatttataataatgataaattaaaaataacctaagaatctataaacagaaaa

SEQ ID NO: 715398 - DNA, 1303 bp, Homo sapiens
tttaattgctccaagtacatttgtgaaataagtatttgtgagtggtaaagggagggaggcgatraggaaaacaagtcttgttcaatctagatgaaatgctctgttattgttttcatcaaatttcaaattaaataataaaataaagattactggttggccgggtgtggtggctcaagcctgtaatcccaccactttgggaggccaaggtgggcagatcacctgaagttaggagtttgagaccagcctggccaacatggtaaaaccccgtctctactaaaaatacaaaaattagcagggcgtggtggcgtgcatctgtaatcccagctactcaggaggctgaggcagaagaatcgcttgaacccaggaggtggaggctgcagtgagccagaatcgtgccattacactccaaactgggtgacaagagcgagactccacctccaaaaaaaaaaaataaataaaagattactggcaaaaacaaatatatattcgtaagaatttaagttcaaataaagtaagaaattttgggtaaaaagttcagttttaccaacagtgcctaaagcatcaccattaaatttataatggcaaagcttaagagtcttcattacttgttgaatggtatgcagtgtcaacatctatttcatttaaagacctcactctctttaagggacagggtctcattctgttgcccaggctggagtgcagtggcctgattacagctcactgcagcctcaagctcctgggctcagtcagtcatcctcccgcttcagcttccagagcaattgatactacatgtgtgagccactgcacaagccaatttttttaatttttttgtaaaggcgagatctcactactgtccagtctagtctcaaactcctggcttcaggtgatcttccctctttgatctcccaaagcactaggattatacgcatgagccaccacacctggccttagacctctctttaagaacctaatccaatgagaattaaccctatatttgggaatttgtcatattatttgttctaaattgcttcagttggacttattcaattgaataagttcaattcccttattgaatattactggacttaagttattacactatacaactgctgctccttccatctttattatagacctttacctcattcaccactctaaaaacaagataacccaacagatttaatcctaaatgaactatcaaaaacttgtacaaaaatttctgtatatttacaaagatatttattacatgatcatttataataatgataaattaaaaataacctaagaatctataaacagaaaa

SEQ ID NO: 715399 - DNA, 1303 bp, Homo sapiens
tttaattgctccaagtacatttgtgaaataagtatttgtgagtggtaaagggagggaggcgataaggaaaacaagtcttgttcaatctagatgaaatgctctgttattgttttcatcaaatttcaaattaaataataaaataaagattactggttggccgggtgtggtggctcaagcctgtaatcccaccactttgggaggccaaggtgggcagatcacctgaagttaggagtttgagaccagcctggccaacatggtaaaaccccgtctctactaaaaatacaaaaattagcagggcgtggtggcgtgcatctgtaatcccagctactcaggaggctgaggcagaagaatcgcttgaacccaggaggtggaggctgcagtgagccagaatcgtgccattacactccaaactgggtgacaagagcgagactccacctccaaaaaaaaaaaataaataaaagattactggcaaaaacaaatatatattcgtaagaatttaagttcaaataaagtaagaaattttgggtaaaaagttcagttttaccaacagtgcctaaagcatcaccattaaatttataatggcaaagcttaagagtcttcattacttgttgaatggtatgcagtgtcaacatctatttcatttaaagacctcactctctttaagggacagggtctcattctgttgcccaggctggagtgcagtggcctgattacagctcactgcagcctcaagctcctgggctcagtcagtcatcctcccgcttcagcttccagagcaattgatactacatgtgtgagccactgcacaagccaatttttttaatttttttgtaaaggcgagatctcactactgtccagtctagtctcaaactcctggcttcaggtgatcttccctctttgatctcccaaagcactaggattatacgcatgagccaccacacctggccttagacctctctttaagaacctaatccaatgagaattaaccctatatttgggaatttgtcatattatttgttctaaattgcttcagttggacttattcaattgaataagttcaattcccttattgaatattactggacttaagttattacactatacaactgctgctccttccatctttattatagacctttacctcattcaccactctaaaaacaagataacmcaacagatttaatcctaaatgaactatcaaaaacttgtacaaaaatttctgtatatttacaaagatatttattacatgatcatttataataatgataaattaaaaataacctaagaatctataaacagaaaa

SEQ ID NO: 715400 - DNA, 1303 bp, Homo sapiens
tttaattgctccaagtacatttgtgaaataagtatttgtgagtggtaaagggagggaggcgataaggaaaacaagtcttgttcaatctagatgaaatgctctgttattgttttcatcaaatttcaaattaaataataaaataaagattactggttggccgggtgtggtggctcaagcctgtaatcccaccactttgggaggccaaggtgggcagatcacctgaagttaggagtttgagaccagcctggccaacatggtaaaaccccgtctctactaaaaatacaaaaattagcagggcgtggtggcgtgcatctgtaatcccagctactcaggaggctgaggcagaagaatcgcttgaacccaggaggtggaggctgcagtgagccagaatcgtgccattacactccaaactgggtgacaagagcgagactccacctccaaaaaaaaaaaataaataaaagattactggcaaaaacaaatatatattcgtaagaatttaagttcaaataaagtaagaaattttgggtaaaaagttcagttttaccaacagtgcctaaagcatcaccattaaatttataatggcaaagcttaagagtcttcattacttgttgaatggtatgcagtgtcaacatctatttcatttaaagacctcactctctttaagggacagggtctcattctgttgcccaggctggagtgcagtggcctgattacagctcactgcagcctcaagctcctgggctcagtcagtcatcctcccgcttcagcttccagagcaattgatactacatgtgtgagccactgcacaagccaatttttttaatttttttgtaaaggcgagatctcactactgtccagtctagtctcaaactcctggcttcaggtgatcttccctctttgatctcccaaagcactaggattatacgcatgagccaccacacctggccttagacctctctttaagaacctaatccaatgagaattaaccctatatttgggaatttgtcatattatttgttctaaattgcttcagttggacttattcaattgaataagttcaattcccttattgaatattactggacttaagttattacactatacaactgctgctccttccatctttattatagacctttacctcattcaccactctaaaaacaagataacccaacagatttaatcctaaatgaactatcaaaaacttgtacaaaaatttctgtatatttacaaagayatttattacatgatcatttataataatgataaattaaaaataacctaagaatctataaacagaaaa

SEQ ID NO: 715401 - DNA, 533 bp, Homo sapiens
tttgtacctcagtgtcagacactgtagacgttcaacaaatgtttgtcaactgaatggatgctgatgcccaacaatgtcctaagaagttccagatttccataaaccaagaatattccattgcgtgcctactaccctaaagaaattaactttcacaaacattaaaacaaggttaaattatgtgcaatataattttaagtattamctcaatgtgggccacttatgatcatctgattaaaggaaactagggtgcagttcatgactaagatcccctgggtctgcaacactgaaattccagtcattcatgtagaaacaccatgggtttgacatgcataaaaccctgaaactctgcttccctagcagccggggacacagcctctgccctgccagcctcacccctctctgcctttttcttcctgcttagcaactccctgtgaggtacactggtctgccctgcagtgtgtactggactcgagaaagccaattacttctctcctgctcttgaagttgctgtggttgagggtttgtgataaatt

SEQ ID NO: 715402 - DNA, 2522 bp, Homo sapiens
ctcctcctccttactctcctttcatttttggctttatatacaggcacctttttaatttttataaccgtttggaagtaatttcaacctagttacttcgtcatacatctcctaagtacatgggcattttgttatgcattactaatatacccttatcaaattcaagaaatacaattttgccattgttatacaatctaacctagagtctataatttcaacatttgtctcattggacaaataatttttttacactttttaatccaggagccaaaagtcacacatttaattatcaagtttctttagcctcccttagatgctgtacagcttttctggggagggagtcttttttttatttagagtccttgatagttgtgttctagagtgattattaatttgaaagtgtctgaatgtttcctcacaattaaaattaccttttcctcaagaatactaagcaggtgatatatcctcaatgtaacatcaatttgtttattagtaatacagcttttttttttttttgacacagaatctcactctgtcacccaggctggagtgcagtggcactatcttagctcctgcctcagccccccaagtagctgggactacaggcatgcaccaccacatttggctaatttttgtatttttggtagacagggtttcaccatgttggccaggccagtctcaaactcctgacctcaagtgatccacctgccttggcctcccaaactactgggattacaggcatagtagtactaactttgattaacagtttttaagatagtatgccccagatttatccattgtaaaggggcttttattttcccttctgcaattggtaagtagtctgtgaaatgatacttatttcacagtagtctgtgaagtgtgaatatctggtttactaaaccaagagcttgctgtagcatccagtaataatttttcctgtattaatttttaaattgttaattggaaataagtaaaataaaaatatttattatatttataatcagttttatttttcaaagtaatttatattgactatcatatttaattttcacttgacatgtttatcttttaaataatgtttatttgcagccttccccatctaagattgagccagaatacttatggacccaaggcaggagagaacaggttttggcctttttgagtaaggaaatacagtcatcccttcaaatctgtgggggattggctacaggacaccctggaataccaaaacccatggatgttcaaatcccttatatcaaatgatgatgtagtatttgcatctaacctatgcatatccttccatatccttaaatcatctatacattatgtataatatctaatacaatgtaaaggatatgcaaatcggtgttaaaccctatgagattttaaaaatttgtattgtattttattgttgtattgttatctgtgctgtttttctttcagatatttttaatctgtggtttgttgaatctgtgggtgtggaacccatggttattatggaggactgactgtctttgaaagttggggtgtgaaaagggaaagataatttataaacttgttttgtgtctcagaaggcagaggtatttttgatattcttagcatatcagggcctcatctagttatccatcttctgttctagtataggaataatgtgcagaaactgacttgtactgatgagaggctgtatcttatcatctctgtgttttacacttgtgagtgtgtgtgtgtgtgtgtgtgtgtgtgtgcaggtatatacacacagaaatattaatatatgtcattgggagtattacctcaaatcccactgaaggtataattaaatatataatatatttacataattacctttctaaatcccccgaattctgaattsggaaacacatcaggccccaagcatttctaaaaaaggcttgtagaccagtgttagggttcctgctttttcttatttctgtttcatgactaagcctgggatatggctttagaaacatacaggtatgaaggagatatgagggaaactaaaacagatgtttcccatttaaactctgtaaggagaaggcctgatgggtttgacctgatcaaagtataccattcgacacatcactgtttggcagagggaggtcttgactttaaacatcaagaaagctttatggtctggaatgcatgcagaagttcattcatgacttaaagagtgatacattagtgagttataggtgagattgatgaatgtcactgattgggtcactacaaatggagaggaggtaggtctatgcacatcaagacctaataggggttatagccaaagctcaaattataatgccagttgagcattgccagagctcaagcaaatgatctgcgctcatcaattacaaattctatgattagataccactagggcattcaaggaaccagaggtcttgggacattatggaggaagtgggaaaaatcacaggactctacttagatattttaacaccctcttcttcccactaagatggtgtagagcatcaaatatcaaacattcattg

SEQ ID NO: 715403 - DNA, 673 bp, Homo sapiens
tgaataaatcaaaattttcattttattttaggaataaatatagtctttaaataaaattrtctctcaaagtaattaaatccagtcaggtcactagcttttattatttcatatactttattaatattatgaggcaatatcacccatcatctgttatcatcatattatgatgcatatttattaaatatccccatatttcaagcataggtgcatcctatgaagatataccacaacagagcttctattaggtatagaaacaaggggtcatagatgatcagagctaaaagaaaacaaattgcttaccaaaagcaaccttgccagttattttagaaataaaattactgagaccaaaagtggtgtggagactttccacaataactgttcagaaagttctatcatccaattttctcctgctaatcctggagtgcctgcaactaaaaccaccatttaaaaccccccatgcaaagacacgttctgtattagtagtaactcaatgctctgacagaataccagagtccaagctcaagacaaagttaagaaagatcaagtattttgcaattgatcaccatgcgttgtgtggtctctatctcgcctcaaggccttcatgctctattatagggaataaagaagtgatatgtctctgtgtataataaatcagattgttcatctataaaaa

SEQ ID NO: 715404 - DNA, 1811 bp, Homo sapiens
  misc_feature 23: n = A,T,C or G
ctactgatctgacaggaggcagnagctgagctttggttgcttaaccgtggctcacctcctgctgtgcggcccagttcctaccaggccatgaactgtcaggggttgaggagtcctgctatagagcatagaattatattatctatttcagggaaaggagaaaaagatttctgcagcctgtgataggctaatatttttgtgaactatgtatcagaagatattttttattaataccgctagaaacaaaacacagtgctgctatttttttttttttgatgaataaatttcaaagtctagacaactgctaatgggtatgaaagggaactcattccaatcccactcctgtgcctccctgagctgtggtttttagtatcagccaaggtccacgtcagggatgtcattgcctttgaatatcactggttacattttgtagatgttttcaggagaatcgctaaagactgactcttaatggggtagaaggtgaaaaataggtaaaactcttctctaattgcctgtgcttccattcctgagacccttaatcatgctgattggaagcaggcatttgtggctgacagtctctctcttggcctgacccctgacacacacatgccttgctcagcccgcgtcatcttcttttgtttgttcaacctgttttgttgccttgcacgcccatgctactatgacccttagcctcaggagcacagatttcttgctctgcttcttcagtcctctcagtctaaacaggtgggaaagtcctgaatagagggccttgctgctcatctatcagatgttgaaatcaaagttgacctcggtgcaaataatattttcaacttaaatgtttaacttctctattttgacatatagtacccatctgatgggtatcattttgcaaatacagactcagataagaaagaaatgtcttattatttaatttgcataaaatgaaataaaatcttatcataagtccttttaccacttggctcttgggaaattgaatcatatcactgctggcttccctgtctttcaccctctgtttctgctgtcagagtctgaaggaaattagtgagaaagctatcatttatgatttaaataatctaattgagcatgagaatacgtactgcaatatgcaaaaaatattgcaagactatcttcttagctatgttgagaacagggcacgttaatcatattcacatgatgaatactaccatgtgaattggtagttaacataattcatgattaggaacgggttaatataattcatgaaaagaaagagaacagttcttggtacatgattgtcatcatcatcatcatgcaactactgtttgaacacatctagtgaaagagagatccatatctcacaagacaagtcatctcaacattgcgtagctctcattattaccaagttcttgtcaattaagagaaaggcttcagattttaatatgtgtgaactctagttttttgcatcccactatattttcaactgtgctcacgcgctagcaccattgccaaagatrttttttatctatttatcactccgcagcacctgctattcaataaatgatgttgaccaataagcacacacatatattctatgttgagctagaaaaagtgattacttaaaaagaaattttatttaataatgggaaaatatactctgatattctgtttctgaaactaatgaagaacaaaattttatagaaataccatcatgattgttatgctaaaatatgctagattatttccctgaaatatttatttgtagtaaatcatatgctatctaaactaagtaatttggtaagaaattacattcttta

SEQ ID NO: 715405 - DNA, 1811 bp, Homo sapiens
  misc_feature 23: n = A,T,C or G
ctactgatctgacaggaggcagnagctgagctttggttgcttaaccgtggctcacctcctgctgtgcggcccagttcctaccaggccatgaactgtcaggggttgaggagtcctgctatagagcatagaattatattatctatttcagggaaaggagaaaaagatttctgcagcctgtgataggctaatatttttgtgaactatgtatcagaagatattttttattaataccgctagaaacaaaacacagtgctgctatttttttttttttgatgaataaatttcaaagtctagacaactgctaatgggtatgaaagggaactcattccaatcccactcctgtgcctccctgagctgtggtttttagtatcagccaaggtccacgtcagggatgtcattgcctttgaatatcactggttacattttgtagatgttttcaggagaatcgctaaagactgactcttaatggggtagaaggtgaaaaataggtaaaactcttctctaattgcctgtgcttccattcctgagacccttaatcatgctgattggaagcaggcatttgtggctgacagtctctctcttggcctgacccctgacacacacatgccttgctcagcccgcgtcatcttcttttgtttgttcaacctgttttgttgccttgcacgcccatgctactatgacccttagcctcaggagcacagatttcttgctctgcttcttcagtcctctcagtctaaacaggtgggaaagtcctgaatagagggccttgctgctcatctatcagatgttgaaatcaaagttgacctcggtgcaaataatattttcaacttaaatgtttaacttctctattttgacatatagtacccatctgatgggtatcattttgcaaatacagactcagataagaaagaaatgtcttattatttaatttgcataaaatgaaataaaatcttatcataagtccttttaccacttggctcttgggaaattgaatcatatcactgctggcttccctgtctttcaccctctgtttctgctgtcagagtctgaaggaaattagtgagaaagctatcatttatgatttaaataatctaattgagcatgagaatacgtactgcaatatgcaaaaaatattgcaagactatcttcttagctatgttgagaacagggcacgttaatcatattcacatgatgaatactaccatgtgaattggtagttaacataattcatgattaggaacgggttaatataattcatgaaaagaaagagaacagttcttggtacatgattgtcatcatcatcatcatgcaactactgtttgaacacatctagtgaaagagagatccatatctcacaagacaagtcatctcaacattgcgtagctctcattattaccaagttcttgtcaattaagagaaaggcttcagattttaatatgtgtgaactctagttttttgcatcccactatattttcaactgtgctcacgcgctagcaccattgccaaagatgttttttatctatttatcactccgcagcacctgctattcaataaatgatgttgaccaataagcacacacatatattctatgttgagctagaaaaagtgattacttaaaaagaaattttatttaataatgggaaaatatactctgatattctgtttctgaaactaatgaagaacaaaattttatagaaataccatcatgaytgttatgctaaaatatgctagattatttccctgaaatatttatttgtagtaaatcatatgctatctaaactaagtaatttggtaagaaattacattcttta

SEQ ID NO: 715406 - DNA, 577 bp, Homo sapiens
ccttccttccttccttctttctttctttctttctttctttctttctttctttctttctttctttctttctttctttcttcttttccttttttgagactgagtctcactctgtcacccaggctggagtgcagtggcactttctcggctcactacaacctccacctcccaggttcaagtgattctcctgcctcagcctcctgagtagctgggattacaagcgcccgccaccacacccagctaatttttgtgtttttagtagagacgagttttcaccgtattggccaggcttgtctcgaactcctgaccttgtgattcacccgcctcggtcccccaaagtgctgggattacaggcatgagccaccgttcccagcctaccttctatctttcaaaatgtttcattcatatactttttctttcttttggagaaggttttgctctgtcactgcagtggcaagatcttgactcactgcaaccttcatctcccaggtttaaccaagaacctgagactacaggcatgcgcyaccacgccagcctaatttctttatttttagtagaagcaggatttcgccatgttgcc

SEQ ID NO: 715407 - DNA, 1331 bp, Homo sapiens
cctaataaaagctaaagatataatcttgctcagaactataagctggcttctccacctaccattatcctttgccttgattactctgctctatatcatcatcttgcataccctaacacatgacttttatactcattgctccatctgttataaacatactgacaaataatgtttcctctttagcagtgatttcctgatctaatcaatattttggtatcatataaactcattggattattagtgattatcactaacctgctatcatacaatacacatttaatttcttttctccttgtttattgtctaaactgctaggtagaagggcactttatctattcttatcacaaatgtaggacaacggctagcacaaggttaggaacttacacggtattcaattaattgttgtttgataattgattaaaaactctagaaccttgggttccattcttatgatgacaataatataatgctagggatgccaagtgaatagcaagtttaaccaagttatcctgtatggggagccacagttacttaaaatgtctgataatccacagtcctggtgatgatgtggaatatcactctcttaatcaatgcaaacaatttatttaatagtcatagtgctaaagatggcatgccctccaaatgagcaattgcactctttgttatgcatttatatgaatatgtatataggaatagtcatgataaaactactaattattataaaatttttggaaaaagcataactattaaaaatgaaattggtaacttaagactactcaatacatcaataaaaatgaatgaactatgcaaaaacatggatgaatttcaaaaacgaaatttattttcattatttattaagaaagaaaatttgcactgtttccaagtctaataccaaacagaactaaatggtatttctggataaacaaattagaaaataaaattataaaaaatgcaagaaaaaaattaccacaaaagttrggatagaagttacattaagagatggcatggtcttatacaaagaaaaccctaaagactccgaaagactcctagacttgacaaatgactgcaataaagtttcagaatacaaagtcaatgtccagtagtcagtagtatttctatatagcaataatattcaagctgagaacaaaatcaagaactcaatctcatttacaatagccacacacacacacacacacacacacacacacacacacacataactgagaaatacgtttaaccaaggaggtaaaatatttctacaataagaactacaaaagatgggtggaagaaacctgaaataaaacaaactaatggaaaaatatcccatgttcatg

SEQ ID NO: 715408 - DNA, 595 bp, Homo sapiens
tgtagtgaggaagagaaacagtggaagtaagctaaatacttctcttccatagcagcaattcagtagataatgccccaaattaaaaagcagagaaggagcaataaaagcatgttatggaaagttataaacataaatacccaaaggttctgaaagtagtcaaggggggatggggaagtaacaagaaggcattggaaaggaacagtttttcattacaggtctgacagaaccatctgtctccaaacaatgtgtgtgtacaactttgataaaaacaaaattttaaaacaaagaatatggttatttcattttaatattagtaatgaacgatttgycaatctagggaaaatttcaaccttatggaaataaagaaatttctaactaaagattcaattacatggaacctccaaaaatcaaagggaggaaaacatacagctgaatgttagtagtctgtgggctgtcagcacttaacattacaatctttaagttcctagatttgttttcctaattgctaccaaaataaaagctttcctaaaatttgaaggctcagtctacagaatcttgcatcattcagcaattcagaaaaacttaacttgtttga

SEQ ID NO: 715409 - DNA, 1304 bp, Homo sapiens
tgggagaattgcttgaacccgggaggctgaggttacagtgaggtgagatcgcgcctttgcactccagcctgggtgactgagtgagactccatctccaaaaaaagaaaaaaaaaaaaagcaaatggccagtcagagttctaagcaaatggccagccggagttctgttttttctttattatgctacttattaaaatttattgaatgtctgtacagaaattagggaggacagtaggaatgtctttaccctctagtaagtctgaatagtccttacaagtttgggacagactagatggtccctaaaatcaagaacagattctggttttctttgtttataatgttagattttaggccaattaatattccagttagaaccttggggatccctgcaaagaggtcctgtattatttcagttctgcttttcatatctttttttcagttgatgctagatcaagttggactaaatcttcttggatgtgtctatttggctttgtctacccaaattttagcttcatgagttgacttcatttgcttccaccttgtgtcatgaaggccagtgcagtcacagcagcatcagcaacagccatcaaggaaatgtccatcctcaaggtacaaagggagcaagttccactgggcatatggcagttgcatctcagcagataaacaggagataggacatctggagcagcccttgtaaataacgcaaagcgggattcttttaaatgttgatttgcaaatcttaagttacaatagataattaaaataaaaaagttaaaagttamattttatattgaacttgatgattgtgagttcagctatcatggcataaaatctgtgtttcacaaacatcactttctagatacattttaaaaagtaaggtgataatagtcatagtcatgatgattataatttgtagaataaagtaaatatttcagagcttttctgataaacactacaaaatgtgtttgccaaatataagttcattaaatcaataacgacaatattgttaatcaatattaacaaatatataacataaagccatcatgcaaataatagcttgtttgcttgaaaaaaactggacaagtattttatcaaaaaagaaataaagctttattaataaattgaagaaaactaactaggtgttcagctatagaaagacatgttatgttataaatatcaattatctcggcattgttctacagattcagcgcaattttagttttttagaggcactttttcatggaatttacaaatcatgtaagtaaacatagaaattcaaaggatcaagaaaaattatgatacccctg

SEQ ID NO: 715410 - DNA, 1304 bp, Homo sapiens
tgggagaattgcttgaacccgggaggctgaggttacagtgaggtgagatcgcgcctttgcactccagcctgggtgactgagtgagactccatctccaaaaaaagaaaaaaaaaaaaagcaaatggccagtcagagttctaagcaaatggccagccggagttctgttttttctttattatgctacttattaaaatttattgaatgtctgtacagaaattagggaggacagtaggaatgtctttaccctctagtaagtctgaatagtccttacaagtttgggacagactagatggtccctaaaatcaagaacagattctggttttctttgtttataatgttagattttaggccaattaatattccagttagaaccttggggatccctgcaaagaggtcctgtattatttcagttctgcttttcatatctttttttcagttgatgctagatcaagttggactaaatcttcttggatgtgtctatttggctttgtctacccaaattttagcttcatgagttgacttcatttgcttccaccttgtgtcatgaaggccagtgcagtcacagcagcatcagcaacagccatcaaggaaatgtccatcctcaaggtacaaagggagcaagttccactgggcatatggcagttgcatctcagcagataaacaggagataggacatctggagcagcccttgtaaataacgcaaagcgggattcttttaaatgttgatttgcaaatcttaagttacaatagataattaaaataaaaaagttaaaagttaaattttatattgaacttgatgattgtgagttcagctatcatggcataaaatctgtgtttcacaaacatcactttctagatacattttaaaaagtaaggtgataatagtcatagtcatgatgattataatttgtagaataaagtaaatatttcagagcttttctgataaacactacaaaatgtgtttgccaaatataagttcattaaatcaataacgacaatattgttaatcaatattaacaaatatataacataaagccatcatgcaaataatagcttgtttgcttgaaaaaaactggacaagtattttatcaaaaaagaaataaagctttattaataaattgaagaaaactaactaggtgttcagctatagaaagacatgttatgttataaatatcaattatctcggcattgttctacagattcagcgcaattttagttttttagaggcactttttcatggaatttacaaatcatgtaartaaacatagaaattcaaaggatcaagaaaaattatgatacccctg

SEQ ID NO: 715411 - DNA, 1146 bp, Homo sapiens
tctataatctggcatctgcttgtttccctagccttatctcctaaacatcttgccctaaaattcttccctctcattatgcttcccttcctactcatggctgctcaaacatatttttttctttcaccctgggaatgattttgtcacctcatacacatttcccacagacttatctcaccctagggaaagttctcatattttcattatttcctcggaacrgctctgattccagtctcatttccctctgggtgccattctaatccatacctcattattcactcttctttacatatgttattgaccatataataccacaagatgactttttttttcttttttttttttctttgagatggagtctcgctctgtcacccaggctggagtgcagtgccaggatcatgccattctcctgcctcagcctcccaagtagctgggatcacaggcgcccaccaccgcaccaggctaattttttgtatttttagtagagacggagtttcaccgtgttagccaggatggtctcaatctcctgacctcgtgatccgcccgcctcagcctctcaaagtgctgggattacaggcgtgagccactgcgcccagccccataagatgactttttttccacctcctactattctacttctgtcatattactgagaatagccttactgaatatatctgcttctgcttcctctgcctgggtctctcataagcccaggacttcaccaggaccctcaccccaaagttactggtacctgggacttaggagggagatatgttatacccatacccccaatcagctggggagttggatccagaccttattctctctcaccttctttctgacagaatccttgaaatgacaaagctctattaggacggcacttgaacccaccctcattttaccctggagacatcactgaccccagtttcatcttactttgagatcagctctggccttggcctccccagtcaccataccaaagagaaagtcataccccagtataccttgggaatgatttgcactctggccttggctggcactcaactcaggaaagaaaagtgacatgaagcaactggcccaaagtaacactagtactatccccaactagggaaagaaggtctttctctggggtggtaggggagaaaaact

SEQ ID NO: 715412 - DNA, 1146 bp, Homo sapiens
tctataatctggcatctgcttgtttccctagccttatctcctaaacatcttgccctaaaattcttccctctcattatgcttcccttcctactcatggctgctcaaacatatttttttctttcaccctgggaatgattttgtcacctcatacacatttcccacagacttatctcaccctagggaaagttctcatattttcattatttcctcggaacggctctgattccagtctcatttccctctgggtgccattctaatccatacctcattattcactcttctttacatatgttattgaccatataataccacaagatgactttttttttcttttttttttttctttgagatggagtctcgctctgtcacccaggctggagtgcagtgccaggatcatgccattctcctgcctcagcctcccaagtagctgggatcacaggcgcccaccaccgcaccaggctaatttyttgtatttttagtagagacggagtttcaccgtgttagccaggatggtctcaatctcctgacctcgtgatccgcccgcctcagcctctcaaagtgctgggattacaggcgtgagccactgcgcccagccccataagatgactttttttccacctcctactattctacttctgtcatattactgagaatagccttactgaatatatctgcttctgcttcctctgcctgggtctctcataagcccaggacttcaccaggaccctcaccccaaagttactggtacctgggacttaggagggagatatgttatacccatacccccaatcagctggggagttggatccagaccttattctctctcaccttctttctgacagaatccttgaaatgacaaagctctattaggacggcacttgaacccaccctcattttaccctggagacatcactgaccccagtttcatcttactttgagatcagctctggccttggcctccccagtcaccataccaaagagaaagtcataccccagtataccttgggaatgatttgcactctggccttggctggcactcaactcaggaaagaaaagtgacatgaagcaactggcccaaagtaacactagtactatccccaactagggaaagaaggtctttctctggggtggtaggggagaaaaact

SEQ ID NO: 715413 - DNA, 617 bp, Homo sapiens
tcgattttggtaattagatcagtaaaaaactctgtcatatctttctgttccccagtattcagaggctgcttatccatggtgtatgttttacagaaaggtctaggattatatgctttgcattcactctcctgcaaataaaaaggggaacattctaagtgtcagataaaaataagaaaattataggttcttcaatgaacayataacaaaaacaaaagaacaggtagtaaatctactaagttagttttaaatggttgcttctatttctttctgtttagttttcatagtatttttaatttaatggtcttggtgctagaagattcttaaattacctaggatatttgtattttcaagtcaaggaatttctaggaagaaatctgagactcaaatgactcacagccgggcacagtggctcaagcctgtaaccccagcactttgggaggccgaagcaggcggattatgaggtcaagagattgagaccatcctggccatcctttaccaacatggtaaaaccccatctctgctaaaaatacaaaaactagctgggtgcggttgcgcatgcctgtagtcccagctactcaggaggcagaggttgcagtgagccgagatcgtgccactgc

SEQ ID NO: 715414 - DNA, 652 bp, Homo sapiens
ctcactgcaacctccgcctcctgggttcaagggattctcctgcctcagcctcccaaatagctgggattagaggtacccaccaccatrcccagctattttttttgtatttttagtagagatggggtttcaccatgttggccagcatggtcttgatctcctaacctcgtgatccaccgacctctgcctcccaaagtgctgggattacaggcgtgagccaccacaccccacacgcagctaatttttgtatatctggtagagatagggtttcaccatactggccaagctgctttgtccactttctaatggggttgtttctgcttgtaaatttagtttttaactaaaaataccgtttatgagatctactcataatcagcacatctgagtgttccttctgtttctactaattcctagaagtgttaatagctttaaaggtggttatcaatatgaagaagtaaaaccaagaagcatgaccaagttgccagctaaaaagaaaaccactgaaaacatgcttctttgataactgcttttataagactacgcagatgggtataccaaatttattcagaaatatttccataagctaaatgaactaatcattcaactacttttagtcataatgtacagagataaattttaaagtatcaataactaa

SEQ ID NO: 715415 - DNA, 1082 bp, Homo sapiens
cccttctgaggtagagacagtctctattcatctaccctatttattagctaacttaaaaaakaacaatatagtaatctaatgtctcttttgaaaaagttattacaggataggatgcttttttcctttttagaaataatttgactttccactttaagaaaaaccaagtgatccaaggacgggcactttgacagaatgaccaagcagtgctcctccaaaaccctcctctaggggcctcctgaagctaggtggtctggggtcagtgcagaacagcaatcctggccaggtgtggatggtgtccagcgagccatgggaccccgggtgggcagcagagattcagtgtgctgttggcagtggactctgtagtgggaccctatgacaatctacgatgatgtgccatgtggaagcttaggaaaggacaatgtgaaggaatgaacaatatcctccccattcaccttttagactgaacagtgcacaaaaacaggggcccaaaggaaggaatgctcaaatggtacagacaaagtagagtttctagcatcatggcccacatctgatcaatgtcactcaaatgatctgtaagtctgggaaagcagagctgccaccaccatatatgagccaatgatgctgaacacagaggctgaagatacagactggtatcattctgtgggtcaaagacaccaaactctacaccattgattccttatctctttctttccactccccaaaataaaatttggtcttgcagcttcaatgggagccactttttcatttgttaacaaaagaaaagttcacatccatgtgaagaagttatcccaggtggactccactgccagcctggaagagctctgctaccactttaagtctacagatcaggatttcaaagctctctggagttgcaaaactctgtgagattgtttaattttgcaatttcccttctacccaagctgtgtgcatgttgggggaaggcagaacatccaagatatcacaaaacgaggttgaaactatccctaatccatagccatctcaattcttaggctacttacttggacaatgttaaggcaaacatttgccttttatgttacaca

SEQ ID NO: 715416 - DNA, 1644 bp, Homo sapiens
gtgtcatttctcaaggttattgttttgaaagttcctttggatctatggttctgtgcagttgtttaaagtcagtctttttatcttacaaatggaaataggataaatttctctttctcacccaagtatatggtaaatcacatatctatatcttttgtttattaataaaaactattaggatgaaagacattctatttaatgactgaagttttaaagtttataaagtagatcagtatagaggggcacagcagatgggaagaatactgataagacagcatggtgttgatgtggctgctcccaccaggcatcagcagtctttgaaaatccatttaattcaccgggcgcgtggctcacgcctgtaatcccagcactttgggaggccgaggtgggcggatcacagggtcaagagatctagacgatcctggctaacacggtgaaaccccatctctactaaaaatacaaaaaattagctgggtgtggtggcgggcgcctgtagtcccagctacttgggagggtgaggcaggagattggcatgaacccgggaggcagagcttgcaatgagccgagatcacaccactgcactccagcctgggcgatagagcgagactccgtctcaaaaaaaaaaaaaaaaaaaaaaaaaaatccatttaattcaattcgtaggcttagattaaaaaatactaaataaattggattgctcagagagtcacatgggaactatactggtacctcataaataagaattagtgctgttcattaaacctggggagctgataaacaggtttattcatttcattctgttcagttgtgctcacgtatctaccaaccattttgaaagcttaaggtagctgagtttgaagataatctttttgatgttrctatatattggtatgcaagctgtggaagcagatctccatgtgagatattttaaattactctgatagtacacttggacatttagcctgaagaaattctgaattatagtctgaattagaagaaattctataagtaaacaaacatcctcatagatgaagtaacccaagtttgttgatgatttttttcctcttgaatttggtaaaatgctattttagaaaaattcattaagaggaaagtagtgggttattaaaattttactattccctggactcatttaagtgaaaaaatattttaagaatttgtgaaatatggttttcagtgttagtatttctgataacttacccttgaatacagtgtaaagctcagctgtattgtactgatctctgggtttttttattcttattttttattgtttattttttttttgctgttgttgtttttgagatgcggtcttgccctatggcccaggctggagtggcgtgatctcgactcactgcaacctccacctccccggttccagcgattcttgtgccttggcctcctgagtagctgggattacgggcgcccacgaccatgtgcgactaatttttgtatttttagtagaggcagggtttcaccatgttgcccaggctggtcttgaacttctgacctcaggtgatccgcctgcttcggcctcccaaagtgctgggattacaggcgcgagccaccgctcctggccatactgatctctttggaaagaggatttgtgttaatataaacaggttccagagg

SEQ ID NO: 715417 - DNA, 1644 bp, Homo sapiens
gtgtcatttctcaaggttattgttttgaaagttcctttggatctatggttctgtgcagttgtttaaagtcagtctttttatcttacaaatggaaataggataaatttctctttctcacccaagtatatggtaaatcacatatctatatcttttgtttattaataaaaactattaggatgaaagacattctatttaatgactgaagttttaaagtttataaagtagatcagtatagaggggcacagcagatgggaagaatactgataagacagcatggtgttgatgtggctgctcccaccaggcatcagcagtctttgaaaatccatttaattcaccgggcgcgtggctcacgcctgtaatcccagcactttgggaggccgaggtgggcggatcacagggtcaagagatctagacgatcctggctaacacggtgaaaccccatctctactaaaaatacaaaaaattagctgggtgtggtggcgggcgcctgtagtcccagctacttgggagggtgaggcaggagattggcatgaacccgggaggcagagcttgcaatgagccgagatcacaccactgcactccagcctgggcgatagagcgagactccgtctcaaaaaaaaaaaaaaaaaaaaaaaaaaatccatttaattcaattcgtaggcttagattaaaaaatactaaataaattggattgctcagagagtcacatgggaactatactggtacctcataaataagaattagtgctgttcattaaacctggggagctgataaacaggtttattcatttcattctgttcagttgtgctcacgtatctaccaaccattttgaaagcttaaggtagctgagtttgaagataatctttttgatgttactatatattggtatgcaagctgtggaagcagatctccatgtgagatattwtaaattactctgatagtacacttggacatttagcctgaagaaattctgaattatagtctgaattagaagaaattctataagtaaacaaacatcctcatagatgaagtaacccaagtttgttgatgatttttttcctcttgaatttggtaaaatgctattttagaaaaattcattaagaggaaagtagtgggttattaaaattttactattccctggactcatttaagtgaaaaaatattttaagaatttgtgaaatatggttttcagtgttagtatttctgataacttacccttgaatacagtgtaaagctcagctgtattgtactgatctctgggtttttttattcttattttttattgtttattttttttttgctgttgttgtttttgagatgcggtcttgccctatggcccaggctggagtggcgtgatctcgactcactgcaacctccacctccccggttccagcgattcttgtgccttggcctcctgagtagctgggattacgggcgcccacgaccatgtgcgactaatttttgtatttttagtagaggcagggtttcaccatgttgcccaggctggtcttgaacttctgacctcaggtgatccgcctgcttcggcctcccaaagtgctgggattacaggcgcgagccaccgctcctggccatactgatctctttggaaagaggatttgtgttaatataaacaggttccagagg

SEQ ID NO: 715418 - DNA, 617 bp, Homo sapiens
tggagggcagtgggcgatctcggctcactgcaagctccacctcccgggttcacgccattctcctgcctcagcctcgcgagtagctgggactataggcgcccgccatcacgcccggctaatttttttaatatttttagtagagacggggtttcactgtgttagccaggatggtctcgatctcctgacctcgtgatctgcccgcctcggcctccctaagtgctgggattacaggcgtgagccaccacgcctagccatttctggttaattttataggaggtttctaatttatattcattgaatgagaaaaaatatatttttaacctggaaccctcttaaagaaataaattattacttatttctggagctagtctgacttaccttgtgctgataayatctgtacttaagaacatacatgtgatgaatgcagtcaacactcatgattgttttctaaacaaagtacctatttttatagaatcgtaaggaaagaaatattgccaacagagtacacagaattatctctggaatattactttttacttttaaaattatctcctacagttgggacattttgtgttattctctggaagcattattaactttagtatttatagttgtta

SEQ ID NO: 715419 - DNA, 617 bp, Homo sapiens
tggagggcagtgggcgatctcggctcactgcaagctccacctcccgggttcacgccattctcctgcctcagcctcgcgagtagctgggactataggcgcccgccatcacgcccggctaatttttttaatatttttagtagagacggggtttcactgtgttagccaggatggtctcgatctcctgacctcgtgatctgcccgcctcggcctccctaagtgctgggattacaggcgtgagccaccacgcctagccatttctggttaattttataggaggtttctaatttatattcattgaatgagaaaaaatatatttttaacctggaaccctcttaaagaaataaattattacttatttctggagctagtctgacttaccttgtgctgataacatctgtacttaagaacatacatgtgatgaatgcagtcaacactcatgattgttttctaaacaaagtacctatttttatagaatcgtaaggaaagaaatattgccaacagagtacacagaattatctctggaatattactttttacttttaaaaytatctcctacagttgggacattttgtgttattctctggaagcattattaactttagtatttatagttgtta

SEQ ID NO: 715420 - DNA, 617 bp, Homo sapiens
tggagggcagtgggcgatctcggctcactgcaagctccacctcccgggttcacgccattctcctgcctcagcctcgcgagtagctgggactataggcgcccgccatcacgcccggctaatttttttaatatttttagtagagacggggtttcactgtgttagccaggatggtctcgatctcctgacctcgtgatctgcccgcctcggcctccctaagtgctgggattacaggcgtgagccaccacgcctagccatttctggttaattttataggaggtttctaatttatattcattgaatgagaaaaaatatatttttaacctggaaccctcttaaagaaataaattattacttatttctggagctagtctgacttaccttgtgctgataacatctgtacttaagaacatacatgtgatgaatgcagtcaacactcatgattgttttctaaacaaagtacctatttttatagaatcgtaaggaaagaaatattgccaacagagtacacagaattatctctggaatattactttttacttttaaaattatctcctacagttgggacattttgtrttattctctggaagcattattaactttagtatttatagttgtta

SEQ ID NO: 715421 - DNA, 1147 bp, Homo sapiens
gtatcgggcagctggccctggcggaggaaggcggcagcctgtgcaaaggccttgagcagcgggctgagcaggcrgcagaggaaaagaaagaaatctgggcagtgtgactgctggctgagctggaggggacaggccggggtgagtgcagctccccaccacctccctaccacctccctccaggggcagctttttgaaacacaccctggagtactggccctcggtctctttgaagtcatcactgtcactatcagtaaaatccccactcggtttccacagcagctttctgctcagtcgccgttgccctgtgtcacaggctggccggacccggagccattgttctctgacaagctggccagggatcaaccctacacccccagaccaggtacatgcaggtgaaaccagtaaaagcagacctagagacccaagaggatggccagagccatgccccagcacctgctgggccaacttgcagagtgagaggaagtgaattcccaccctcaagggcagtagccctgtggccaagaaatgtggggagcaggaggtgtgcagagaacctcagaggcacacatgtccagtgctatccagagagacacacacagaaccggggcataggtggccatatcccaaggcacagggagcagaggtgcgagctaggcttccccgctgcaaggccaggggctgcccacccccacagcacacacagggcagaggaggagcctggggcagctggcactcagggtgggaggctggaggaggccaggctccaggcaaggatcttgtctccaactgccctgcctacctcctcagcaaccaggagcccgcattggatgagcctgtccagcacctcctgacagtagcagtaggaagactggcagggctgggagaaaaaggcacccatgtggcctcaggagagccaggcacatgggcaggggcctagccaaagaccgggcaaggccagacctaccacccaggaggtttcagaggtagagcatgggcagggatgggccattcctaccaccaagaggggaaggcctaggaccaagtgggccgtaggggaggcctgacctttagcagcagcaggtcttgcggcagcaggtgcatcagcagcaggatctggcggtacagctcattctggctcagcagcaat

SEQ ID NO: 715422 - DNA, 1147 bp, Homo sapiens
gtatcgggcagctggccctggcggaggaaggcggcagcctgtgcaaaggccttgagcagcgggctgagcaggcggcagaggaaaagaaagaaatctgggcagtgtgactgctggctgagctggaggggacaggccggggtgagtgcagctccccaccrcctccctaccacctccctccaggggcagctttttgaaacacaccctggagtactggccctcggtctctttgaagtcatcactgtcactatcagtaaaatccccactcggtttccacagcagctttctgctcagtcgccgttgccctgtgtcacaggctggccggacccggagccattgttctctgacaagctggccagggatcaaccctacacccccagaccaggtacatgcaggtgaaaccagtaaaagcagacctagagacccaagaggatggccagagccatgccccagcacctgctgggccaacttgcagagtgagaggaagtgaattcccaccctcaagggcagtagccctgtggccaagaaatgtggggagcaggaggtgtgcagagaacctcagaggcacacatgtccagtgctatccagagagacacacacagaaccggggcataggtggccatatcccaaggcacagggagcagaggtgcgagctaggcttccccgctgcaaggccaggggctgcccacccccacagcacacacagggcagaggaggagcctggggcagctggcactcagggtgggaggctggaggaggccaggctccaggcaaggatcttgtctccaactgccctgcctacctcctcagcaaccaggagcccgcattggatgagcctgtccagcacctcctgacagtagcagtaggaagactggcagggctgggagaaaaaggcacccatgtggcctcaggagagccaggcacatgggcaggggcctagccaaagaccgggcaaggccagacctaccacccaggaggtttcagaggtagagcatgggcagggatgggccattcctaccaccaagaggggaaggcctaggaccaagtgggccgtaggggaggcctgacctttagcagcagcaggtcttgcggcagcaggtgcatcagcagcaggatctggcggtacagctcattctggctcagcagcaat

SEQ ID NO: 715423 - DNA, 2380 bp, Homo sapiens
gaaaaagaagaaatataaatcttgcaaagaaaaaataattctcagtttctattttattttattatttatgtctttgtttgtttgtttatttttgagatggagtctcaccctgttgcccagcctggagtgcagtggcatgatctcggctcactgcaatctgcctctcaggttcaagtgattctcccacctcagcctcctgagtagctgggattacaggtgtgcgcctccatgcccagctaatttttgtatattttagtaaagacggggttcaccatgttggccaggctggtctcagactcctgacctcaggtgatccccgtgcctcggcctcccaaagttctgggattacaggtgtgagccactgtgcctggccttatttttatttttttgtttattggtatcttctgtgaacttttagcctcttcagaggcagagggaatatttttatttgtgcttgattattttattatgcatagattttagtacataaataggtttttattatagttttattacatataaggaaacaattttaaattaattattttagtttatcagtgtcctcatgaaaatgaaaatgagcaaatataagtgattatcactattccaaaagcactgctttaatttatagtttttttcataataaacttcccaactgtatgtatgcattctttcaatccagttattcatcaagcataacctgaatacctattatgtagcagacagattccaccatctctcaggactcttccacccttaacaacttcatgtttacctgcccagcctgagcaagctgagatttaaaatggaagcgttagggacttaatcccagttggatcttttattccttttttttttttttttaaacaaaagcaattctgaagttagaaaatagtgaaagataacctttaactgccatttcagaaacttatgacactctcaaatactactattaatcgttgcaaatacctaatttacataacattctgtaagtattgaaaaaaatgggccatacctattcatttgaatcctgagttttctttggattatttttttttktaaattgaagtgagaattactttgttttaaaaatttgtttttttatttttgccttctttttccacagtactttatttaggtgccaattatatgagtagaactgcctgttctatgtactgtatcccacttaatgtaaggcatcacggattgggtgatgccacattactttatatatcaataagataatgtttaaaatgttgccagttataaatgtaataaacaattaattgtaaacagtattccaatgtcaggagatgttaatatataagagaatagtagcttatataagagaatggtgagaaaatgagcatctgagaatgactgaaatacaatgatacatctaatctttaatagatacctcaatgtagatatgattgtatcattttacttaattaaaatgtctttgtaggtagtaatatctaaaaattattgagctgttatttgtgttagaaagtgttctaaatgctgtgcatagattcttatgtaagcatcacagcagtgttctgtgggctagctactattctcttatatattttattgataaggaaattgaagcaaagaaaggctaaataacagctaagtgacagagcttacagtaaattttaagccccaattaaactgaatccaaaagccaaggcttttctattaaatagcctgctctttcattaatgtggtgagtaataagcgctaacaaatgttgtactttcttcacaagaaaattacatatttgttttgaagacagagaaatgacatgctaattaatgcttacagttacatgttttaaaaagtcctgtcactctcacaggaccgccctacatttggcctgtgcactggccaaccggaaatggtacatctcctggtgtccagaagatgtgagcttaacctctgcgaccgtgaagacaggacacctctgatcaaggtatatagtagctgactctttgagcatgagatggatttggttgaagtacataggataaaatgaatttatctcattggaataccaccatataactagtaggaaatcctacggagtgtttattttgatttttcagtatttgcatgtttctcggtctaatactgacaggctgtacaactgaggcaggaggcttgtgcaactcttctgctgcaaaatggcgccaatccaaatattacggatttctttggaaggactgctctgcactacgctgtgtataatgaagatacatccatgatagaaaaacttctttcacatggtacaaatattgaagaatgcagcaaggtataggtcaaccaatgttattttcaaactatctgaaatgcatttattttaacattgacacat

SEQ ID NO: 715424 - DNA, 2380 bp, Homo sapiens
gaaaaagaagaaatataaatcttgcaaagaaaaaataattctcagtttctattttattttattatttatgtctttgtttgtttgtttatttttgagatggagtctcaccctgttgcccagcctggagtgcagtggcatgatctcggctcactgcaatctgcctctcaggttcaagtgattctcccacctcagcctcctgagtagctgggattacaggtgtgcgcctccatgcccagctaatttttgtatattttagtaaagacggggttcaccatgttggccaggctggtctcagactcctgacctcaggtgatccccgtgcctcggcctcccaaagttctgggattacaggtgtgagccactgtgcctggccttatttttatttttttgtttattggtatcttctgtgaacttttagcctcttcagaggcagagggaatatttttatttgtgcttgattattttattatgcatagattttagtacataaataggtttttattatagttttattacatataaggaaacaattttaaattaattattttagtttatcagtgtcctcatgaaaatgaaaatgagcaaatataagtgattatcactattccaaaagcactgctttaatttatagtttttttcataataaacttcccaactgtatgtatgcattctttcaatccagttattcatcaagcataacctgaatacctattatgtagcagacagattccaccatctctcaggactcttccacccttaacaacttcatgtttacctgcccagcctgagcaagctgagatttaaaatggaagcgttagggacttaatcccagttggatcttttattccttttttttttttttttaaacaaaagcaattctgaagttagaaaatagtgaaagataacctttaactgccatttcagaaacttatgacactctcaaatactactattaatcgttgcaaatacctaatttacataacattctgtaagtattgaaaaaaatgggccatacctattcatttgaatcctgagttttctttggattattttttttttwaaattgaagtgagaattactttgttttaaaaatttgtttttttatttttgccttctttttccacagtactttatttaggtgccaattatatgagtagaactgcctgttctatgtactgtatcccacttaatgtaaggcatcacggattgggtgatgccacattactttatatatcaataagataatgtttaaaatgttgccagttataaatgtaataaacaattaattgtaaacagtattccaatgtcaggagatgttaatatataagagaatagtagcttatataagagaatggtgagaaaatgagcatctgagaatgactgaaatacaatgatacatctaatctttaatagatacctcaatgtagatatgattgtatcattttacttaattaaaatgtctttgtaggtagtaatatctaaaaattattgagctgttatttgtgttagaaagtgttctaaatgctgtgcatagattcttatgtaagcatcacagcagtgttctgtgggctagctactattctcttatatattttattgataaggaaattgaagcaaagaaaggctaaataacagctaagtgacagagcttacagtaaattttaagccccaattaaactgaatccaaaagccaaggcttttctattaaatagcctgctctttcattaatgtggtgagtaataagcgctaacaaatgttgtactttcttcacaagaaaattacatatttgttttgaagacagagaaatgacatgctaattaatgcttacagttacatgttttaaaaagtcctgtcactctcacaggaccgccctacatttggcctgtgcactggccaaccggaaatggtacatctcctggtgtccagaagatgtgagcttaacctctgcgaccgtgaagacaggacacctctgatcaaggtatatagtagctgactctttgagcatgagatggatttggttgaagtacataggataaaatgaatttatctcattggaataccaccatataactagtaggaaatcctacggagtgtttattttgatttttcagtatttgcatgtttctcggtctaatactgacaggctgtacaactgaggcaggaggcttgtgcaactcttctgctgcaaaatggcgccaatccaaatattacggatttctttggaaggactgctctgcactacgctgtgtataatgaagatacatccatgatagaaaaacttctttcacatggtacaaatattgaagaatgcagcaaggtataggtcaaccaatgttattttcaaactatctgaaatgcatttattttaacattgacacat

SEQ ID NO: 715425 - DNA, 615 bp, Homo sapiens
cagcgttttgtgtcaaataccatgctttgtaaagaaacaagtttcttctccatcatgcagtttagagtgttcttccccattcccgggacttctgcaaatgccattcagagtgggaacataggaaagcaacattgtcacctcacggtgcaatcacagcctttaggtgtcattcccaggagggtaggatgagtaactgacaagaaacgtgagaagcttcattttcttagtagagagcagcaggcaaagctatggctctcaatgctaattttctgggtggccacaacagaccagttcccgtgggtcccagcctrtcaggagaatggcttccagagttgaccaacccacagacatccatgggaaatgcatggaaacctgtcaaattaatgaaattgatagatgacacaaaactgggaagaaagaccaatgtactatgtgactgtattcgtttccttggatgttgtaacaaagtaccacaaaggggtagctcaaagcaacggaaatttacgctcccacagttccaggtgacagaagtctgaaatcaaggtgtctgcagggccacctccctctgaaggctctaggggaggatcctttcctgcctcttcctggtgtctgggg

SEQ ID NO: 715426 - DNA, 786 bp, Homo sapiens
gccgctgaaaagcccagatggaaaatcatctgagcacaagggaatacgatctatttgctggctgatggcttttggtccttccaagagtctcgcagcaacctgggatgggaccccactgatatctgtggtcagatctgggcagagcagcaatacattttaaatcttctgtagccgatgcttcctggggcctctycaggaggcagcagctccggggcatggtctattttattaggaatgtggaaattctgccttactgggcttctactctgaggatattggctgtatatatgtaatggatctgggagacatcacatttaggtaagcacaggtgtctcagaactctggggaaaagtggcgtgctgtggatctgtactgttgggatggatggctgaggaagacagcagagaaagttcccagagctttctcctggaggtatgagcttttgcccctaagtgccagggatacctctgcatgggcctatgccactgagattttagtccttcaggggcagtggtttcaggtgggctaaatgctttaaaagatcgacccaccgctatagaacatttcccacttcctgtttcttagtcttggatttcccaggaaaagctccctggtggtttgcatttatgcagggactgctaagatcccacagtctcgatatcaatgacatttgatatggaacacgattagtttgaatgaggtttgataggacattaaaccactcgaaagtggttgagatttatggtggttcgtttgccctgaggatggctgaggacggcctgactc

SEQ ID NO: 715427 - DNA, 786 bp, Homo sapiens
gccgctgaaaagcccagatggaaaatcatctgagcacaagggaatacgatctatttgctggctgatggcttttggtccttccaagagtctcgcagcaacctgggatgggaccccactgatatctgtggtcagatctgggcagagcagcaatacattttaaatcttctgtagccgatgcttcctggggcctctccaggaggcagcagctccggggcatggtctattttattaggaatgtggaaattctgccttactgggcttctactctgaggatattggctgtatatatgtaatggatctgggagacatcacatttaggtaagcacaggtgtctcagaactctggggaaaagtggsgtgctgtggatctgtactgttgggatggatggctgaggaagacagcagagaaagttcccagagctttctcctggaggtatgagcttttgcccctaagtgccagggatacctctgcatgggcctatgccactgagattttagtccttcaggggcagtggtttcaggtgggctaaatgctttaaaagatcgacccaccgctatagaacatttcccacttcctgtttcttagtcttggatttcccaggaaaagctccctggtggtttgcatttatgcagggactgctaagatcccacagtctcgatatcaatgacatttgatatggaacacgattagtttgaatgaggtttgataggacattaaaccactcgaaagtggttgagatttatggtggttcgtttgccctgaggatggctgaggacggcctgactc

SEQ ID NO: 715428 - DNA, 1471 bp, Homo sapiens
catggtgttgaagaggttaaaatatgtgattccagcgtattgactaagttcaacactttaaaaacagcaggtgcaacaagatgactttgaccttcctgctgtttcttaaaagcagagggtgaaattcctatgtgaaagatgccctccctagatgatgcaacatttttatatagtcaaagtcgaaactgggagagttctgtacagatcttgttaaaaataactcttatcttttaagcctctccatataatttagtggcttcttcacaactaactcttctctgtccaatccactacataattaactgactttagctacttctttggggtcttcatttctttatgagggctcctgtgctgcgtgaagtttgtattaagtttttctcctgttaatctatcttatgtggattaaattcttggactcagctgggaccctaagaggagggaggtagacttttcccacccctacagtgtgtatatatcagggttccaagccaggttgtctggacagaggaacccaattcccttgagttgaggggctgtctttgcttttaagccgttgccctgcagaaggggcttggtgttgcggttattctgggggagcgtccagtcccaggtgaaatgactcctgccatgcccagctaccagataatgaagcttcttcccagggtcacaactccaagaatgaggaacgcctcgtcctcaggccagcggcgcagctgagcctctctgggctcatatcacagtcaccataactgcactgtctccactctaacggggctcccagatcacagaccctaccggccgccgctctggcccgccaggatcctcacgcttttaagtcaggtgcggtttctggaagaagcctggtggtgccacatctacaggcgaatcagatcccagagcagacagagctgaccacctgccctgtggggcgtgcaaccccaggtgcagattacagacagggaaggagggaggagcttagctgaaaccccttcctgacccctttccaataagcactcaggggtagcaaaacatccaggaacttttagttctgggtcagytgggacagcggtagggacagcgtcctgttcgtgccttctctgagttttctattaggtgccaccaaacacattcccacccaaaagaaccattatattggaccttactgaaaaggttaaaatatgcattctggcatggtaactgtttcagtgaaaggcacttgaaaaacagcaggtgcaagatcactctccccatagcagaaggaagacagcatccttatccttaggactagaagctgccagctaaagaatactgcagagcgtcactctaatctttttagtcacattttcaaagtttattcttctctgtttaatccagtatttaagtagtggacgcgaactgcttgctcgggtctgtccctctttccttcctttccttcccttccttccttccttccttccttccttccttc

SEQ ID NO: 715429 - DNA, 1483 bp, Homo sapiens
gctattaatggaatcccctttaaaaaatattttctcaatgaaaatatgtcaagtatgaaaaaattctgattaaatgttactattcaaaatatgatcagggccaacataagytagaattagatgctcttcaatgaaacttatgcaaaagtttgtgagaggagtagtaggaaatactatacctctaacgatttttaggtttctctagaaaagtacagctgtactaaaactgaaaatagatatctgctgttgatattgataatattcctgggcagcttttcctcactgagaaccacacgtattcttcttatccatgcttccaaagatcttcaaatttctttatatagatattaaataaatcttgggctttttttgtgatctccccaagactgattcctttcagccgctgatatagttttcattataaaatagcaatatggaatattcttccagaggttcaacagaaacttcattctatttatctctgaagaggaaagtaaatcacatccaaaggattaaggattataagaagcaaggcttcaggttttcattcagcttaaatatcattggaatattttaattttatttactgacctcctatctttgtgttatttttaatatgtatttttatatgttttaaatgaaatatgctattataatttggcttttgtacaatcaatattgacttttatttacccttttccttgcattttcattctttcatatgggattatttttcttctgcctgaagaaccttatttcaccttcattttgaaaacggttttcactgggtatggaactttagattggcagtgattcccgctactcctcattccccccaccaccaacatttaaaagatatcatatgttgccttctgtttctggatgctttaggattttctctttgtttttggttatcagaagttttactttgatgtggctttgattatgtttattttgcttgggtttcacagagtatcttcagtctgtggattcaggtctatcggttgaaaaattcttagctatttaacctctctctctctttcctgtatttttgggaactattagtttattattgctacataataaattacagtagcccctgcatccataatttaaatgacctgcaatcaactgtggtctgaaaatattaaggtattttgggagacacagaaagagagagagagagaatcttcacataacttttattacagtattgctataattgttctattttattaatagttattgttaatctcttactgtgactaatttattaattaaactttattataggtatgtatgtataggaaaaaaaggagtagatatagggttcagttctattcatgatttcagacattcagggatcttggaatgtatttcccatggataaggggggattattgtaccacaattttagtggttttgaataacactcatttattagctttcagttctaaggtcagcaatccagacatgccatgca

SEQ ID NO: 715430 - DNA, 1483 bp, Homo sapiens
gctattaatggaatcccctttaaaaaatattttctcaatgaaaatatgtcaagtatgaaaaaattctgattaaatgttactattcaaaatatgatcagggccaacataagctagaattagatgctcttcaatgaaacttatgcaaaagtttgtgagaggagtagtaggaaatactatacctctaacgatttttaggtttctctagaaaagtacagctstactaaaactgaaaatagatatctgctgttgatattgataatattcctgggcagcttttcctcactgagaaccacacgtattcttcttatccatgcttccaaagatcttcaaatttctttatatagatattaaataaatcttgggctttttttgtgatctccccaagactgattcctttcagccgctgatatagttttcattataaaatagcaatatggaatattcttccagaggttcaacagaaacttcattctatttatctctgaagaggaaagtaaatcacatccaaaggattaaggattataagaagcaaggcttcaggttttcattcagcttaaatatcattggaatattttaattttatttactgacctcctatctttgtgttatttttaatatgtatttttatatgttttaaatgaaatatgctattataatttggcttttgtacaatcaatattgacttttatttacccttttccttgcattttcattctttcatatgggattatttttcttctgcctgaagaaccttatttcaccttcattttgaaaacggttttcactgggtatggaactttagattggcagtgattcccgctactcctcattccccccaccaccaacatttaaaagatatcatatgttgccttctgtttctggatgctttaggattttctctttgtttttggttatcagaagttttactttgatgtggctttgattatgtttattttgcttgggtttcacagagtatcttcagtctgtggattcaggtctatcggttgaaaaattcttagctatttaacctctctctctctttcctgtatttttgggaactattagtttattattgctacataataaattacagtagcccctgcatccataatttaaatgacctgcaatcaactgtggtctgaaaatattaaggtattttgggagacacagaaagagagagagagagaatcttcacataacttttattacagtattgctataattgttctattttattaatagttattgttaatctcttactgtgactaatttattaattaaactttattataggtatgtatgtataggaaaaaaaggagtagatatagggttcagttctattcatgatttcagacattcagggatcttggaatgtatttcccatggataaggggggattattgtaccacaattttagtggttttgaataacactcatttattagctttcagttctaaggtcagcaatccagacatgccatgca

SEQ ID NO: 715431 - DNA, 1483 bp, Homo sapiens
gctattaatggaatcccctttaaaaaatattttctcaatgaaaatatgtcaagtatgaaaaaattctgattaaatgttactattcaaaatatgatcagggccaacataagctagaattagatgctcttcaatgaaacttatgcaaaagtttgtgagaggagtagtaggaaatactatacctctaacgatttttaggtttctctagaaaagtacagctgtactaaaactgaaaatagatatctgctgttgatattgataatattcctgggcagcttttcctcactgagaaccacacgtattcttcttatccatgcttccaaagatcttcaaatttctttatatagatattaaataaatcttgggctttttttgtgatctccccaagactgattcctttcagccgctgatatagttttcattataaaatagcaatatggaatattcttccagaggttcaacagaaacttcattctatttatctctgaagaggaaagtaaatcacatccaaaggattaaggattataagaagcaaggcttcaggttttcattcagcttaaatatcattggaatattttaattttatttactgacctcctatctttgtgttatttttaatatgtatttttatatgttttaaatgaaatatgctattataatttggcttttgtacaatcaatattgacttttatttacccttttccttgcattttcattctttcatatgggattatttttcttctgcctgaagaaccttatttcaccttcattttgaaaacggttttcactgggtatggaactttagattggcagtgattcccgctactcctcattccccccaccaccaacatttaaaagatatcatatgttgccttctgtttctggatgctttaggattttctctttgtttttggttatcagaagttttactttgatgtggctttgattatgtttattttgcttgggtttcacagagtatcttcagtctgtggattcaggtctatcggttgaaaaattcttagctatttaacctctctctctctttcctgtatttttgggaactattagtttattattgctacataataaattacagtagcccctgcatccataatttaaatgacctgcaatcaactgtggtctgaaaatattaaggtattttgggagacacagaaagagagagagagagaatcttcacataacttttattacagtattgctataattgttctattttattaatagttattrttaatctcttactgtgactaatttattaattaaactttattataggtatgtatgtataggaaaaaaaggagtagatatagggttcagttctattcatgatttcagacattcagggatcttggaatgtatttcccatggataaggggggattattgtaccacaattttagtggttttgaataacactcatttattagctttcagttctaaggtcagcaatccagacatgccatgca

SEQ ID NO: 715432 - DNA, 1483 bp, Homo sapiens
gctattaatggaatcccctttaaaaaatattttctcaatgaaaatatgtcaagtatgaaaaaattctgattaaatgttactattcaaaatatgatcagggccaacataagctagaattagatgctcttcaatgaaacttatgcaaaagtttgtgagaggagtagtaggaaatactatacctctaacgatttttaggtttctctagaaaagtacagctgtactaaaactgaaaatagatatctgctgttgatattgataatattcctgggcagcttttcctcactgagaaccacacgtattcttcttatccatgcttccaaagatcttcaaatttctttatatagatattaaataaatcttgggctttttttgtgatctccccaagactgattcctttcagccgctgatatagttttcattataaaatagcaatatggaatattcttccagaggttcaacagaaacttcattctatttatctctgaagaggaaagtaaatcacatccaaaggattaaggattataagaagcaaggcttcaggttttcattcagcttaaatatcattggaatattttaattttatttactgacctcctatctttgtgttatttttaatatgtatttttatatgttttaaatgaaatatgctattataatttggcttttgtacaatcaatattgacttttatttacccttttccttgcattttcattctttcatatgggattatttttcttctgcctgaagaaccttatttcaccttcattttgaaaacggttttcactgggtatggaactttagattggcagtgattcccgctactcctcattccccccaccaccaacatttaaaagatatcatatgttgccttctgtttctggatgctttaggattttctctttgtttttggttatcagaagttttactttgatgtggctttgattatgtttattttgcttgggtttcacagagtatcttcagtctgtggattcaggtctatcggttgaaaaattcttagctatttaacctctctctctctttcctgtatttttgggaactattagtttattattgctacataataaattacagtagcccctgcatccataatttaaatgacctgcaatcaactgtggtctgaaaatattaaggtattttgggagacacagaaagagagagagagagaatcttcacataacttttattacagtattgctataattgttctattttattaatagttattgttaatctcttactgtgactaatttattaattaaactttattataggtatgtatgtataggaaaaaaaggagtagatatagggttcagttctattcatgrtttcagacattcagggatcttggaatgtatttcccatggataaggggggattattgtaccacaattttagtggttttgaataacactcatttattagctttcagttctaaggtcagcaatccagacatgccatgca

SEQ ID NO: 715433 - DNA, 1483 bp, Homo sapiens
gctattaatggaatcccctttaaaaaatattttctcaatgaaaatatgtcaagtatgaaaaaattctgattaaatgttactattcaaaatatgatcagggccaacataagctagaattagatgctcttcaatgaaacttatgcaaaagtttgtgagaggagtagtaggaaatactatacctctaacgatttttaggtttctctagaaaagtacagctgtactaaaactgaaaatagatatctgctgttgatattgataatattcctgggcagcttttcctcactgagaaccacacgtattcttcttatccatgcttccaaagatcttcaaatttctttatatagatattaaataaatcttgggctttttttgtgatctccccaagactgattcctttcagccgctgatatagttttcattataaaatagcaatatggaatattcttccagaggttcaacagaaacttcattctatttatctctgaagaggaaagtaaatcacatccaaaggattaaggattataagaagcaaggcttcaggttttcattcagcttaaatatcattggaatattttaattttatttactgacctcctatctttgtgttatttttaatatgtatttttatatgttttaaatgaaatatgctattataatttggcttttgtacaatcaatattgacttttatttacccttttccttgcattttcattctttcatatgggattatttttcttctgcctgaagaaccttatttcaccttcattttgaaaacggttttcactgggtatggaactttagattggcagtgattcccgctactcctcattccccccaccaccaacatttaaaagatatcatatgttgccttctgtttctggatgctttaggattttctctttgtttttggttatcagaagttttactttgatgtggctttgattatgtttattttgcttgggtttcacagagtatcttcagtctgtggattcaggtctatcggttgaaaaattcttagctatttaacctctctctctctttcctgtatttttgggaactattagtttattattgctacataataaattacagtagcccctgcatccataatttaaatgacctgcaatcaactgtggtctgaaaatattaaggtattttgggagacacagaaagagagagagagagaatcttcacataacttttattacagtattgctataattgttctattttattaatagttattgttaatctcttactgtgactaatttattaattaaactttattataggtatgtatgtataggaaaaaaaggagtagatatagggttcagttctattcatgatttcagacattcagggatcttggaatgtatttcccatggataaggggggattattgtaccacaattttagtggttttgartaacactcatttattagctttcagttctaaggtcagcaatccagacatgccatgca

SEQ ID NO: 715434 - DNA, 2387 bp, Homo sapiens
ttttacagttcacaatatgtttaatatcataatattcattgacacttccttattcatctgagtcctattatgcaaatatatagtccctgtaataaggcaggaaacttacacgtgagatgaagaaaaaggataagagggttgagctctctgttccacacatttagagggagcttttcctctataaaatattattccttaccaaattccatccaggatttatttttttgctttttgcttttctgtgatctttcctaacctccaaactttatgtttttattctttttttaaatatttctaatccattttattcttacagctatagagaggtagcttttttcttatcctctgttctaccttctgttctaaaagtctaattccaactacttttacatttataacttttaacctcgtggatattataactgcataaaaatgttaaatattttgtatttgtttcagcttttatactttattttacttgcatctatcttgtctactttaaaactattaaaattactgacattttcataaactctttcctttcctttttggaaaaatgttttaaaaaacataatgacctgcaagaaacatggtaagagtagataatccattcgaaaaatagctagttttttgtctcactttataaaaattcattacaagaaaagactattttttaaaatctatgcctagacactcaggagaagtatatttaaaccagctcccaatcaataagtcttataatgatggtgacatatgatttctttgttggaatgattttctagttgtccttgtgtcaagagtttctaaacagccattggatttcaagaaaatgatccaaaccaaatggcatgaaccatgagggatagaactatagaattaatagagaaagacaattggcctttagcaagttaagttcctccaaatactcttttttagttttattattttccagtcagttttccactcttttatcaagataaaaggaaactttggttatgtagtccccctaattttttgtgcaattcttcccctaatctaaaatcagagatatctcacataagcccagttcaagaccagcctgggcaacatagtgagatttctctacataaaatttaaaaattagctgggtatggtgatgtgcactacggtcccagctactcaggggggctgagggagactgaggctgcagtgagccatgatcatgctgctgtgtttcagcctgggtgacagagtgagaccctgcctcaaaamaaaaaaaaaaagaaagaaagaaaggaaaaaagcaaacattttaaaaattcttttgaacattcttataatagtttacatgaagtctttgtttactacatccaacacctgagccacctcagagacagtttgtactgactttttctttatatgggccacattttcttctttctttgcatttttcatgaggttttgttgaaaattggacactttaaataatacgttgtagcttttctggattctgacttccccaccctcaggagttgcgttattgctgttttctgtctcttgtttattacttttcaggactaattaaataaattctatcttcctaggagtatgcagccactgaagcctatgttctatttttaattattttcctcatttttaagcctggcttcccaggagtcaccctgggtcagcataccttgatggccacccaataattgggcaggggttttacttaaatatcttgagtcagtagggcttccactttttgctgaggggatctgtacatggattggatcacatattcaagtttcaggcagtttacaagctactttgactttcactttctgtttatgtaaggacttgtgctcagccaggaaccagtagataactggggccatctctgacctctcctgagtgtgtgaaccctttcagatccccatgaatatattaaagctttcaaagcctaatatcattggccagatatatcttttacatttttggctggtttactgtttcccctaacaactattgctgcctctggtagctacgatgctggccttttccaaagactggccaccaatattgtaattgctgactacaatgtcccaggacttttccatggagctcaaaactagatcaaccacctcaagtggcaggaagactgttagccttcactgttaccaagacatggagggtagggaggaaagaaaagacaatggatgcagtcccaaatttaaatgccacagaccctactcttctaaccaatgctcaataattcttgaataaatgctttcaatttattgtatgcctttgcttaatttccagagtttcaaaatagttgttgacaattctgccagttttaccaccacattttggaggtcaggattttccacgtttctctctttgca

SEQ ID NO: 715435 - DNA, 2387 bp, Homo sapiens
ttttacagttcacaatatgtttaatatcataatattcattgacacttccttattcatctgagtcctattatgcaaatatatagtccctgtaataaggcaggaaacttacacgtgagatgaagaaaaaggataagagggttgagctctctgttccacacatttagagggagcttttcctctataaaatattattccttaccaaattccatccaggatttatttttttgctttttgcttttctgtgatctttcctaacctccaaactttatgtttttattctttttttaaatatttctaatccattttattcttacagctatagagaggtagcttttttcttatcctctgttctaccttctgttctaaaagtctaattccaactacttttacatttataacttttaacctcgtggatattataactgcataaaaatgttaaatattttgtatttgtttcagcttttatactttattttacttgcatctatcttgtctactttaaaactattaaaattactgacattttcataaactctttcctttcctttttggaaaaatgttttaaaaaacataatgacctgcaagaaacatggtaagagtagataatccattcgaaaaatagctagttttttgtctcactttataaaaattcattacaagaaaagactattttttaaaatctatgcctagacactcaggagaagtatatttaaaccagctcccaatcaataagtcttataatgatggtgacatatgatttctttgttggaatgattttctagttgtccttgtgtcaagagtttctaaacagccattggatttcaagaaaatgatccaaaccaaatggcatgaaccatgagggatagaactatagaattaatagagaaagacaattggcctttagcaagttaagttcctccaaatactcttttttagttttattattttccagtcagttttccactcttttatcaagataaaaggaaactttggttatgtagtccccctaattttttgtgcaattcttcccctaatctaaaatcagagatatctcacataagcccagttcaagaccagcctgggcaacatagtgagatttctctacataaaatttaaaaattagctgggtatggtgatgtgcactacggtcccagctactcaggggggctgagggagactgaggctgcagtgagccatgatcatgctgctgtgtttcagcctgggtgacagagtgagaccctgcctcaaaaaaaaaaaaaaaagaaagaaagaaaggaaaaaagcaaacattttaaaaattcttttgaacattcttataatagtttacatgaagtctttgtttactacatccaacacctgagccacctcagagacagtttgtactgactttttctttatatgggccacattttcttctttctttgcatttttcatgaggttttgttgaaaattggacactttaaataatacgttgtagcttttctggattctgacttccccaccctcaggagttgcgttattgctgttttctgtctcttgtttattacttttcaggactaattaaataaattctatcttcctaggagtatgcagccactgaagcctatgttctatttttaattattttcctcatttttaagcctggcttcccaggagtcaccctgggtcagcataccttgatggccacccaataattgggcaggggttttacttaaatatcttgagtcagtagggcttccactttttgctgaggggatctgtacatggattggatcacatattcaagtttcaggcagtttacaagctactttgactttcactttctgtttatgtaaggacttgtgctcagccaggaaccagtagataactggggccatctctgacctctcctgagtgtgtgaaccctttcagatccccatgaatatattaaagctttcaaagcctaatatcattggccagatatatcttttacatttttggctggtttactgtttcccctaacaactrttgctgcctctggtagctacgatgctggccttttccaaagactggccaccaatattgtaattgctgactacaatgtcccaggacttttccatggagctcaaaactagatcaaccacctcaagtggcaggaagactgttagccttcactgttaccaagacatggagggtagggaggaaagaaaagacaatggatgcagtcccaaatttaaatgccacagaccctactcttctaaccaatgctcaataattcttgaataaatgctttcaatttattgtatgcctttgcttaatttccagagtttcaaaatagttgttgacaattctgccagttttaccaccacattttggaggtcaggattttccacgtttctctctttgca

SEQ ID NO: 715436 - DNA, 2387 bp, Homo sapiens
ttttacagttcacaatatgtttaatatcataatattcattgacacttccttattcatctgagtcctattatgcaaatatatagtccctgtaataaggcaggaaacttacacgtgagatgaagaaaaaggataagagggttgagctctctgttccacacatttagagggagcttttcctctataaaatattattccttaccaaattccatccaggatttatttttttgctttttgcttttctgtgatctttcctaacctccaaactttatgtttttattctttttttaaatatttctaatccattttattcttacagctatagagaggtagcttttttcttatcctctgttctaccttctgttctaaaagtctaattccaactacttttacatttataacttttaacctcgtggatattataactgcataaaaatgttaaatattttgtatttgtttcagcttttatactttattttacttgcatctatcttgtctactttaaaactattaaaattactgacattttcataaactctttcctttcctttttggaaaaatgttttaaaaaacataatgacctgcaagaaacatggtaagagtagataatccattcgaaaaatagctagttttttgtctcactttataaaaattcattacaagaaaagactattttttaaaatctatgcctagacactcaggagaagtatatttaaaccagctcccaatcaataagtcttataatgatggtgacatatgatttctttgttggaatgattttctagttgtccttgtgtcaagagtttctaaacagccattggatttcaagaaaatgatccaaaccaaatggcatgaaccatgagggatagaactatagaattaatagagaaagacaattggcctttagcaagttaagttcctccaaatactcttttttagttttattattttccagtcagttttccactcttttatcaagataaaaggaaactttggttatgtagtccccctaattttttgtgcaattcttcccctaatctaaaatcagagatatctcacataagcccagttcaagaccagcctgggcaacatagtgagatttctctacataaaatttaaaaattagctgggtatggtgatgtgcactacggtcccagctactcaggggggctgagggagactgaggctgcagtgagccatgatcatgctgctgtgtttcagcctgggtgacagagtgagaccctgcctcaaaaaaaaaaaaaaaagaaagaaagaaaggaaaaaagcaaacattttaaaaattcttttgaacattcttataatagtttacatgaagtctttgtttactacatccaacacctgagccacctcagagacagtttgtactgactttttctttatatgggccacattttcttctttctttgcatttttcatgaggttttgttgaaaattggacactttaaataatacgttgtagcttttctggattctgacttccccaccctcaggagttgcgttattgctgttttctgtctcttgtttattacttttcaggactaattaaataaattctatcttcctaggagtatgcagccactgaagcctatgttctatttttaattattttcctcatttttaagcctggcttcccaggagtcaccctgggtcagcataccttgatggccacccaataattgggcaggggttttacttaaatatcttgagtcagtagggcttccactttttgctgaggggatctgtacatggattggatcacatattcaagtttcaggcagtttacaagctactttgactttcactttctgtttatgtaaggacttgtgctcagccaggaaccagtagataactggggccatctctgacctctcctgagtgtgtgaaccctttcagatccccatgaatatattaaagctttcaaagcctaatatcattggccagatatatcttttacatttttggctggtttactgtttcccctaacaactattkctgcctctggtagctacgatgctggccttttccaaagactggccaccaatattgtaattgctgactacaatgtcccaggacttttccatggagctcaaaactagatcaaccacctcaagtggcaggaagactgttagccttcactgttaccaagacatggagggtagggaggaaagaaaagacaatggatgcagtcccaaatttaaatgccacagaccctactcttctaaccaatgctcaataattcttgaataaatgctttcaatttattgtatgcctttgcttaatttccagagtttcaaaatagttgttgacaattctgccagttttaccaccacattttggaggtcaggattttccacgtttctctctttgca

SEQ ID NO: 715437 - DNA, 639 bp, Homo sapiens
tagacagtccataagacaaaagaggcattggcctggagattccaggttcagattcaaatactgcctgtgatttttctttctttcttttttttttttttttctgagacagggtctctgttacccaggctggagtrcaatgatgcgatcttggctcaccgcagtgcagcctcgacttcctgggctcaagcgattctcctgcctcagcctcctacatagctgggactacaggcatgtgccactgcacctcgctaattttttgatttttttgtagagacaagatctcactttgttgcccaggctagtctagaactcctgggctaaagtgatcctcctgtctcagcctcccaaagtgttgggattacaggtgtgagccactgcacccagctgatttttcttcctgttcaattacacaccctcttttccctaacaagtgtaaaaagagtgaggggtggagacatggctgcaggcctcaggaagcctgtgggagcaactcaagagcaagaggctgagttcagaccccaggaagggaatcctctccttagtcatttgtcgtgagagccctggtgggtccccacagaggaagccaagggtgtgtgagaggaaaaggaagatacagaaaagacacagcttccaggggat

SEQ ID NO: 715438 - DNA, 639 bp, Homo sapiens
tagacagtccataagacaaaagaggcattggcctggagattccaggttcagattcaaatactgcctgtgatttttctttctttcttttttttttttttttctgagacagggtctctgttacccaggctggagtgcaatgatgcgatcttggctcaccgcagtgcagcctcgacttcctgggctcaagcgattctcctgcctcagcctcctacatagctgggactacaggcatgtgccactgcacctsgctaattttttgatttttttgtagagacaagatctcactttgttgcccaggctagtctagaactcctgggctaaagtgatcctcctgtctcagcctcccaaagtgttgggattacaggtgtgagccactgcacccagctgatttttcttcctgttcaattacacaccctcttttccctaacaagtgtaaaaagagtgaggggtggagacatggctgcaggcctcaggaagcctgtgggagcaactcaagagcaagaggctgagttcagaccccaggaagggaatcctctccttagtcatttgtcgtgagagccctggtgggtccccacagaggaagccaagggtgtgtgagaggaaaaggaagatacagaaaagacacagcttccaggggat

SEQ ID NO: 715439 - DNA, 2931 bp, Homo sapiens
caatcagccccaggaaacaaaaccaaaagctcttcagcaattgacccagaacagataggatttgttcaatgactatagcttcccttatttttgcttctacctcaggaccaaccagaaaaagccagtatgttccccaaaccagttacaggggatgccctgcttctagttagtgcaactgcagcttcttcatgccaaccacctccaatcaaagcatacctgaacccttctcttctgttcactatgatgttttccactcccctgcctacctttgagtttctggctaacacagtgatgatggctgattcccttgccttaggaagctctgataaaataagtgacaaaacaagctctgcctcttctcacataggtgtcttcttttattcccacaatccgtagcaccaagcattataaatatgttcaatctgcccacactgatgggaagaatatcaggataggcagtcatactaagtctagaagcgttctgtgatgaagcctttctctaaaactttcagtacgattaacctagggaccaatcagatcacacatccggtaggatgtctcatgagctaaatgggagcagtggaccaatggaaatggatatgtacaaaagcaaagaataagagatacagagaagagagctgtaaagttactgggaaagtcttaaacatccctgtacttttgctgttatcactgaccttctgatctgcaaggatgaatcaacttatataaagggcctagagtgggacagatgttttagtgttttttaaataaaagaataaaccctcgaacatgaaaagaatatgcatatttgcacttactctcatctggcttttttcctttattctgcaatacaaagcaatttcactttaagttctctgtaatatattttataagacaataccaaggaagcttaatctattttacacatggaagggcaacagaaaagactgatcataatatgaggaataggtgtgcctccaggagcattacacccagccatcagtgcacaccagtacacctctgatacctgaaattaatatcacagcagtgggaaagcttagtcatgcaggctgtgcttcctgctgaaagtaaaaccaacaaactcaacacacacacaggaggttgccttcaaattttaaggacgattattgttatctgccgtaagtatgccataagaatattgcctctctcatttattgcattgaaaaaccttaatatttttcctcatttctagtgtggcatcaaatatcaattgtacctattttggcagtggatcatattaatttagggaatgtgctatggagctggaaacatgaattgaatacctcgttctaatcctcaaataaaggacatgttacttatcaaacctttcgtttcataatctgtatgatgggtatattgacatcaatctcttggggaatattgtgagaataatattagataatatgtgaaaaatatttagtgtgctataagataaataataggattcttattactatatactctatgcatgtgactatacatatatgaccatgtatacatttactatgtatacatgatatatattttaacatttagattaggcttcctcaaattaacagttatgctgtaagatgttcatgaatctcaaaggtacctacataccatatgcaacatatcagatatagtaaattgaactatgaatgtgtatggcaatacattttaaaaccacaataccattaatcaataaggatgtttggcagacaattgggctcactaactaccaaagtaaccactctgcacaccaccttcacagtacggagaaytcacacttctacttcagggaaataaaacctattactgttctcagtgctttttgatgtcactatcgaatactcaaatatgtaattattgggtgattcatgatttactttatatttcacacaaccttgactgctccttccttttcctgaggttctgacagcctgactacaatgtcctcaatgcttcctctcagaactaattcaaatttcacctctgccacaaagacttttctttatttgctctttcctctgtgttatcatggcccctgcttgtccttacgaaggaggataaaacattgatttatgttttgctaattattttctcacctgctagattgtgagttctctgaggacaagagatgatgttttctgtgactttgtagtaataacagcacagtaacagcaagtcactttattcgtttattcagcaagtttgtttgataaaagctcattaaatatctacaacacgacaggtgctatgctagaaacatgggttttgccagcaaataagacatggcccctgcatattttcagttgagccaggaagataagcattggataggtaactgcaggcatgatgaggggtagggaaaatgcagtctgaagctgaagggaaggcaaggttgatgtctttaggtgatgttgggaagcggtgtgccaatcagcaggaatagcacctaggcagaattaatattgttggagccaagttaaaacatccaagcgacatgtgatggtggctcagatcaggattatgtcagaagggatagagaagaagaggcaggttcaaaatatatttaatgagtaaaatgaacggattgttttgttcatttgctgtgggaggttgcaagaggtggaaaggagtcaagaacgaaacttggctttgaatttgagcaactctaccctgaccccaaaattactctttaaggctaggccagatcctggcattcctatgattacagctctccaaaggctctccttgttttgagaaaagagtccagatcttttgcatagaaggaagaccacagtcagaacccagcctcgatgtagaattttggcctttttatttcaccagtgtcaaattctgtgaagttttccaaacttgctacatggcttatgccttctatatctg

SEQ ID NO: 715440 - DNA, 2931 bp, Homo sapiens
caatcagccccaggaaacaaaaccaaaagctcttcagcaattgacccagaacagataggatttgttcaatgactatagcttcccttatttttgcttctacctcaggaccaaccagaaaaagccagtatgttccccaaaccagttacaggggatgccctgcttctagttagtgcaactgcagcttcttcatgccaaccacctccaatcaaagcatacctgaacccttctcttctgttcactatgatgttttccactcccctgcctacctttgagtttctggctaacacagtgatgatggctgattcccttgccttaggaagctctgataaaataagtgacaaaacaagctctgcctcttctcacataggtgtcttcttttattcccacaatccgtagcaccaagcattataaatatgttcaatctgcccacactgatgggaagaatatcaggataggcagtcatactaagtctagaagcgttctgtgatgaagcctttctctaaaactttcagtacgattaacctagggaccaatcagatcacacatccggtaggatgtctcatgagctaaatgggagcagtggaccaatggaaatggatatgtacaaaagcaaagaataagagatacagagaagagagctgtaaagttactgggaaagtcttaaacatccctgtacttttgctgttatcactgaccttctgatctgcaaggatgaatcaacttatataaagggcctagagtgggacagatgttttagtgttttttaaataaaagaataaaccctcgaacatgaaaagaatatgcatatttgcacttactctcatctggcttttttcctttattctgcaatacaaagcaatttcactttaagttctctgtaatatattttataagacaataccaaggaagcttaatctattttacacatggaagggcaacagaaaagactgatcataatatgaggaataggtgtgcctccaggagcattacacccagccatcagtgcacaccagtacacctctgatacctgaaattaatatcacagcagtgggaaagcttagtcatgcaggctgtgcttcctgctgaaagtaaaaccaacaaactcaacacacacacaggaggttgccttcaaattttaaggacgattattgttatctgccgtaagtatgccataagaatattgcctctctcatttattgcattgaaaaaccttaatatttttcctcatttctagtgtggcatcaaatatcaattgtacctattttggcagtggatcatattaatttagggaatgtgctatggagctggaaacatgaattgaatacctcgttctaatcctcaaataaaggacatgttacttatcaaacctttcgtttcataatctgtatgatgggtatattgacatcaatctcttggggaatattgtgagaataatattagataatatgtgaaaaatatttagtgtgctataagataaataataggattcttattactatatactctatgcatgtgactatacatatatgaccatgtatacatttactatgtatacatgatatatattttaacatttagattaggcttcctcaaattaacagttatgctgtaagatgttcatgaatctcaaaggtacctacataccatatgcaacatatcagatatagtaaattgaactatgaatgtgtatggcaatacattttaaaaccacaataccattaatcaataaggatgtttggcagacaattgggctcactaactaccaaagtaaccactctgcacaccaccttcacagtacggagaactcacacttctacttcagggaaataaaacctattactgttctcagtgctttttgatgtcactatcgaatactcaaatatgtaattattgggtgattcatgatttactttatatttcacacaaccttgactsctccttccttttcctgaggttctgacagcctgactacaatgtcctcaatgcttcctctcagaactaattcaaatttcacctctgccacaaagacttttctttatttgctctttcctctgtgttatcatggcccctgcttgtccttacgaaggaggataaaacattgatttatgttttgctaattattttctcacctgctagattgtgagttctctgaggacaagagatgatgttttctgtgactttgtagtaataacagcacagtaacagcaagtcactttattcgtttattcagcaagtttgtttgataaaagctcattaaatatctacaacacgacaggtgctatgctagaaacatgggttttgccagcaaataagacatggcccctgcatattttcagttgagccaggaagataagcattggataggtaactgcaggcatgatgaggggtagggaaaatgcagtctgaagctgaagggaaggcaaggttgatgtctttaggtgatgttgggaagcggtgtgccaatcagcaggaatagcacctaggcagaattaatattgttggagccaagttaaaacatccaagcgacatgtgatggtggctcagatcaggattatgtcagaagggatagagaagaagaggcaggttcaaaatatatttaatgagtaaaatgaacggattgttttgttcatttgctgtgggaggttgcaagaggtggaaaggagtcaagaacgaaacttggctttgaatttgagcaactctaccctgaccccaaaattactctttaaggctaggccagatcctggcattcctatgattacagctctccaaaggctctccttgttttgagaaaagagtccagatcttttgcatagaaggaagaccacagtcagaacccagcctcgatgtagaattttggcctttttatttcaccagtgtcaaattctgtgaagttttccaaacttgctacatggcttatgccttctatatctg

SEQ ID NO: 715441 - DNA, 1004 bp, Homo sapiens
gaaggtgtatgtttatgtaaaatcttgtttctttttgttttctttgcttaatgctttattttacacacctctattaatgtgtaattttaaaagaaaatgtacttttatttctccatagaaataaaacttagtaaaataatattaaaaggtcaacattattgattcctaaaaacaaaatacaatcattaagtgtgttttcctaaatgaaagcaagcatcaagaaaactgatataatatattgatattccaataacaattctggacattagtaaaatattttgaaaacactttcattaaaatgtaaatagtgaaaagattaattagttaggtttttcatcattgctttggtattattgtgtgtgtgtgtgtatgtgtattactgtttgttaaatgccataaatcatctttgatagtaataaaacctctttgtattaagtaagctagcacaataaatttatttacatcattttgaataatatgcaatataaatctaatactgctaaaagtaataataaagtatagatttcactattttccttcatatttctagagaaaaatacaaataactgaaatatttaaaagtataattctagtctgatcattctcttaaaaacctaagtcagccttgttagttattcaatgagccagacaaggttgccatgtctggctgatcagtgaagggcatcaaagaatggaaaacaaaagtaggagctcacagtccattactctgtctagtgcacacttttctttaatgatgttacaaggtaatacaattttatattaaaagataaaatctcatccacatataattagtccttcctctctgataatcaaaactatcatgtgaacacagaaatttatawttctattctgtctattatcaagtaattataatttttattaagacaaagcataatttaatgccaaaaatatttttccctattccaaaaacttttttatggccttaacattacctgaaattgtatgactataatttttaaaag

SEQ ID NO: 715442 - DNA, 591 bp, Homo sapiens
tgatggtgtgatgaattcctgggacgaagcatggcataagaaataaaggaaagcaggaagaaaagaagaaagagaaggagggaggaaggcaggacaggaaagagagagagaggaagaaagggagggaagcaaggaaagaggaaggagtgagagaaaggggaaggaaggaaaagagaaacactgggctagaaatcagaagacccaagttctagaatgtagatctggatcaacaatgaaacacctatataagctacttcacgtttctgtgccatatctgccatatgatagtacagaactagmtaactctgaaagcttcaactaatattcagaaaagtccaacaaatatggacacagccacaccatctttttcttcatcatttaattgatcactcatgtgtgcatttatttattcaccaaatatttatggaacaactactaagaggcaggccttgtactgtttcgtgatgatacaaaagcaaataagatacatcctgtaccctcatgagattcactgcctgggggtgggaatgaagtgagatggcagaaggacaagagggtaaagctgggtagatatgcagggccaaatcctga

SEQ ID NO: 715443 - DNA, 591 bp, Homo sapiens
tgatggtgtgatgaattcctgggacgaagcatggcataagaaataaaggaaagcaggaagaaaagaagaaagagaaggagggaggaaggcaggacaggaaagagagagagaggaagaaagggagggaagcaaggaaagaggaaggagtgagagaaaggggaaggaaggaaaagagaaacactgggctagaaatcagaagacccaagttctagaatgtagatctggatcaacaatgaaacacctatataagctacttcacgtttctgtgccatatctgccatatgatagtacagaactagataactctgaaagcttcaactaatattcagaaaagtccaacaaatatggacacagccacaccatctttttcttcatcatttaattgatcactcatgtgtgcatttatttattcaccaaatatttatggaacaactactaagrggcaggccttgtactgtttcgtgatgatacaaaagcaaataagatacatcctgtaccctcatgagattcactgcctgggggtgggaatgaagtgagatggcagaaggacaagagggtaaagctgggtagatatgcagggccaaatcctga

SEQ ID NO: 715444 - DNA, 591 bp, Homo sapiens
tgatggtgtgatgaattcctgggacgaagcatggcataagaaataaaggaaagcaggaagaaaagaagaaagagaaggagggaggaaggcaggacaggaaagagagagagaggaagaaagggagggaagcaaggaaagaggaaggagtgagagaaaggggaaggaaggaaaagagaaacactgggctagaaatcagaagacccaagttctagaatgtagatctggatcaacaatgaaacacctatataagctacttcacgtttctgtgccatatctgccatatgatagtacagaactagataactctgaaagcttcaactaatattcagaaaagtccaacaaatatggacacagccacaccatctttttcttcatcatttaattgatcactcatgtgtgcatttatttattcaccaaatatttatggaacaactactaagaggcaggccttrtactgtttcgtgatgatacaaaagcaaataagatacatcctgtaccctcatgagattcactgcctgggggtgggaatgaagtgagatggcagaaggacaagagggtaaagctgggtagatatgcagggccaaatcctga

SEQ ID NO: 715445 - DNA, 591 bp, Homo sapiens
tgatggtgtgatgaattcctgggacgaagcatggcataagaaataaaggaaagcaggaagaaaagaagaaagagaaggagggaggaaggcaggacaggaaagagagagagaggaagaaagggagggaagcaaggaaagaggaaggagtgagagaaaggggaaggaaggaaaagagaaacactgggctagaaatcagaagacccaagttctagaatgtagatctggatcaacaatgaaacacctatataagctacttcacgtttctgtgccatatctgccatatgatagtacagaactagataactctgaaagcttcaactaatattcagaaaagtccaacaaatatggacacagccacaccatctttttcttcatcatttaattgatcactcatgtgtgcatttatttattcaccaaatatttatggaacaactactaagaggcaggccttgtactgtttcgtgatgatacaaaagcaaataagatacatcctgtaycctcatgagattcactgcctgggggtgggaatgaagtgagatggcagaaggacaagagggtaaagctgggtagatatgcagggccaaatcctga

SEQ ID NO: 715446 - DNA, 933 bp, Homo sapiens
tgacaacattgtactttgaagcaggaatttgagaaagaacaagcaggagaatctctctacagcaggagacaactccaacagatttgaaatggaaattatctcagccttgttagattttggggagttcagtggggttgatctccattggtccaaggatttttcagtgccaaggcttgcaaggggaatttccaaataagttcttgctttctttgtctcctctccattaccaagaagaagcttcagaggtccatgcagaagatggagtgatatacctgtggcttaagtgggcaaggtcagcccaagctacctgatatctgaaaattacctaaagacatctctgaacctttgagtcaaggggaaacaggtgtaatgtcctattctaatataaagttacaaattaacctggcacaagggactacatcacacgtgcgaatattttctgggtatgtaaatatgakgggaaaaaagataaagaaatactagcccatagcataaatgcctgaatcttcagtcagctttttaccagtatatttacaatcttcatccccactgctccacaaggccactcaacatttcataaaataggatccctactcattcgactctggttctcttcttatttccaacaatttgtctataattaagccaaactcatctataagtctctccaaattactcaagttagaattattcttttgtaactccacaacctggtggaatcacacctctaatacaagttagactgtgataattaccctaatagagtcacttgtatcattccagtaattatgaatctcatgcaccagtcctaacatcatcaaacaaaatacactccataaaagtgtgctaatttagctgaattgaatgtgaaaacttactgtttttctcagttgcattactcaagggcacttggagtccagaaaagttgtagtc

SEQ ID NO: 715447 - DNA, 933 bp, Homo sapiens
tgacaacattgtactttgaagcaggaatttgagaaagaacaagcaggagaatctctctacagcaggagacaactccaacagatttgaaatggaaattatctcagccttgttagattttggggagttcagtggggttgatctccattggtccaaggatttttcagtgccaaggcttgcaaggggaatttccaaataagttcttgctttctttgtctcctctccattaccaagaagaagcttcagaggtccatgcagaagatggagtgatatacctgtggcttaagtgggcaaggtcagcccaagctacctgatatctgaaaattacctaaagacatctctgaacctttgagtcaaggggaaacaggtgtaatgtcctattctaatataaagttacaaattaacctggcacaagggactacatcacacgtgcgaatattttctgggtatgtaaatatgaggggaaaaaagataaagaaatactagcccatagcataaatgcctgaatcttcagtcagctttttaccagtatatttacaatcttcatccccactgctccacaaggccactcaacatttcataaaataggatccctactcattcgactctggttctcttcttatttccaacaatttgtctataattaagccaaactcatctataagtctctccaaattactcaagttagaattattcttttgtractccacaacctggtggaatcacacctctaatacaagttagactgtgataattaccctaatagagtcacttgtatcattccagtaattatgaatctcatgcaccagtcctaacatcatcaaacaaaatacactccataaaagtgtgctaatttagctgaattgaatgtgaaaacttactgtttttctcagttgcattactcaagggcacttggagtccagaaaagttgtagtc

SEQ ID NO: 715448 - DNA, 1014 bp, Homo sapiens
tgttaggttgtgtagtagagccagctcgattttacagcacagaggaagaaaaatacaacttactttcagatttgggccctaaactagattcccaatgaaaaataagtgaaagataacaacgtaaacaacaatgactaaattatgacacgtcctttaatgtcctttaaaacggttatgtattttcaaatcaacaacagtcactcactgcaaaattagtcatgagaaaaatctctgctctatcgccatcatacactattgtgccatttcaatgattaagggcacgcatcttaattttttctctagtctaaaaggaatgtgccatctgtatatatccgccaaataaaatatgaaaggaatactttcccctccaaaattttagaggttgtcttccaacaaataatcaaaaagggagtaacctcttacactctcagacccctgcagtttatttttatggttttttaaaattaattccagttccaagaaaaaattttgcaggatttttaagttaaaaaagataagatgcctgtgtctctttttttccatggaagttgaggctacttttgccccactagccaaaaccaagaggcattaaaggcttcaatagcccttttaaaacagtagagacagctttagttccacaaccacaccatccacttgtttttactttttttttaatgtttattttattttattatttatttatttatttatttatttattttttgaggcagtgtcttgctgtatcgcccaggctggagtgcagtggcatgatctcggctcactgtgacctccgcttcctgggttcaagcaattctcctgcctcagcctcccaaatagctgggattacaggcacgccccacaatgcccagctaatttttgtatttttagtagaggtggggtttctccatgttgtccaggctgatgtcgaactcctgacttcaggtgatccayccaactctgcctcccaaagttttgggattacaggcatgagccactgtgcccggcctctgcttg

SEQ ID NO: 715449 - DNA, 1229 bp, Homo sapiens
gttttacaatttaaaaacatgacttgtagccctagcttttcaaccttttattactcttcgtaatggaatgttcatagctcccccatctgagtggtttctcatcacagataataattgctatttttctcttgccaactgcataaataatggaatcttttctcctatttacagagttcaagagcagagaagggcccagacatgttagggagaattccaggaggtacaagttgagagaggaagtaggtagaggctggcagcaaataccatccttctctcacccccttcctcctccagaacatgtgccttcaggggaaaccaagttacagtttatatcaaaggaatactctcaacagagagaatacccaagtgcatgatcatattcgtatactcctatttgtcttagatataattgcatgtgtgctcaagtgaatacaaagattcaaagtaccagtgatgctattatcaagacaactccattctgagttgcattaattaaaccagggccacaaacataacaaaaaaatgaaaagccaaagccaattaaaagccactcctatcctgccttaagggactatgtccctgtgttgttctactctgaaaaatacagccttctccttctcaggtatctgaggtttcagtaatctctaggctgaattagtttgactgcatctgaatgcctaaaaaaatagaaattagctatatttttaaaggagtctccattcatctgttgacctccagaaaacacttggagttagcaccttctttattagtaacattacatttgaaattgttttgaaataaaaaacatctcttccgttctcctgtttcacccttatcgtcatccccaagacatattcctcctatactgctcatgttctgtcagactccaagtcatattgcctttacttcttttttttttctgtctcaacttttattttaggtttaggggttacatgtgcaggtttgttacatgcagattgcgtgtcaatgagatttggtgtatgaataatcctgtcacccaagtagtgagcatagtagccaagaggtagtttttcaacccacgcccttctcctactcttccacctcaagtagtccccastatctattgttctcatctttgtgtccatgcgtattcattgtgcaccttctgtttataagtgagaacatgagggatttggtttttccttcctgtgttaatttacttaggataatggcctccagctgcatcc

SEQ ID NO: 715450 - DNA, 1229 bp, Homo sapiens
gttttacaatttaaaaacatgacttgtagccctagcttttcaaccttttattactcttcgtaatggaatgttcatagctcccccatctgagtggtttctcatcacagataataattgctatttttctcttgccaactgcataaataatggaatcttttctcctatttacagagttcaagagcagagaagggcccagacatgttagggagaattccaggaggtacaagttgagagaggaagtaggtagaggctggcagcaaataccatccttctctcacccccttcctcctccagaacatgtgccttcaggggaaaccaagttacagtttatatcaaaggaatactctcaacagagagaatacccaagtgcatgatcatattcgtatactcctatttgtcttagatataattgcatgtgtgctcaagtgaatacaaagattcaaagtaccagtgatgctattatcaagacaactccattctgagttgcattaattaaaccagggccacaaacataacaaaaaaatgaaaagccaaagccaattaaaagccactcctatcctgccttaagggactatgtccctgtgttgttctactctgaaaaatacagccttctccttctcaggtatctgaggtttcagtaatctctaggctgaattagtttgactgcatctgaatgcctaaaaaaatagaaattagctatatttttaaaggagtctccattcatctgttgacctccagaaaacacttggagttagcaccttctttattagtaacattacatttgaaattgttttgaaataaaaaacatctcttccgttctcctgtttcacccttatcgtcatccccaagacatattcctcctatactgctcatgttctgtcagactccaagtcatattgcctttacttcttttttttttctgtctcaacttttattttaggtttaggggttacatgtgcaggtttgttacatgcagattgcgtgtcaatgagatttggtgtatgaataatcctgtcacccaagtagtgagcatagtagccaagaggtagtttttcaacccacgcccttctcctactcttccacctcaagtagtccccagtatctattgttctcatctttgtgtccatgcgtattcattgtgcaccttctgtttataagtgagaacatgwgggatttggtttttccttcctgtgttaatttacttaggataatggcctccagctgcatcc

SEQ ID NO: 715451 - DNA, 1229 bp, Homo sapiens
gttttacaatttaaaaacatgacttgtagccctagcttttcaaccttttattactcttcgtaatggaatgttcatagctcccccatctgagtggtttctcatcacagataataattgctatttttctcttgccaactgcataaataatggaatcttttctcctatttacagagttcaagagcagagaagggcccagacatgttagggagaattccaggaggtacaagttgagagaggaagtaggtagaggctggcagcaaataccatccttctctcacccccttcctcctccagaacatgtgccttcaggggaaaccaagttacagtttatatcaaaggaatactctcaacagagagaatacccaagtgcatgatcatattcgtatactcctatttgtcttagatataattgcatgtgtgctcaagtgaatacaaagattcaaagtaccagtgatgctattatcaagacaactccattctgagttgcattaattaaaccagggccacaaacataacaaaaaaatgaaaagccaaagccaattaaaagccactcctatcctgccttaagggactatgtccctgtgttgttctactctgaaaaatacagccttctccttctcaggtatctgaggtttcagtaatctctaggctgaattagtttgactgcatctgaatgcctaaaaaaatagaaattagctatatttttaaaggagtctccattcatctgttgacctccagaaaacacttggagttagcaccttctttattagtaacattacatttgaaattgttttgaaataaaaaacatctcttccgttctcctgtttcacccttatcgtcatccccaagacatattcctcctatactgctcatgttctgtcagactccaagtcatattgcctttacttcttttttttttctgtctcaacttttattttaggtttaggggttacatgtgcaggtttgttacatgcagattgcgtgtcaatgagatttggtgtatgaataatcctgtcacccaagtagtgagcatagtagccaagaggtagtttttcaacccacgcccttctcctactcttccacctcaagtagtccccagtatctattgttctcatctttgtgtccatgcgtattcattgtgcaccttctgtttataagtgagaacatgagggatttggtttttccttcctgtgttaatttasttaggataatggcctccagctgcatcc

SEQ ID NO: 715452 - DNA, 1810 bp, Homo sapiens
aaaaaaaaaattagacaaaaacaaagaaaatgtaagtaaaatatggactttagttaatagcaatgcactaatgtttgttccttagtttcaacaaatgaaccttactaaggtaagctattaacaataggagaaactacatgcaagatgtacagaaactctctgtaacatttttgaatttctctttgaatctaaacgttttaaacataaaaagctttattaaaaagaaaaaagtggcagagctaagcctgtctaattcccaaacccaactctatgttatgaactgaatgtttgtattccctcaaaatttatacattgaagccctaaccccsagggtgacttggatataggatttttaggaggtaattaaggttaaatgacgtcataataatggagtcccaacctgataggattggtggcctcataagaagagaaaaagcgagatctccctatctctcttcatgtgaacatgatgaaaaaaggccatgtgagctcacagtgagaaggtggccatctgcaagccaggaaaagagacctcactaggactgaatcaccggatctcatacttcctagcttctagaactgtgagaagataaatttttgttgtttatgccacccagtctatggcatttcgttatgatagcttgagccttactgcctttagaccttgattctaggagttactttgaaagttggaccaatcacttgactatgcagacatctatttcctctcattaagatgagaataataatactgcctgcctatctcagcagctactttaaattcaaatcgttaatatatgggaaagtattgtacaaatgtagataattaattcttattaaattaaacggatactagtttttcttatctcccaaaagcctaaacatagtaaatttagagagtaatgctggttttattttctaaggtttaaacttgtttgcatttgtggattatactccttggatctcaaaactaactagttatgtggaccattattaggtggtaatgctggggacaaaattattaaaagtatcttacagagattcatagggacaataataagaactttcaatataccttaaagacaaaggacagtaacttcagaatattttgtaagcatgatatcatattttctgctaagtcatttctgaagagtttacattagttttagcgttttaaaaatactgtatttatggacagatggcaggtatatattatagggctaaagaaatatttccgaaaaaattacactatgagaaatataaaagcaatttaaatgtatcattaaaggaagacatgtagttatctctgaaaaaatcttaaattccaaggattgttagactaaagatataactgaattgtttgggggaatcataaggaccattaaattattttgaggttaataacatgtatattgatgtcaccttaaaacaaaggaaggatgagaaacgaagatgatacaagaggtagatttcaccttttttttaactcctttaacatatcattctgcatctatgaaagattttttgaagaattattttaagctcatcctccctctcttctccagctttgctgcttctcatttcttactctttcctgtcaccatttctccttaccaagaagttgggggaaggagggaaaatgaccacgtaaagctgtgttagtttgttgtaaactcattaagcattcattatttggctgggtgcggtggctcacacctgtaatctcagcactttgggaggccgagctgggtggatcacctgaggtcgagagttcaagaacagcatggccaacatggggagaccccgtatc

SEQ ID NO: 715453 - DNA, 663 bp, Homo sapiens
ctgagctgcagtggaaagctctaacctatctctgtcagccccttccctacctcaccctccttcccaaaggcaaaaatgcagcagcctcaagaccctgatatattttgtcttggctttatttctctctctccaagaggcattgcaaaatattttctttgagtctgccacatttctccccattactttgcttttctcttcttaactccaatttttaattttaatggcaaaaaagattaaaggaagtagtgcaatatgtgcaaaagggtaaatttggaactcagttaagaaaatctgcttgaatggggcaattttaaaagagtatgatgaaacatgataatttctctgatttaaataacattgtttgaggctgcatgaggtacttgaggacaataaaccatgtgtcagtaatttttattttaattaagaataaagccctctaaaccaaaaataaaattctaagctccccaaccaacccaattgacccttcctcttggccaaggggattccaaagttaactggaaaaactagttcaggccatgatgggaaatggaggtcagatatgcctcattaatcctcctccctttggaattcagkcatagacgatcatcattaactttaaaatggagaccttaagactgacaaaacagactcattaagtctgat

SEQ ID NO: 715454 - DNA, 624 bp, Homo sapiens
atccctatgaggagagaggaacagaagccaagcacagagcctcagtgactgtctatagctgagggacaagcagagaagaactaggacaatttgggtaatagctcaaggagagaaatgcttaggaaagagaactggtcaaaagtatcagttgttgcaaagtaatggggaaaaaaaatcctatagttttaagctactgtaaaatcacaaaaatactatttgtctatccttttttttccaataaggtgtggaagttggctctacagtcagtaaacatttgtaccaaagaaaaaaactgaacttcttcccaaaattggtagtaagccagmagggaggaaagaagtgtaatagaaagaaagagagggaatgggtctatactacccaagctaagcataaatcatgtcagcaaaagtgggagtggctgggcaggcctggcagctgcagtcatcaggaatctccagttgctcagtggccaccaggcagctacccagaggagcttctctggagcacctttggaacagcgccaagagcaggttagtgaaaactctgggagagcatctgacttacactaatgttccctaatttaagataaatcagaagggaactcagatcaatacaatctgattt

SEQ ID NO: 715455 - DNA, 624 bp, Homo sapiens
atccctatgaggagagaggaacagaagccaagcacagagcctcagtgactgtctatagctgagggacaagcagagaagaactaggacaatttgggtaatagctcaaggagagaaatgcttaggaaagagaactggtcaaaagtatcagttgttgcaaagtaatggggaaaaaaaatcctatagttttaagctactgtaaaatcacaaaaatactatttgtctatccttttttttccaataaggtgtggaagttggctctacagtcagtaaacatttgtaccaaagaaaaaaactgaacttcttcccaaaattggtagtaagccagcagggaggaaagaagtgtaatagaaagaaagagagggaatgggtctatactacccaagctaagcataaatcatgtcagcaaaagtgggagtggctgggcaggcctggcagctgcagtcatcaggaatctccagttgctcagtggccaccaggcagctacccagaggagcttctctggagcacctttggaacagcgccaagarcaggttagtgaaaactctgggagagcatctgacttacactaatgttccctaatttaagataaatcagaagggaactcagatcaatacaatctgattt

SEQ ID NO: 715456 - DNA, 647 bp, Homo sapiens
ttgagaggaagctgagtgagcaactgctcctttgaatatcttctaaaattacacattttttttttcaattttaggggaatatgatgttgaaatgatttctgtttttaaagaaaagataaaaagaagttatgggaggcattgtgaaactaaagctatgagacaaagagagaagacaataaaataacatttgtttttgatacatatggtctccctctccactgctggcctatttctctttatagttagaccttgactattgatggggtgtccatcctagatcaaaatcttgagtatasagctccagttttcagctttgattactgagtcctgagtttgctaaaggctatgtatttttactaacagagcaaccaaatgttagtatacaaaattaaagtaagacagcacttcaaaataaactataaacatgactttaagtaggtcacttcaaggctattgctaggggagaaaaaggcttctaatttcttgctattgtcaatgctgcacagcctaatacctcacagtgtgaagagtaaattagaacaacttttcactgacaaagattaaactttttcatcattcctaaattcctggggatttctcccactgcttctacatgttttaagcttttcaattaaatctcctgggta

SEQ ID NO: 715457 - DNA, 647 bp, Homo sapiens
ttgagaggaagctgagtgagcaactgctcctttgaatatcttctaaaattacacattttttttttcaattttaggggaatatgatgttgaaatgatttctgtttttaaagaaaagataaaaagaagttatgggaggcattgtgaaactaaagctatgagacaaagagagaagacaataaaataacatttgtttttgatacatatggtctccctctccactgctggcctatttctctttatagttagaccttgactattgatggggtgtccatcctagatcaaaatcttgagtatacagctccagttttcagctttgattactgagtcctgagtttgctaaaggctatgtatttttactaacagagcaaccaaatgttagtatacaaaattaaagtaagacagcacttcaaaataaactataaacatgactttaagtaggtcacttcaaggctattgctaggggagaaaaaggcttctaatttcttgctattgtcaatgctgcacagcctaatacctcacagtgtgaagagtaaattagaacaacttttcactgacraagattaaactttttcatcattcctaaattcctggggatttctcccactgcttctacatgttttaagcttttcaattaaatctcctgggta

SEQ ID NO: 715458 - DNA, 626 bp, Homo sapiens
tctgagaaatacagtattttacttgggatcagtaccaccccagatttaaccagcctgtattacatacatatttgtgtgtgtgtgtgtgatgtgtatctgtgtgtgtatatatatgtgtatgtatgtgtatgtatatgtgtgtgtatatatacatatatatatatatatatttatttatttatttatttttttagagacagggtctcagtatgttgccaaggctggtctcgaactcctgggcttcagtgatcttcccacttcagtctcccaaagtactgggattacaggcatgagccaccgtgcctggccagcctgcattactaaggagaaagggaataatggataatggctgtcttggtcagctctgctgccctaacaaaattccacagactaggttgcttaaacagcatgtatttatttctcacagctctggaggctgggaagttcaagataaagtgccaagcaattcgattcttggtgaggcctgttttcctggcttgaaaatggtagcatcttcactgtgtyctcacatcctcacatggtggagagacagcaagctctagtctctattcctcttctagtaagtacactaatctcatcatggggggacccccaccctcatgaac

SEQ ID NO: 715459 - DNA, 2100 bp, Homo sapiens
taaaagcacatacatgtatagtaacttacgatactaacataaaaatactaaattggttacgcttaaaatgaaaagcactgaattcatcgtatcacatttaagtaatgctataattgacagaatagggtataatttcagaaagtaagtttatttcctaacactaacttttgaatagcacctctgtaagtatgcattaagtacttaataagtgctgcagggaacatcaaaaagtgattttcaaacgcaatatgtgtatgttctccaacttgtaaaaaaaactctgaaaatatataaagttacagttgttcatgcttaattaaattagctttgattattgcaaattactcctccaagggcaagtatgtatcaaacctttcaaaaatcttaggtttatatcagcaattatccttactagaaaggtcctgatctgaactcacctaaagctatgtgttaactacatttcaccactaagacacttgagccccgggataataatggccacggattccccgaattgcttcgagaactgctgcttgcttaataaagcgctgaactgtgaattcacctttctaaacagactaaaagcaagacgccaagtttcactatctagtttgggatttcactgggaatgaccacgttatcaagatgccatagccctcctgaggcttttaattacaataccttctctgttttccattcaaccacctcaatcaaatttccactagaaccaggcacacaaacagttgattcgtggctttgcgcaaagcctcctctggatgcaaaccctgggatcctgcatacattagtcctctcagggagggcaaaaggggaaaaaaagtttgttaaacaatgccgctggacaatgtggtgacattaccttgcccgtcttgtgatcaaaccagacgagagcgtggttccttgatagcactttgcaatcaaaagtggcattattctgcgctggtcgacagcgggccactgagcggccgattttgatgggctcgtccaggtagacatgacgctcctgaaacgggtgcgagttcgggcggcaagtgaagatggccaaggctgacggcatcgaggatagactgggggtgtctctcctaccagggacaaagasgagttcctccggatccggactgcccttcacaagcctatgcccctatcccacccaaaattttaaattaacacaaactgcacattgtctaagcataaccagtgaacatcaactcttcacttgggtgggaagacaagccagcgcaagccccatcacctcctttaaaacgctgcaacgccgtgatcacaaaaagtccccaactggcagctttcagtccatcttcttctctgggaagaaaaggctcaaacatcgggcagcttcggccaagaaaactcctggaacacagtttggggactggaggtatccaagcagatgagtcacacgccaattcttgtgtttggtttgagatcgcggccgcttttcccccttggtggcggaaacgttgcagcactgcagcatgaatgaagggtcggttcggcgcggccaggaaagtccttttgggccgaaggaaggtgtggctgggcacctctgggcagccaccgccagtcctcgcccggagtgaaggggcgagaggtgacggagacggaggggctctagacggccggcgggacagtctgcatcgcccctgctgagcggaggccgccccgggaagggggacgcggtccccggcctggaacgatccgagacggcggtggctgaggttctccgcgcgaggcgtggaggccggcggggcgcgggcagtggccaagtcgggactcctgggcacctggcgagcgtccccgcgaccagggcggggacccggctccgcaggccggtgcggaccgagcgaggcgcgacaccgggaggctcgagttcccaggcggcaggaagttggtccccggacgcctaggcttctgggccgccgctcagcacatgggccgcctcccctcagggtcgcccccgcgagggtcgcatctcagggacggcagccgcagctcccggcggacgagaaggtgggggagggagactggcccggaggttggggagaggccttgaggccccgggct

SEQ ID NO: 715460 - DNA, 606 bp, Homo sapiens
gtagtgaaatgatgagaggttttggagccaaacagcatgtaggtccacacgatgatgggactcttcctgcaaagtgggatgactgggacttcacttctctgagccttagtttcttcacatgtaaaatgatggtaacaattttacttcacagagttgaggattaaatgagaaaatacataatcaagcactggcaggaggcaggctatgcttcaggtatagcacttggtgctgggaataaaggagtgaagggatgaaaatgagtcactgtcttcactgagatttcaatctagaagggaaggcaggaattaaagaactacctaacttcaattgtgatgaatgctatcacgaagcctacggtaccataaaaagagacctgacctcatttagggtgtcaaggaatgtggctttgaggaagtgatgcaaaagctggggagtctgggttaggggagagcatgtcatctttcagttgaggcattctaggctcatggaaggtgctcaataaatgggagctgctattrttactatttattcagtaaacatttattgagtgcctactaagtatactgtgctaccatgcatactgagggtataataaatgtgtgaagt

SEQ ID NO: 715461 - DNA, 3005 bp, Homo sapiens
tgcgccaccacacccacctaatttttgtatttttagtagagacaggcttttgccatgttggccaggctggtctcaaactcctgaactcaggtgatccgcctgcctcggcctcccaaartgctgggattacaggtgtgagccaccatgcccggcccagacacatagtttcaatacaagaagtatatgtcagccagagaagggctatcttgagagtcaaggaaggctccctggagggaggtatcacttatgccagttggtacatgaatgagtaaatgcaaacaagccatgatactgaaataaagctttgtttaattaaccttcacatgtaaattcagccacagcaagacattctgatacatgggggcattgccagtgattccacgaaactggataatgtcattgatgcttgtggttgagagagcttgtttctgtattgtaaggaaggtggtacaacctggcctttcttttaaaaaaaaaaaaaaattcaaactggacatgtgtcaatgaactgactggagtcttagggaggaacattgctccatagctatatgtctctcccgttttttcctgtgttagtctttttttttaatttttttaaaatttttttgagacagagtcttgctctgttgcccaggctggagtgcagtggtgtgatcttggctcgctgcaagctccgcctcccgggttcaagcaattctcctgcctcagcttcccaaatagctgggactacagatgcatgccaccatgcctggctaatttttgtatttttagtagagacagaatttcaccatgttggctacactggtttggacctcctgacctgaggggttccacctgcctcggcctctcaaagtgctgagattacaggagtgagccaccttgtctagctctttttttttttttcttttgagacaagttcttgctctgtctcccaggctggaacgcagtggtgcaatcacagctccctgcagcctcgacctccccagctcaagtgatcttcccacctcagcctccccagtagctggggccacaggcatgcaccactacgcccagctaattttttttattttttgtagagatggtgtctcaccatgttgcacaggctggtatccaactgctgggctcaagcaatcttcctgccatggcctcccaaagtgctaggattacaggcgtgagccactgtgcccacgtgttagtctttacataactgaatagtgactgaagtcttgcagtttctaccttgccctgcactggcattataagttgtagtagaaatgtcactcattgcttgtaatctcatgagaggcctagttagatttttctgtactctacttccagaggagcttataggaaggtgactttccataaaggatgtgagctttctaccacccaaatatcagtcgtaaagaaaatgaggagtgataaagaaagaaggtattgagaggtgaagccagctgggcttctaggttgggtggggacttggaaaacttttctgtctagctagaggattaaaaacgcaccaatcagcactctttgtctagctaaagtattgtaaatgcaccaatcagcacactgtaaaaacgcaccaatcagcactctgtgtctagctaaaggactgtaaacgcaccagtcagcactctgtaaaatggactaatcagcaggatgtgggtggggccaaataaggcaataaaagctggccagcgaagccagcagcaggcaacccactcgggtgcccttccatgctgtggaagctttgttctttcgctcttcacagtaaatcttgctgctgctcactctgggtccgcactaccttcatgagctgtaacactcaatgcgagggtctgcggctgcattcctgaagtcagcaagaccacaaacccaccgggaggaacaaacaactccagatgagccacctttaagagctgtaacactcactgcgaaggtgtgcggcttcactcctgaagtcagtgagaccacgaacccactggaaggaagaaactccggacacatctgaacatctgaaggaacaaactccggacacaccatctttaagagctgtaacgctcaccgtgaaggtccgtggtttcattcttgaagtcagcgagaccaagcatccaccaaaaggaataaattccagacgcagtatttacagcccagtgtccacccattccccatgtagcaacccctggtacctgaggaaaaaggtcacagcctctgccaatggtggggcatctttccgaagaggttccacttggactttttgaaacatcatgtggctgtgctgtttgagaagcctggggtgaaattaactatacaagaatcagggcatgatcacacacgcacacacctttgcaatttttctggctttgtttacactgttactgcaacttgtgccctttctcacccttttcataggtcttccctgcaaagtctttttttttttttttttttgagacggagtctcgctctgtcgttcaggctggagtgcagtggcgtgatctcggctcactgcaacctccgcctcctgggttcacgccattctcccgcctcagcctcccgagtagctgggactacaggcacctgctacctggcgcagctaatttgtgtatttttaatagagacgggtttcaccgtgttaacgaggatggtctccatctcttgacctcatgatctgcccgcctcagcctcccaaagtgttaggattacaggcctgagccaccgcacccgacccatcaactgttctcttatctgtgctcctagatctctatcttgatgtctgaaagcttcttgagagtgctttgtcaggtctatgtccatcacattctttggtggatgtggcctcacaaatctttcaactcagccctctaggtcctcatgtgcattagtggagaatagcgttcacatatgtgggctttgggtccaatgcagtttgaatactgagtatgtcactaactagttgtgtaatttttggaacattgttaacctttctgatttcagtttcctta

SEQ ID NO: 715462 - DNA, 3005 bp, Homo sapiens
tgcgccaccacacccacctaatttttgtatttttagtagagacaggcttttgccatgttggccaggctggtctcaaactcctgaactcaggtgatccgcctgcctcggcctcccaaagtgctgggattacaggtgtgagccaccatgcccggcccagacacatagtttcaatacaagaagtatatgtcagccagagaagggctatcttgagagtcaaggaaggctccctggagggaggtatcacttatgccagttggtacatgaatgagtaaatgcaaacaagccatgatactgaaataaagctttgtttaattaaccttcacatgtaaattcagccacagcaagacattctgatacatgggggcattgccagtgattccacgaaactggataatgtcattgatgcttgtggttgagagagcttgtttctgtattgtaaggaaggtggtacaacctggcctttcttttaaaaaaaaaaaaaaattcaaactggacatgtgtcaatgaactgactggagtcttagggaggaacattgctccatagctatatgtctctcccgttttttcctgtgttagtctttttttttaatttttttaaaatttttttgagacagagtcttgctctgttgcccaggctggagtgcagtggtgtgatcttggctcgctgcaagctccgcctcccgggttcaagcaattctcctgcctcagcttcccaaatagctgggactacagatgcatgccaccatgcctggctaatttttgtatttttagtagagacagaatttcaccatgttggctacactggtttggacctcctgacctgaggggttccacctgcctcggcctctcaaagtgctgagattacaggagtgagccaccttgtctagctctttttttttttttyttttgagacaagttcttgctctgtctcccaggctggaacgcagtggtgcaatcacagctccctgcagcctcgacctccccagctcaagtgatcttcccacctcagcctccccagtagctggggccacaggcatgcaccactacgcccagctaattttttttattttttgtagagatggtgtctcaccatgttgcacaggctggtatccaactgctgggctcaagcaatcttcctgccatggcctcccaaagtgctaggattacaggcgtgagccactgtgcccacgtgttagtctttacataactgaatagtgactgaagtcttgcagtttctaccttgccctgcactggcattataagttgtagtagaaatgtcactcattgcttgtaatctcatgagaggcctagttagatttttctgtactctacttccagaggagcttataggaaggtgactttccataaaggatgtgagctttctaccacccaaatatcagtcgtaaagaaaatgaggagtgataaagaaagaaggtattgagaggtgaagccagctgggcttctaggttgggtggggacttggaaaacttttctgtctagctagaggattaaaaacgcaccaatcagcactctttgtctagctaaagtattgtaaatgcaccaatcagcacactgtaaaaacgcaccaatcagcactctgtgtctagctaaaggactgtaaacgcaccagtcagcactctgtaaaatggactaatcagcaggatgtgggtggggccaaataaggcaataaaagctggccagcgaagccagcagcaggcaacccactcgggtgcccttccatgctgtggaagctttgttctttcgctcttcacagtaaatcttgctgctgctcactctgggtccgcactaccttcatgagctgtaacactcaatgcgagggtctgcggctgcattcctgaagtcagcaagaccacaaacccaccgggaggaacaaacaactccagatgagccacctttaagagctgtaacactcactgcgaaggtgtgcggcttcactcctgaagtcagtgagaccacgaacccactggaaggaagaaactccggacacatctgaacatctgaaggaacaaactccggacacaccatctttaagagctgtaacgctcaccgtgaaggtccgtggtttcattcttgaagtcagcgagaccaagcatccaccaaaaggaataaattccagacgcagtatttacagcccagtgtccacccattccccatgtagcaacccctggtacctgaggaaaaaggtcacagcctctgccaatggtggggcatctttccgaagaggttccacttggactttttgaaacatcatgtggctgtgctgtttgagaagcctggggtgaaattaactatacaagaatcagggcatgatcacacacgcacacacctttgcaatttttctggctttgtttacactgttactgcaacttgtgccctttctcacccttttcataggtcttccctgcaaagtctttttttttttttttttttgagacggagtctcgctctgtcgttcaggctggagtgcagtggcgtgatctcggctcactgcaacctccgcctcctgggttcacgccattctcccgcctcagcctcccgagtagctgggactacaggcacctgctacctggcgcagctaatttgtgtatttttaatagagacgggtttcaccgtgttaacgaggatggtctccatctcttgacctcatgatctgcccgcctcagcctcccaaagtgttaggattacaggcctgagccaccgcacccgacccatcaactgttctcttatctgtgctcctagatctctatcttgatgtctgaaagcttcttgagagtgctttgtcaggtctatgtccatcacattctttggtggatgtggcctcacaaatctttcaactcagccctctaggtcctcatgtgcattagtggagaatagcgttcacatatgtgggctttgggtccaatgcagtttgaatactgagtatgtcactaactagttgtgtaatttttggaacattgttaacctttctgatttcagtttcctta

SEQ ID NO: 715463 - DNA, 1649 bp, Homo sapiens
ttttttaaatggtgaaaaattttaaacactgtgaggggccaataaaagagattattttcattgtgagggacattttagcatgagtcaaatcacatgacagtcaattttgttctttgattaatgtacaggtacaatgaatttaagttatgggagaacttctctttttcctttgacttattctctcaatttttgcactctcatttttgtttttttgtttttttgtttttttttttttgtaaagagtttctagtaaggactatgtgttaatcagttttaagaacacagattttatcaaagaaaattatctctgtaaaatatttgcactaatggaaaaatatgtgaaccacccagtcttattttattggaccccaagttagtttgtgtttgtgtgtatgtgtgggtatttatctgatatcaaccattatcttttaacatcagcatgaaacaacatgctggtctgaaacataaaaatatatatcactcttaccaaagccagtctgtattttaattgctttttcctgaaagtggaatcatgtaaaacttaaaaacagattgaaatgaaagggaaaaatttgattctgtaattaacttaccatgtgaccttcaccacactgatggtccttacagatctaaatttctatatctgtaaaataaagaaggttgattttacatgatttcaaaaaatatatcatttttttgacagtcatagaagttttatataattctctattctagtctactgcaaaggaatagcagcaggtgaaaactataatgtttgaccctgaagattattatgtgatatgtgtaagggtcttaatgtgtacaattccatttttaggggctcaagagataaaatttcttttccaaaatggataaatacaaaatcatttttgcaataaaaatgtattgtgagggaatcttttgaatcaatgtgattacttattgtggaagatacaggccatatcgcatagcgtcttgcctcaaggatcttatcacttagtgagtgaaataaaacaattacacagataactgccagtaggcagcactaaatgtcttaagtgatggatagacagagaggtaagaagggtccaatcaaatgctgaaatgttaataaaacccagatcacaggcggtgatgatcaaatgaattgaacaggcttaggagaaatccgtgaaagaaagaaatctgtatccctgggatctttccatttttgagaatatattacatttgaatctcttagggatgtgtgattccccttccctttaaaatagttacagtataactttcattaaaatcttkgattttgtcagtcatagcagacaatagcattttatgtcctgtgaagaattgtatgcataattttggaaacaagacaaaggaaagaggctctctaagctgttagaaacaaaggatttttaaaatctttcttctctcatacctccattaaggttgtcttttctcctttaaagctataagaaatatactgaatactaatgtgacagaaccagatgcaatccccaaatatcatatttacttaatataaattcatagtccttacctttaaggagatttgacaattcactttgtcttttagccttggggtagtcaggaaagttaggcacaatgttttaatgctcattccttctctt

SEQ ID NO: 715464 - DNA, 1649 bp, Homo sapiens
ttttttaaatggtgaaaaattttaaacactgtgaggggccaataaaagagattattttcattgtgagggacattttagcatgagtcaaatcacatgacagtcaattttgttctttgattaatgtacaggtacaatgaatttaagttatgggagaacttctctttttcctttgacttattctctcaatttttgcactctcatttttgtttttttgtttttttgtttttttttttttgtaaagagtttctagtaaggactatgtgttaatcagttttaagaacacagattttatcaaagaaaattatctctgtaaaatatttgcactaatggaaaaatatgtgaaccacccagtcttattttattggaccccaagttagtttgtgtttgtgtgtatgtgtgggtatttatctgatatcaaccattatcttttaacatcagcatgaaacaacatgctggtctgaaacataaaaatatatatcactcttaccaaagccagtctgtattttaattgctttttcctgaaagtggaatcatgtaaaacttaaaaacagattgaaatgaaagggaaaaatttgattctgtaattaacttaccatgtgaccttcaccacactgatggtccttacagatctaaatttctatatctgtaaaataaagaaggttgattttacatgatttcaaaaaatatatcatttttttgacagtcatagaagttttatataattctctattctagtctactgcaaaggaatagcagcaggtgaaaactataatgtttgaccctgaagattattatgtgatatgtgtaagggtcttaatgtgtacaattccatttttaggggctcaagagataaaatttcttttccaaaatggataaatacaaaatcatttttgcaataaaaatgtattgtgagggaatcttttgaatcaatgtgattacttattgtggaagatacaggccatatcgcatagcgtcttgcctcaaggatcttatcacttagtgagtgaaataaaacaattacacagataactgccagtaggcagcactaaatgtcttaagtgatggatagacagagaggtaagaagggtccaatcaaatgctgaaatgttaataaaacccagatcacaggcggtgatgatcaaatgaattgaacaggcttaggagaaatccgtgaaagaaagaaatctgtatccctgggatctttccatttttgagaatatattacatttgaatctcttagggatgtgtgattccccttccctttaaaatagttacagtataactttcattaaaatcttggattttgtcagtcatagcagacaatagcattttatrtcctgtgaagaattgtatgcataattttggaaacaagacaaaggaaagaggctctctaagctgttagaaacaaaggatttttaaaatctttcttctctcatacctccattaaggttgtcttttctcctttaaagctataagaaatatactgaatactaatgtgacagaaccagatgcaatccccaaatatcatatttacttaatataaattcatagtccttacctttaaggagatttgacaattcactttgtcttttagccttggggtagtcaggaaagttaggcacaatgttttaatgctcattccttctctt

SEQ ID NO: 715465 - DNA, 652 bp, Homo sapiens
tacatatttataagacatcaatcaagcttaagaactgttaaagtgtattgaaattcctacattgacaacttcataacaacttaaaaaattaaattgaaatctgcattcttggactgccaagagaggtccacaatggaatgtgaggattggaaagaggccccaggtcatagccaatttcattctctttccayccctctttccatcttgctggatgaggggtttgttacatccaagatactgcagcctatttgtccagcatctcctcatgagacatccctttgaccaagggttgtacacaccagtccaccttcaaaaaggctgatgtagggaatggccttgaatagaccttgaaagcaatcttaggaccttttatttctcctaaagaggaatccagagtcttgagtattggtacattggcatagcacatggatgggcatgagtcttgtttcacatgagcacattcacttgttttgtggactcatcgccacttccccttctactctccttcccagcccccatgggaggaaggtgaaagtggtttgtggttcactctaaagggctggcctagaacctgagttcctcttccctttagtctaagtttagcactgcaactatcttgttccactgttcacatttaccacgaaatgggtca

SEQ ID NO: 715466 - DNA, 652 bp, Homo sapiens
tacatatttataagacatcaatcaagcttaagaactgttaaagtgtattgaaattcctacattgacaacttcataacaacttaaaaaattaaattgaaatctgcattcttggactgccaagagaggtccacaatggaatgtgaggattggaaagaggccccaggtcatagccaatttcattctctttccacccctctttccatcttgctggatgaggggtttgttacatccaagatactgcagcctatttgtccagcatctcctcatgagacatccctttgaccaagggttgtacacaccagtccaccttcaaaaaggctgrtgtagggaatggccttgaatagaccttgaaagcaatcttaggaccttttatttctcctaaagaggaatccagagtcttgagtattggtacattggcatagcacatggatgggcatgagtcttgtttcacatgagcacattcacttgttttgtggactcatcgccacttccccttctactctccttcccagcccccatgggaggaaggtgaaagtggtttgtggttcactctaaagggctggcctagaacctgagttcctcttccctttagtctaagtttagcactgcaactatcttgttccactgttcacatttaccacgaaatgggtca

SEQ ID NO: 715467 - DNA, 652 bp, Homo sapiens
tacatatttataagacatcaatcaagcttaagaactgttaaagtgtattgaaattcctacattgacaacttcataacaacttaaaaaattaaattgaaatctgcattcttggactgccaagagaggtccacaatggaatgtgaggattggaaagaggccccaggtcatagccaatttcattctctttccacccctctttccatcttgctggatgaggggtttgttacatccaagatactgcagcctatttgtccagcatctcctcatgagacatccctttgaccaagggttgtacacaccagtccaccttcaaaaaggctgatgtagggaatggccttgaatagaccttgaaagcaatcttaggaccttttatttctcctaaagaggaatccagagtcttgagtattggtacattggcatagcacatggatgggcatgagtcttgtttcacatgagcacattcacttgttttgtggactcatygccacttccccttctactctccttcccagcccccatgggaggaaggtgaaagtggtttgtggttcactctaaagggctggcctagaacctgagttcctcttccctttagtctaagtttagcactgcaactatcttgttccactgttcacatttaccacgaaatgggtca

SEQ ID NO: 715468 - DNA, 665 bp, Homo sapiens
cccatgatattgacataaaagtgggatagatgtcccttttgtgtgttccagtagtgccctgctgtatacctgtcatggtatctatgacactatgtggacattgcctacctgtctgtgtttttaggttatagcatatgactattgggaggtggaccatgccatcttcatcttggaattccagtgctggttctagtaccttagcacgtggctgttgattacatgaatgaagaatgaaaaacctctaatatttaaacacaatagaattaatgccatgtgtaaattatttaatagtaattttgtattgtwaatgtacatagatatttctcattcttactaactctgataaagttctcaactctttagtatttaaactcacatttagttaactgaagtgttttaggtaaagaacataattctttctctttccagttgttgctgtgttgaacacttgctcccgtctacttacttctctataatccactggtaagccacatctaatgaagagaatgtttaaccataaagtcttaaggaaaaattttattatttaaaagattataaaactttattactgggctgtttacacaacattttaattgtttctcataaaatatataacattacaatctttactgaagtaggatgtttttgtatcacatgtgtgatga

SEQ ID NO: 715469 - DNA, 665 bp, Homo sapiens
cccatgatattgacataaaagtgggatagatgtcccttttgtgtgttccagtagtgccctgctgtatacctgtcatggtatctatgacactatgtggacattgcctacctgtctgtgtttttaggttatagcatatgactattgggaggtggaccatgccatcttcatcttggaattccagtgctggttctagtaccttagcacgtggctgttgattacatgaatgaagaatgaaaaacctctaatatttaaacacaatagaattaatgccatgtgtaaattatttaatagtaattttgtattgtaaatgtacatagatatttctcattyttactaactctgataaagttctcaactctttagtatttaaactcacatttagttaactgaagtgttttaggtaaagaacataattctttctctttccagttgttgctgtgttgaacacttgctcccgtctacttacttctctataatccactggtaagccacatctaatgaagagaatgtttaaccataaagtcttaaggaaaaattttattatttaaaagattataaaactttattactgggctgtttacacaacattttaattgtttctcataaaatatataacattacaatctttactgaagtaggatgtttttgtatcacatgtgtgatga

SEQ ID NO: 715470 - DNA, 1064 bp, Homo sapiens
aacctacccaaatgaccataaatcaacaagtggataaagacactgtggtgtgtgtgtgtgtgtatacacacacgatagaatattactcagccataaaaaggaatgaattcatggcatttgcagcaacctggatgagattggagactattattctaagtgaagtaactcaggaatggaaaatcaaacattgtatgttttcactcataaatgggagctaagctatgaggatgaaaatgcataagaattatacaatggactttagggactcaaggggaaaaggtgggaagggggtgagggataaaagactacaaatagggtgcagygtatactgctcgggtgatgggtgcaccaaaatctcacaaatcaccactaaagaacttactcatgtaatcaaacaccatctgttccccaataacctatggaaatatattttataaaaaaattatagaaggaaaacagctataatgtagaattttatatccaaatgaaatgctgttgaacattgagagcattttaaaaaatattcccagactcatcctccctcaagtggtttgctacccaaagcagggtactaaaaacatttttagagaaattattcaaacaagaaattcaaatatagatgatatgtcaagaactatcagatgtacaaatcatctgatgtcataataaaatttactgttattcattaattttcttttaaataaacgttttattgttgtttcacacccctaaaaaatatacaaatcataaacatagatctcaatgggtatatcataataaacattcaatggatattataaaattaaaaaaagtaagctactattttgcaataaacataaataaccatgcaggttagggaattagctattactgacaacccagaattctcctaaactcattcctaggataatacttgcctaccttttccaggtaactaatgtcccgactttcaacaattttctcataatgctttctgggttttcattttcagattttgtattctagttagtaaattaattcctgtataattgatgtttctgatgttattgttagaggtatctttt

SEQ ID NO: 715471 - DNA, 1064 bp, Homo sapiens
aacctacccaaatgaccataaatcaacaagtggataaagacactgtggtgtgtgtgtgtgtgtatacacacacgatagaatattactcagccataaaaaggaatgaattcatggcatttgcagcaacctggatgagattggagactattattctaagtgaagtaactcaggaatggaaaatcaaacattgtatgttttcactcataaatgggagctaagctatgaggatgaaaatgcataagaattatacaatggactttagggactcaaggggaaaaggtgggaagggggtgagggataaaagactacaaatagggtgcagcgtatactgctcgggtgatgggtgcaccaaaatctcacaaatcaccactaaagaacttactcatgtaaycaaacaccatctgttccccaataacctatggaaatatattttataaaaaaattatagaaggaaaacagctataatgtagaattttatatccaaatgaaatgctgttgaacattgagagcattttaaaaaatattcccagactcatcctccctcaagtggtttgctacccaaagcagggtactaaaaacatttttagagaaattattcaaacaagaaattcaaatatagatgatatgtcaagaactatcagatgtacaaatcatctgatgtcataataaaatttactgttattcattaattttcttttaaataaacgttttattgttgtttcacacccctaaaaaatatacaaatcataaacatagatctcaatgggtatatcataataaacattcaatggatattataaaattaaaaaaagtaagctactattttgcaataaacataaataaccatgcaggttagggaattagctattactgacaacccagaattctcctaaactcattcctaggataatacttgcctaccttttccaggtaactaatgtcccgactttcaacaattttctcataatgctttctgggttttcattttcagattttgtattctagttagtaaattaattcctgtataattgatgtttctgatgttattgttagaggtatctttt

SEQ ID NO: 715472 - DNA, 548 bp, Homo sapiens
tagcaatgtttctccactcaggtgaggggagagtatttataaagctcgatgaatatctccaaaatttaggagtggcacaggagtctgatgtttaattaattattttccagaattagagtaaaagacaaaggctgataagctgttttgctggtaaattaaagaacagckgctaatacatttagattgtcaatttcatgggtttgtgaccactgtagttgtataagaacccacattcagtggatccttcaaaactttactgttactgtcttgaaatccttaataattttatctttgaatttgtgttttgtaagtgaactctgatgggacaatggagcatgagccaggagcatggggcctcagctcacatgtgatctcaccttttgccatcttgctcccccactgatacctagagaccactacaccacctcttacccagcaggggtctgaggccaaatacaaggagactcagggtcatatcctgagtaattttgagcgctctgtgagcatccctgtttccaaggcagagtgaaattaagagcaaagaaaaa

SEQ ID NO: 715473 - DNA, 548 bp, Homo sapiens
tagcaatgtttctccactcaggtgaggggagagtatttataaagctcgatgaatatctccaaaatttaggagtggcacaggagtctgatgtttaattaattattttccagaattagagtaaaagacaaaggctgataagctgttttgctggtaaattaaagaacagctgctaatacatttagattgtcaatttcatgggtttgtgaccactgtagttgtataagaacccacattcagtggatccttcaaaactttactgttactgtcttgaaatccttaataattttatctttgaatttgtgttttgtaagtgaactctgatgggacaatggagcatgagccaggagcatggggcctcagctcacatgtgatctcaccttttgccatcttgctcccccactgatacctagagaccactacaccacctcttacccagcaggggtctgagkccaaatacaaggagactcagggtcatatcctgagtaattttgagcgctctgtgagcatccctgtttccaaggcagagtgaaattaagagcaaagaaaaa

SEQ ID NO: 715474 - DNA, 608 bp, Homo sapiens
tgcttaggcttgaagcataacactgttgtcacatcacttgacaatgcatttacggaataagattcagtgagaaagaacaaacaagaaktgattatatcctttaaagagctttctcagaggcatcggctagtatcttgtttgcttctcatttgccagagttgcatcaagtagcttctcccaactgctcaggaaattgggaagtatagttttctcaacattttcataccaccacaaacactcccaagaatgttcataagcagtctgtaatacacaggacacgtcccaatgaccaagaattatctggtctgaaatatcaatagtggtgaggttgacaaaacttcctctgaagcacccggcattgggataaggtctcaaaggaaacgttaaaagacaatgcaaaatgaagaagaatatggggtaccaaaattatagttatcaatcaaccacagaacttagttttccccaaatatctgaaaggttgtttgacttgtcaaaatggaaacaatgtattcagtactgcttcagaaggcaaacctaaaccaaagtttgaaatctgtgatgatgaacatattaaaattatagaatcatttgaaggttattattatcca

SEQ ID NO: 715475 - DNA, 608 bp, Homo sapiens
tgcttaggcttgaagcataacactgttgtcacatcacttgacaatgcatttacggaataagattcagtgagaaagaacaaacaagaagtgattatatcctttaaagagctttctcagaggcatcrgctagtatcttgtttgcttctcatttgccagagttgcatcaagtagcttctcccaactgctcaggaaattgggaagtatagttttctcaacattttcataccaccacaaacactcccaagaatgttcataagcagtctgtaatacacaggacacgtcccaatgaccaagaattatctggtctgaaatatcaatagtggtgaggttgacaaaacttcctctgaagcacccggcattgggataaggtctcaaaggaaacgttaaaagacaatgcaaaatgaagaagaatatggggtaccaaaattatagttatcaatcaaccacagaacttagttttccccaaatatctgaaaggttgtttgacttgtcaaaatggaaacaatgtattcagtactgcttcagaaggcaaacctaaaccaaagtttgaaatctgtgatgatgaacatattaaaattatagaatcatttgaaggttattattatcca

SEQ ID NO: 715476 - DNA, 621 bp, Homo sapiens
cagtagacttttcatcagtgttttatattgtcagggtgttttttgtttttgtttttatgatttaatgtwtttaacttgtttctctattagaacagaaaaaacacatacttctttatttcttctgcattcctttccatttgttggccatgacagcagttagattatacccctttctactgaagcgttgtgctaagttttgggagggcaggagaaaatatcttcagcttgaaaaaaaaaatacttgaataaacaggtaatttttttattaagatatacaatggtcactttctttagtgagttatgacaatctacctctgaagtacaacatgttagagtcatttgctctggacaaagtcactttcaggaatggttttattacaatgaaaaggaataggtatactggctcttaagtgccactattgccctttatgagaatgagaactagattagctggcacgcttatatcccacactctttatgagccttatatgttttggggtattttcatcattttaatctggatgatgttattttcagaaacatcctaaaacaattttcaaagaagcaaggaaaaggttaacactgaacttgcataatattcagtcatgaaaatgcatttga

SEQ ID NO: 715477 - DNA, 621 bp, Homo sapiens
cagtagacttttcatcagtgttttatattgtcagggtgttttttgtttttgtttttatgatttaatgtatttaacttgtttctctattagaacaraaaaaacacatacttctttatttcttctgcattcctttccatttgttggccatgacagcagttagattatacccctttctactgaagcgttgtgctaagttttgggagggcaggagaaaatatcttcagcttgaaaaaaaaaatacttgaataaacaggtaatttttttattaagatatacaatggtcactttctttagtgagttatgacaatctacctctgaagtacaacatgttagagtcatttgctctggacaaagtcactttcaggaatggttttattacaatgaaaaggaataggtatactggctcttaagtgccactattgccctttatgagaatgagaactagattagctggcacgcttatatcccacactctttatgagccttatatgttttggggtattttcatcattttaatctggatgatgttattttcagaaacatcctaaaacaattttcaaagaagcaaggaaaaggttaacactgaacttgcataatattcagtcatgaaaatgcatttga

SEQ ID NO: 715478 - DNA, 3106 bp, Homo sapiens
tatatttgatactccacactgaagatgtaacagtcatggggtcttttgtgccatgtggtctgagttagggacaagataataaagaaggtagttcatcgataacaaggatccagtgattagaattgggagaggtctggtctctgatctctcctagtcatttacagaacaagaacaatgaagaaaagagttaacctataatctaagaagcagaagttgcaaacatgcaatgcgacagtctccagggcttaacttgccccttggcgcaataaatttagagggtcctgaaattttattgtcttttatactttattctgcactaaattgggtagcgatgaatatcttatcagaacaaaaggcagtatcatactgtctgtgcctctttattttatcaactccctctgattttgaaattgtaaaataagcatcactttttttatgaatggatctttgaaggaaaaaaaagcgagagagtcctggccttttttagggaacagagaccttaagtattaagtatgatgtattcagagatatcagaaaacttttatccagttttctgaatgcagtttcccagtaaaggttattcttttcgtgtgggcatgtgtatacgcatacatatatacaatatatttcatatatatacatatatgattatatgtagtatatataatatttattaaatatacaaaaaatacaattttctttttctgatatccaaatatttttgatctcattacctttgaatccatctttaatttaatagtcactttgtttcacatttggatgaagtatgaattcagtgaattttataattctgtatgttattattgggaaatgagactaatttaactccagccaagagattattatttattttttatttttttgagatggagtctcactctctggccaggctggagtgcagtagtgcgatctcggctcactgcaacctccgcctctcaggttcaagagattctcctgcctcagcctcccaagtagctgggattacaggctcccaccaccacacccggctaatttttgtattttttagtagagatggggtttcaccatgttggccagtctggtattgaactcctgacctcaagttatccactggcctccgcctcccaaagtgctgagatgacaggcgtgagccaccacgcctagcctccaaccaagagattataattgcttgctgttactctgataacagcaagctctggcctgatactcttgggtatcaggtactcttaggatgaaaaaaagcagtcactgccgttgtagtctctgatctcaagcagtggtcttcaactagggacagttttacctactcctcagaggacaatgtctaaatacatattttttattgatatgtaataattgtacatatttatgagggacaagtgatatttgatatatgcgtaaaatatgtaatgagcaaataagagtaactgggaatctattacctcaaatatttttcattctcacaattgaagtggaggtgctactcttttttcatttttcaagacagggtcttactctgtcacccagaccagtgtaagtgcaagatcctagctcactgcagcctcaaactcctgggctcaggtgatcctcctgcttcagaatcccaagttgctgggactacggggtcataccaccatgcctgtggtcttcctatgttacccgggatgatctcaaacttttggcctcaaacgatacttcctccttggcctcctaaagcactgggattacaggcatgagccactgcacctaccctgatgctactgttacccagtggagggagaccatggatgctaccaaacattctacaacacacaaggcagcattacaaaaataaattagcccaaaaagtcaacagtgctgaggttgaaaaatctagcctatagagtgagaaatatgtaatgcactgttataagtactatcttaggaacatgaatgaataaagtgctgggaaaactcaaaggagagagaactgagggtgaagaggtgttgaaaaaagctttatagaagaaatgacattggaacttgacccacaagaatgagcctgctttagccagggaaggatgaaaaggcagagaggcatcctaggtaggggagcaaagataagaaagtgtagaaaagtaatcatgtcacaaggcttttactgtgtgcagttactatagtggtatacctcgattcacgattacatacaaatgaggttaacatcactctatatgggaatttttctttatgtggatattaagctgcatatataaaacctccttagagaagagacataacatcattttctgctaaggagaggaagctttccagactccctagtttcagttgtcttacagtcatttgtagatatgcagtcagtatatgtacaaatgactgctaattcttccaaacttttctagaactagaattcagggaaagggctttaaacagctagaaatatctggaaggtgacatgacctctctatctggacaacggagaatatcaagaccttcaaagacctcagagacagaaaaacaaaccaacaaaaaacgcacacacaaaaagcagagagtaacccaatgattgttcagtattgacagtgcaatgacctggagtgtaggctctgggaatcccaccccaaaaactttctctgtgtgatttttgataagtgatagaatctcattttgcttccattttcttctttttgaaatgggtataatgttatctcgtcataggrttgtacaccttttatagcttggcttgaataagttctcaacatgggttcttttcacttaacccattgcgatctgaaaacatgggggtttgtttaaagacccatggtcagtcctgtgttgggagacactaaaagcaagattctagccttcctggtaggcagagaagacattgcaaaggatagctttataataggaaaatgctaagtgctgtgggcagataatgaggttgtttaagaaccattcaattaacaaaatgaaacaagtgtggtacactcagtgggtgcgctggagaagtcttttgaaatgttgatgccgatagtagacatggtgatttaaaaaggtccatatttaaattagttaaaaaaaaaaa

SEQ ID NO: 715479 - DNA, 3106 bp, Homo sapiens
tatatttgatactccacactgaagatgtaacagtcatggggtcttttgtgccatgtggtctgagttagggacaagataataaagaaggtagttcatcgataacaaggatccagtgattagaattgggagaggtctggtctctgatctctcctagtcatttacagaacaagaacaatgaagaaaagagttaacctataatctaagaagcagaagttgcaaacatgcaatgcgacagtctccagggcttaacttgccccttggcgcaataaatttagagggtcctgaaattttattgtcttttatactttattctgcactaaattgggtagcgatgaatatcttatcagaacaaaaggcagtatcatactgtctgtgcctctttattttatcaactccctctgattttgaaattgtaaaataagcatcactttttttatgaatggatctttgaaggaaaaaaaagcgagagagtcctggccttttttagggaacagagaccttaagtattaagtatgatgtattcagagatatcagaaaacttttatccagttttctgaatgcagtttcccagtaaaggttattcttttcgtgtgggcatgtgtatacgcatacatatatacaatatatttcatatatatacatatatgattatatgtagtatatataatatttattaaatatacaaaaaatacaattttctttttctgatatccaaatatttttgatctcattacctttgaatccatctttaatttaatagtcactttgtttcacatttggatgaagtatgaattcagtgaattttataattctgtatgttattattgggaaatgagactaatttaactccagccaagagattattatttattttttatttttttgagatggagtctcactctctggccaggctggagtgcagtagtgcgatctcggctcactgcaacctccgcctctcaggttcaagagattctcctgcctcagcctcccaagtagctgggattacaggctcccaccaccacacccggctaatttttgtattttttagtagagatggggtttcaccatgttggccagtctggtattgaactcctgacctcaagttatccactggcctccgcctcccaaagtgctgagatgacaggcgtgagccaccacgcctagcctccaaccaagagattataattgcttgctgttactctgataacagcaagctctggcctgatactcttgggtatcaggtactcttaggatgaaaaaaagcagtcactgccgttgtagtctctgatctcaagcagtggtcttcaactagggacagttttacctactcctcagaggacaatgtctaaatacatattttttattgatatgtaataattgtacatatttatgagggacaagtgatatttgatatatgcgtaaaatatgtaatgagcaaataagagtaactgggaatctattacctcaaatatttttcattctcacaattgaagtggaggtgctactcttttttcatttttcaagacagggtcttactctgtcacccagaccagtgtaagtgcaagatcctagctcactgcagcctcaaactcctgggctcaggtgatcctcctgcttcagaatcccaagttgctgggactacggggtcataccaccatgcctgtggtcttcctatgttacccgggatgatctcaaacttttggcctcaaacgatacttcctccttggcctcctaaagcactgggattacaggcatgagccactgcacctaccctgatgctactgttacccagtggagggagaccatggatgctaccaaacattctacaacacacaaggcagcattacaaaaataaattagcccaaaaagtcaacagtgctgaggttgaaaaatctagcctatagagtgagaaatatgtaatgcactgttataagtactatcttaggaacatgaatgaataaagtgctgggaaaactcaaaggagagagaactgagggtgaagaggtgttgaaaaaagctttatagaagaaatgacattggaacttgacccacaagaatgagcctgctttagccagggaaggatgaaaaggcagagaggcatcctaggtaggggagcaaagataagaaagtgtagaaaagtaatcatgtcacaaggcttttactgtgtgcagttactatagtggtatacctcgattcacgattacatacaaatgaggttaacatcactctatatgggaatttttctttatgtggatattaagctgcatatataaaacctccttagagaagagacataacatcattttctgctaaggagaggaagctttccagactccctagtttcagttgtcttacagtcatttgtagatatgcagtcagtatatgtacaaatgactgctaattcttccaaacttttctagaactagaattcagggaaagggctttaaacagctagaaatatctggaaggtgacatgacctctctatctggacaacggagaatatcaagaccttcaaagacctcagagacagaaaaacaaaccaacaaaaaacgcacacacaaaaagcagagagtaacccaatgattgttcagtattgacagtgcaatgacctggagtgtaggctctgggaatcccaccccaaaaactttctctgtgtgatttttgataagtgatagaatctcattttgcttccattttcttctttttgaaatgggtataatgttatctcgtcataggattgtacaccttttatagcttggcttgaataagttctcaacatgggttcttttcacttaacccattgcgatctgaaaacatgggggtttgtttaaagacccatggtcagtcctgtgttgggagacactaaaagcaagattctagccttcctggtaggcagagaagacattgcaaaggatagctttataataggaaaatgctaagtgctgtgggcagataatgaggttgtttaagaaccattcaattaacaaaatgaaacaagtgtggtacactcagtgggtgcgctggagaagtcttttgaaatgttgatgccgatrgtagacatggtgatttaaaaaggtccatatttaaattagttaaaaaaaaaaa

SEQ ID NO: 715480 - DNA, 3106 bp, Homo sapiens
tatatttgatactccacactgaagatgtaacagtcatggggtcttttgtgccatgtggtctgagttagggacaagataataaagaaggtagttcatcgataacaaggatccagtgattagaattgggagaggtctggtctctgatctctcctagtcatttacagaacaagaacaatgaagaaaagagttaacctataatctaagaagcagaagttgcaaacatgcaatgcgacagtctccagggcttaacttgccccttggcgcaataaatttagagggtcctgaaattttattgtcttttatactttattctgcactaaattgggtagcgatgaatatcttatcagaacaaaaggcagtatcatactgtctgtgcctctttattttatcaactccctctgattttgaaattgtaaaataagcatcactttttttatgaatggatctttgaaggaaaaaaaagcgagagagtcctggccttttttagggaacagagaccttaagtattaagtatgatgtattcagagatatcagaaaacttttatccagttttctgaatgcagtttcccagtaaaggttattcttttcgtgtgggcatgtgtatacgcatacatatatacaatatatttcatatatatacatatatgattatatgtagtatatataatatttattaaatatacaaaaaatacaattttctttttctgatatccaaatatttttgatctcattacctttgaatccatctttaatttaatagtcactttgtttcacatttggatgaagtatgaattcagtgaattttataattctgtatgttattattgggaaatgagactaatttaactccagccaagagattattatttattttttatttttttgagatggagtctcactctctggccaggctggagtgcagtagtgcgatctcggctcactgcaacctccgcctctcaggttcaagagattctcctgcctcagcctcccaagtagctgggattacaggctcccaccaccacacccggctaatttttgtattttttagtagagatggggtttcaccatgttggccagtctggtattgaactcctgacctcaagttatccactggcctccgcctcccaaagtgctgagatgacaggcgtgagccaccacgcctagcctccaaccaagagattataattgcttgctgttactctgataacagcaagctctggcctgatactcttgggtatcaggtactcttaggatgaaaaaaagcagtcactgccgttgtagtctctgatctcaagcagtggtcttcaactagggacagttttacctactcctcagaggacaatgtctaaatacatattttttattgatatgtaataattgtacatatttatgagggacaagtgatatttgatatatgcgtaaaatatgtaatgagcaaataagagtaactgggaatctattacctcaaatatttttcattctcacaattgaagtggaggtgctactcttttttcatttttcaagacagggtcttactctgtcacccagaccagtgtaagtgcaagatcctagctcactgcagcctcaaactcctgggctcaggtgatcctcctgcttcagaatcccaagttgctgggactacggggtcataccaccatgcctgtggtcttcctatgttacccgggatgatctcaaacttttggcctcaaacgatacttcctccttggcctcctaaagcactgggattacaggcatgagccactgcacctaccctgatgctactgttacccagtggagggagaccatggatgctaccaaacattctacaacacacaaggcagcattacaaaaataaattagcccaaaaagtcaacagtgctgaggttgaaaaatctagcctatagagtgagaaatatgtaatgcactgttataagtactatcttaggaacatgaatgaataaagtgctgggaaaactcaaaggagagagaactgagggtgaagaggtgttgaaaaaagctttatagaagaaatgacattggaacttgacccacaagaatgagcctgctttagccagggaaggatgaaaaggcagagaggcatcctaggtaggggagcaaagataagaaagtgtagaaaagtaatcatgtcacaaggcttttactgtgtgcagttactatagtggtatacctcgattcacgattacatacaaatgaggttaacatcactctatatgggaatttttctttatgtggatattaagctgcatatataaaacctccttagagaagagacataacatcattttctgctaaggagaggaagctttccagactccctagtttcagttgtcttacagtcatttgtagatatgcagtcagtatatgtacaaatgactgctaattcttccaaacttttctagaactagaattcagggaaagggctttaaacagctagaaatatctggaaggtgacatgacctctctatctggacaacggagaatatcaagaccttcaaagacctcagagacagaaaaacaaaccaacaaaaaacgcacacacaaaaagcagagagtaacccaatgattgttcagtattgacagtgcaatgacctggagtgtaggctctgggaatcccaccccaaaaactttctctgtgtgatttttgataagtgatagaatctcattttgcttccattttcttctttttgaaatgggtataatgttatctcgtcataggattgtacaccttttatagcttggcttgaataagttctcaacatgggttcttttcacttaacccattgcgatctgaaaacatgggggtttgtttaaagacccatggtcagtcctgtgttgggagacactaaaagcaagattctagccttcctggtaggcagagaagacattgcaaaggatagctttataataggaaaatgctaagtgctgtgggcagataatgaggttgtttaagaaccattcaattaacaaaatgaaacaagtgtggtacactcagtgggtgcgctggagaagtcttttgaaatgttgatgccgatagyagacatggtgatttaaaaaggtccatatttaaattagttaaaaaaaaaaa

SEQ ID NO: 715481 - DNA, 1372 bp, Homo sapiens
tgatataatgtgaatgaaaggtatacattctatacactggagaaatcttttttctttttgtgttacattttaaaacaaatggatgcctggaaagacatggaatgttagaggacagggtgcgaaaagcaaatagttttttttaataaagttatggtttagagcaaagagactgccaggaagcaaatgaaatattgatgccagaatatccagtatccacgcttcttaaaaatgttacctatgtatgagtcacttggagataatgttaaaatgccagttccgattcaggttgtctgggggtgcgttctgagattctgcatttcttaaaagctcgcacgtgatgctgatgctgctggtctttaacactttgtgtaggaaggttttatgtcttcagattaagggtcaactgagtatcttttcaagaagaaacatttgttggggtttatatgccaaggcagtatcatccagcctggctaacacccatcttgctataccataaaaaagctttctaccctttctgggtttattattaagtgttgagaaaacattcggcttttactgtttggctggggtttctggctgatagcagcaaggtaggagtttaaatttaacagaattaggaataaacaggatctagagagacagtctatccattactaagggagaagagttggtttttgtctctttacaaggccttatctaatagaggtctctgaatgctgcattaagaatcttggatatgtgattggttgtcttaactatctttttccttcacatattgcacatttacattagcttggacccttcagtttcctaatacaagtatgaacaggaagaagccatgtgagatttccccctcttttcatattttaagttcaatttaacaaacatacactggttagtaggttacaaagtagtggacgaggcactctgagggacatgaggatcaaaaaagaagataggttccaagtactgtcagtttacctatagaggatacggacatgaaaaataaccaaatataaggcagtttgagcttaaaaacactagatttgggggaaaatatgcttagagagctgaaagaaattgaaatcagttctgctggggagttaggaagacattgtaaaggaagaagactttgagtaaggatttagaacatggttatttgcacatagagacagcaaatactgagaccaagtctttgtcatgttgtaggtttgtaaacagagagcaaaagcagagacataggttagagtaatttaagtagtaccatgttgaaatttaaatgtcgttctttggaattcagcttataccctaggtcttgtatgggactgttacmgataatggataacattttaaggcagtgtttttctgcatt

SEQ ID NO: 715482 - DNA, 1561 bp, Homo sapiens
tgtgcttgttcagtgaaatcattcctttaagctattatacaaatttgcttggttcacaagcctatttttgtggacaaggaggctaaatctacaacaacttaaaaatgaaaatttaaataaaatttttaaactcaattccacacaaattgtttataaatatttataaacatacaaataaaataatagtggtcactgacacatatgtagcattatatataggtatgggataagttgcaaaaattttgcaaatgaatagatttttatttgcaacttatctgcagataaaacatgagaataatttttaaattgcaaaaaccagactgcacaaatcttcattataccaggtcactagacaaagtttccaaggacaataaaccactttcagcctgacttacaccaatacctaaactataaattgctgcacaggctattatatcactgagttagtctgtcctcttgcaaggttactgtttaaaagtattgtcccactgatcaagcaaggtttaaagtgggaaatgtgtgtgttagagcaggttgttaaaargtatgttcaggtatgagcagccttcacggcattatcatcacaagcgcagcccgtgcttttctggtgtttctgtgaagacctcatcgcctgccttttgttctatgccttgctttcattaggaagcctacagcagcatctcccaggtgtgttgcctgtacaaagggcattcattctactagtgcccaggcattaaagataaaggacacaaattacagttggagctgtgttcatggataaatgaggcagggcgacggtgattctactgtgctttctgggtaatcctaccattaattcctgagttgcttgtacagaagttctagccaagagaaaaatagatcattgcatttctttgctttgagagacaatgagcagccccgtgaatgtatggcctcattctgtatagaggagagccttttacaatgctgatttcccaagtcagtgcagcagtgatgctatttaaaaatatacctatatggtggatattatgcagcaggacaatctacactttcccctacccaggaacattcaacatagtttccaccaaataaaagagagagatcgattaatagcaaaagccagcctgtagtgaatgcttacaatggcccatcccctgttctgagcactttgtgtttattaacccatttaaccctaattctgctattattatctcccattttacagaaaaggaaaactgagacagcatgattatgaaaatgaccctgggttccatagtgaatggcggagctgagattcagaatgcagataatctaacactacagcctacctccttagcaattttcctcccaagatattatgtctcttacttaatatcattttcattaaaagtctgtatgttaatctataatcctagctattattttctttttaataaaccatttaccacccccctccttcttaaaaggctatttgaattcttacctagatctgcagtgaggcagactgatacttttaaaatttatttaacttgtaaaaaggctgaaggacacaaaacttatc

SEQ ID NO: 715483 - DNA, 584 bp, Homo sapiens
cattaaagtgcataaaagagtttaaagaaagtttgaatcatgatgccttggaaatgtccattaaccactgagagtatatggagtctctcaggctgatgttgtccagtcatttggttaaattattttttaaaagataaatgtttcaagtaacctaaggtgtttccagcaaacctgctatgtacattatgaattgaatataagagtctcaagttgctttcatgaacttccttgagtagatgagttaatagatcctgtttatattccatacctcctgctctgtctgctaaaagataacatttataaccycctcacaaagatactgtgagagcaaatacataaatttctgcagttagagtggaagaatcacctaatcttcaaaaccatagactaatagaattttacatatgggaaacatcttaagaagtaatcaaatcccacttcctcctgttattggggccagaaaaattaagccacatgcacaaacatatatagctagccaatgcccaaactgggattctcaaacatgcttcaatttttaattgttcattatttttttcattacaaaaccaattttaaaaagaaac

SEQ ID NO: 715484 - DNA, 613 bp, Homo sapiens
tattatatataatatatacatattatgtaaatatagtattaatcccacagtgttactatgatgattactaccatcatcatagtaatgagcaataatcatagtaataatagtcacaacaaagagcaataatcatagtaacaatagcaataataatcacagcaatgagcaataatcatagtaacaatagtaataatcatagtaacagtaatcatattaatgaacaataatcatagtaatagtcttagtaatgagcaataatcacagtaacaatagtaataatcatagtagtgagtaaaaattcataacagtaatagtaatactaataatagtaatgagtaatgattgtagtaayatttgtaataactataataatgccactatgatcaccattatccaacaggatctaagagaaatacttttcctgaattctttcatttacttctcatgataaccctgcaagtaagtagtcttttgatccccatgttacagatgcagaacccaaagctccatgatgtaaagtggcccagggctgcctgaccactcatgggtagagggagcaggaaaacctggtctggctgattccaacagccacgctgctgctgccgccctctgg

SEQ ID NO: 715485 - DNA, 660 bp, Homo sapiens
tccaatgaacctggattcagatccactggaagctactccctggcaggtgtgagttacaaggcgaggcccccattcatacggaaaggctcctggccacccctcagacaccataccctgcagtgccctctttgaagagagaacttaggggtatyatccagaagcctaaggattcagagagaaagggggattcttgggtggaggtagggtgtccctggtaaagacccataaaattaacaaacaacccactctagagctaagaaaacgaacataaacatagtttagtcactgacgtgtgactctgggcaagtcacttaacgtcacaaagcctcaatcttctctgctgtccaggaggcatcatgacagcaccaagctcccagcacagaggcaaggttaactgagaggtgcttagaacagggcctggtagtgcagaaggggtagcaaaaatttgctatttttgtatggttggtgatgttattttcaaaacagaacaagggggaatatcaaggaaggaaaagggacaatgcttatcagcctcactattgcaacaaaagcaggacttgagagatgagaagaatgggcttgcaggccctcagatggaaacaatgggggatggaactgcaaaggaagacgaggaagaaatccagtgtaaaagcacctgcc

SEQ ID NO: 715486 - DNA, 601 bp, Homo sapiens
tgtgagaggctctgagaacagtgcattgtgggagaagtctgcaatcattcaagagactcaatcagattgtcacatgccatttgtagacacacctccagaagactggtagcattttttagttaaatcaaatggcctttcagatgcactgtcaccacagccataggttactgttcaggatgttccattgggatattaaagcttagcccagagcaccaaaggtccctctgaaccattgatgagctctaatcaaagattcctcggtgggggatgaccggcctcaacacaatcttctctaccatcctatggctgggtgtgggtattttgcacagatgaacacattaagatctcctgtcttctaataatgtgaccttgctccgcttcccatcaactggtagggtctatgccccctccccttgaactgggtgtacatttgagactgtcgtggccatagggaagtgaccctatgtgacttctatggctatatcataaaagtgacwttcatttccactctgctctcctgggatgcccattcttggaactcaggagccatgctgtgaggaagcccaagcaagccctcacggagagactacatgcaggtgtg

SEQ ID NO: 715487 - DNA, 1775 bp, Homo sapiens
gctccagagggggctgtctggagaatattcctttggcctcagcttttcagatagtgttatcttataactgtccttgaagtgaactggctaagtagaggaaaacttgtgtttctcacttaacccttgctttattctgtttctctcttttaatttctgcatcaatatgattgccaaagaggatggaaagctgttttagtgagaaataaaaataagtttgggtcagaacatatttagataagcgttggaataatagaatgtatatttgatagaaaactgaatctgggtgatggaattgctgaaagagctcagcagcatagactgcttctttcttggggcaagttatcttctgccaatctgcttttgatttgtggtatggttagacttgtcattgttgggtttctattgatgttaaaggggctttgttgtttcttttgttttggtagaaagtaattaaaccagtgaaaaatgattagctggaatttttttttcacagagaatatgattttctaaaaagtacaattatgctcaagttaagctttttataaaaggtatttggtgttctataaagggtaaagacattagactttttttaaacttaaaggtcacatttaaaggggaaaaggtgggaacatgagcaatgcttgcaagaaccacagcaaaggaattattatttttaaatttttatttttatttgagacagggtcttgctctgtcacccaggctggagtgtagtggcatgatcttggctcactgcagacttgacctcctgggctcaagcaattcttcagccactcacgtagctgggactacaggcatgtgccaccatgtccaggtaatttttaaaaaaaatttctgtagagatgggctgtcactatgttgcccagactggtcttgaacttctgggctaaagaagttctgccttggcctcccaaagtgctaggattaaaggtgtaagccaccatgcctggcctacagcaaaggaattatttctgttgatggatagtacaaatttttagcctatagaaattcacaaaatacatgttatctatatatatcataaactgcttctttattttaattggtaaacaagtattgactattaaatattgaaagcagtgagaacatttcagtttcctaaaactaacccacaaggctcaaaacttaagaagaaatatttgacaaaaaattacactaaatttatggaattctagagtgtatctttttcawatattaaatcttgtggaaaaaaccaaagtagcagttatagatataggtggtggtaatatagatgcatcttagacaccctcgtgttaagctcctgattcttcaaaacatattcattttatgttccttggaatattataaaggctggtcagaaaactaacagcatttcaaggatacagaaattcccagtagggacacacatttatttgatagttgattctaattactaaatgacaaaaatagttgaaaaaatatagattacatataagcttgattaagaactgccatcaactttttagacttttttgatgtacaattctatagttttaacacaggtatatattcacatagccaccaccattatcaggatacagaattgtttcttcactaaaaagctccctcaggctgcctgttctcatcaccctccccagacctcctaagcatttgcagtcacttatcatactttaccactatcattatgtctttttgagaatgtcatacaaatagaatcatgtagtttataactttcatgaccagttctttcactcagc

SEQ ID NO: 715488 - DNA, 1775 bp, Homo sapiens
gctccagagggggctgtctggagaatattcctttggcctcagcttttcagatagtgttatcttataactgtccttgaagtgaactggctaagtagaggaaaacttgtgtttctcacttaacccttgctttattctgtttctctcttttaatttctgcatcaatatgattgccaaagaggatggaaagctgttttagtgagaaataaaaataagtttgggtcagaacatatttagataagcgttggaataatagaatgtatatttgatagaaaactgaatctgggtgatggaattgctgaaagagctcagcagcatagactgcttctttcttggggcaagttatcttctgccaatctgcttttgatttgtggtatggttagacttgtcattgttgggtttctattgatgttaaaggggctttgttgtttcttttgttttggtagaaagtaattaaaccagtgaaaaatgattagctggaatttttttttcacagagaatatgattttctaaaaagtacaattatgctcaagttaagctttttataaaaggtatttggtgttctataaagggtaaagacattagactttttttaaacttaaaggtcacatttaaaggggaaaaggtgggaacatgagcaatgcttgcaagaaccacagcaaaggaattattatttttaaatttttatttttatttgagacagggtcttgctctgtcacccaggctggagtgtagtggcatgatcttggctcactgcagacttgacctcctgggctcaagcaattcttcagccactcacgtagctgggactacaggcatgtgccaccatgtccaggtaatttttaaaaaaaatttctgtagagatgggctgtcactatgttgcccagactggtcttgaacttctgggctaaagaagttctgccttggcctcccaaagtgctaggattaaaggtgtaagccaccatgcctggcctacagcaaaggaattatttctgttgatggatagtacaaatttttagcctatagaaattcacaaaatacatgttatctatatatatcataaactgcttctttattttaattggtaaacaagtattgactattaaatattgaaagcagtgagaacatttcagtttcctaaaactaacccacaaggctcaaaacttaagaagaaatatttgacaaaaaattacactaaatttatggaattctagagtgtatctttttcaaatattaaatcttgtggaaaaaaccaaagtagcagttatagatataggtgktggtaatatagatgcatcttagacaccctcgtgttaagctcctgattcttcaaaacatattcattttatgttccttggaatattataaaggctggtcagaaaactaacagcatttcaaggatacagaaattcccagtagggacacacatttatttgatagttgattctaattactaaatgacaaaaatagttgaaaaaatatagattacatataagcttgattaagaactgccatcaactttttagacttttttgatgtacaattctatagttttaacacaggtatatattcacatagccaccaccattatcaggatacagaattgtttcttcactaaaaagctccctcaggctgcctgttctcatcaccctccccagacctcctaagcatttgcagtcacttatcatactttaccactatcattatgtctttttgagaatgtcatacaaatagaatcatgtagtttataactttcatgaccagttctttcactcagc

SEQ ID NO: 715489 - DNA, 636 bp, Homo sapiens
tcaaaagaatttacagttgtgaagagggaagtgagaggaagcagtcagtacaattcattgtgagtgctgtgatgctcagcagcattgggagcggtgcggtctccggagggacagccacctactctttgaggcaaaacaaagcgtagagaggtggcaggtggggaaggggtttggaaagggagaggttggcaggagtctccctctaagcaaactgaaaagccagagaaactggcctagatagaagaaaagcctttttcaggccaggcgaggcggctcacgcctgtaatcccagtactttgggaggccggggctggtggattacctgatgtcaggagtktgaggccagcctggccaacatgatgaaatcccgtctccgctaaaaatacaaaaattagctgggcgtggtggcaacacgcctgtaatcccatctactcaagaggctaaggcaggagaattgcttgaacccgggaggcagaggctgcactcagccaagatcacgccactgtactccagcctgggtgacagagcaagactctgtcttaaaaaaatatatgtatatgtacatatatatatatgtagaagaaaagcggccaggcacagtggctgatgcctgtacttagcactttgggaggccga

SEQ ID NO: 715490 - DNA, 844 bp, Homo sapiens
tcctgagtgagctattctgcagcagcattctattttgggcttgtacccaaatgccatgccaatttattagtgtatcaagctcagccttcccccactctatcagctggtcagaagggacccctgcaggcagttgtaagtgtgagctgagagagagctaytgcaataatggtgacttcatcccatcccgcagggaaggctagggctagagttgtcaggaacttaggcaagtggaccgggaatctgtgcctctgcattgccccgtaatttgatgtgggctgctgccatggagaagtgtaactttgggcaaggcagcttcctccagcagaagaaaattcttggagacaaactcagctttaagctgtcagcatctgggagaaggagtgcttcagtccacagtggaagtccaggcagcaccagagcgtccactacaagaagaaaataaagctgagataactgcagttaacattttggtgtttcatcatcccagcttttttatatgtcaaacccatgtgtggttgtacagtgttatttatactgtgtagcattctcttgttttcttctaagtcacctttcaaataaagtgattagtaatactgattaaggtgatcacatttagccttttaatacatatatatatattttttttgtgaagagaaactgaatgaaaaatcgttctagactctctattggttagctatacccatgcttgaggtctaggcagtattcaggagaatatcattcacccagtggactcactaaaacaatgtaaacagtctttatgtgctgaaagttctaactcttaaagagactaaattaacaaccctgtttgatgtaagacctaaca

SEQ ID NO: 715491 - DNA, 844 bp, Homo sapiens
tcctgagtgagctattctgcagcagcattctattttgggcttgtacccaaatgccatgccaatttattagtgtatcaagctcagccttcccccactctatcagctggtcagaagggacccctgcaggcagttgtaagtgtgagctgagagagagctattgcaataatggtgacttcatcccatcccgcagggaaggctagggctagagttgtcaggaacttaggcaagtggaccgggaatctgtgcctctgcattgccccgtaatttgatgtgggctgctgccatggagaagtgtaactttgggcaaggcagcttcctccagcagaagaaaattcttggagacaaactcagctttaagctgtcagcatctgggagaaggagtgcttcagtccacagtggaagtccaggcagcaccagagcgtccactacaagaagaaaataaagctgagataactgcagttaacattttggtgtttcatcatcccagcttttttatatgtcaaacccatgtgtggttgtacagtgttatttatactgtgtagcattctcttgttttcttctaagtcacctttcaaataaagtgattagtaatactgattaaggtgatcacatttagccttttaatayatatatatatattttttttgtgaagagaaactgaatgaaaaatcgttctagactctctattggttagctatacccatgcttgaggtctaggcagtattcaggagaatatcattcacccagtggactcactaaaacaatgtaaacagtctttatgtgctgaaagttctaactcttaaagagactaaattaacaaccctgtttgatgtaagacctaaca

SEQ ID NO: 715492 - DNA, 676 bp, Homo sapiens
ccgggcatggtgacccgcgcctataatctcagctactcaggaagctgagacagaagaatcacttgaacccgggaggcagaggttgcagtgagctgagatcgcaccactgcactccagcctgggtaacagagcaaggctccatctcaaaaaataaaataaaataaataaaataaaaaataaaaatgtaggttctgaggtcttctcctgatctaatgatgcaggatttrgccaaaagatcaagatggtaatttgcgtttttaataagcaaggtgattcttaggcacactggagtttgaaaaccacccgatggtttcgaaagtcccttccaagcctaatttttctttaatcacaaaatggcttcatagaggataaattttttcaggaatctttgagaggattaaatatctttgagagggataaacaggatgaagtcagccttaacaatgtcactctattactaataacaacatttattcagtgttcatttgtgccaagtatgtgccaaatgccttatacacataatcccacttattcatgtcaatgtcctttagctaaagaccaccagggacacacctgtctttaaacaagttgagcttattacttgttgcagcaagggaggacatgctccttggggaagcatggagtgtctcagtaagagagcttagaaagaaattgt

SEQ ID NO: 715493 - DNA, 676 bp, Homo sapiens
ccgggcatggtgacccgcgcctataatctcagctactcaggaagctgagacagaagaatcacttgaacccgggaggcagaggttgcagtgagctgagatcgcaccactgcactccagcctgggtaacagagcaaggctccatctcaaaaaataaaataaaataaataaaataaaaaataaaaatgtaggttctgaggtcttctcctgatctaatgatgcaggatttggccaaaagatcaagatggtaatttgcrtttttaataagcaaggtgattcttaggcacactggagtttgaaaaccacccgatggtttcgaaagtcccttccaagcctaatttttctttaatcacaaaatggcttcatagaggataaattttttcaggaatctttgagaggattaaatatctttgagagggataaacaggatgaagtcagccttaacaatgtcactctattactaataacaacatttattcagtgttcatttgtgccaagtatgtgccaaatgccttatacacataatcccacttattcatgtcaatgtcctttagctaaagaccaccagggacacacctgtctttaaacaagttgagcttattacttgttgcagcaagggaggacatgctccttggggaagcatggagtgtctcagtaagagagcttagaaagaaattgt

SEQ ID NO: 715494 - DNA, 661 bp, Homo sapiens
atgggtttcaccgtgttgttcaggctggtcttgaactactgacctcaagtgatctacccgtctcagccacccaaagtgaatttttgctttcttgatgcraacttacgcaaatacctattttgttaatggggactgattcaaggatttgagtgaacaaaacgttgacttattttcaacaatactttttcaggtggcaggagcccgggaaggagattatattgtctccattcagcttgtggattgtaagtggctgacggtgagtgaggttatgaagctgctgaagagctttggtgaggacgagatcgagatgaaagttgtgagcctcctggactccacatcatccatggtgagcactgacacctccctgggcagtcagtagtggtgtggagtgaaatctgcatgagttcagccccagaggtgtttatcagaccctctgtctcctgcctgtgtaacatggtacaaatgactggactcccaggcttgtaatcactgtaatttgctcaccttgggtcaaagagaaaattggcaaactttttctttttaaagacagggtcttgccctattgcccaggctggtttgcagtggtatgatcatggcttactgcagcctctatctcctgggtttaagtgatcctcccacctcagccacatgagcacctgga

SEQ ID NO: 715495 - DNA, 661 bp, Homo sapiens
atgggtttcaccgtgttgttcaggctggtcttgaactactgacctcaagtgatctacccgtctcagccacccaaagtgaatttttgctttcttgatgcaaacttacgcaaatacctattttgttaatggggactgattcaaggatttgagtgaacaaaacgttgacttattttcaacaatactttttcaggtggcaggagcccgggraggagattatattgtctccattcagcttgtggattgtaagtggctgacggtgagtgaggttatgaagctgctgaagagctttggtgaggacgagatcgagatgaaagttgtgagcctcctggactccacatcatccatggtgagcactgacacctccctgggcagtcagtagtggtgtggagtgaaatctgcatgagttcagccccagaggtgtttatcagaccctctgtctcctgcctgtgtaacatggtacaaatgactggactcccaggcttgtaatcactgtaatttgctcaccttgggtcaaagagaaaattggcaaactttttctttttaaagacagggtcttgccctattgcccaggctggtttgcagtggtatgatcatggcttactgcagcctctatctcctgggtttaagtgatcctcccacctcagccacatgagcacctgga

SEQ ID NO: 715496 - DNA, 661 bp, Homo sapiens
atgggtttcaccgtgttgttcaggctggtcttgaactactgacctcaagtgatctacccgtctcagccacccaaagtgaatttttgctttcttgatgcaaacttacgcaaatacctattttgttaatggggactgattcaaggatttgagtgaacaaaacgttgacttattttcaacaatactttttcaggtggcaggagcccgggaaggagattatattgtctccattcagcttgtggattgtaagtggctgacggtgagtgaggttatgaagctgctgaagagctttggtgaggacgagatcgagatgaaagttgtgagcctcctggactccacatcatccatggtgagcactgacacctccctgggcagtcagtagtggtgtggagtgaaatctgcatgagttcagccccagaggtgtttatcagaccctctgtctcctgcctgtgtaacatggtacaaatgactggactcccaggcttgtaatcactgtaatktgctcaccttgggtcaaagagaaaattggcaaactttttctttttaaagacagggtcttgccctattgcccaggctggtttgcagtggtatgatcatggcttactgcagcctctatctcctgggtttaagtgatcctcccacctcagccacatgagcacctgga

SEQ ID NO: 715497 - DNA, 441 bp, Homo sapiens
gaacatatgtgctccagaaaggttattcaaaaccttcatttgggggtatttaaaagacagtaactctcagatatttagtgcttggaagtccacatagatgttctggagcatcagcagatgtgtgaggttgatttctgcctgttgtcatgagaacacagcttgtctttattggcctttaggaacatgaccctaaaagtcagcctgacagtgatattcttctatgaaaagagagaytactacccaaaggagctgtgataggagacctgaggagtcagatatgatcagatgttctgtttccatttacagagtcctgaaaatctttgaggctggtagctgcaagtcatagttccagccagtgctgtgctgagccatgttgcaaaaggaaggatgtgtactacatactatataactggatacatgattttacgtatttttaaaacc

SEQ ID NO: 715498 - DNA, 2840 bp, Homo sapiens
tcaagcggtccactcacctcagcctcccaaagtgctgggattacaggcgtgagccactgtgcctggtctgtgatacatattattgcattgaatccccaagtaagttagagattcttagtctctctacagttaaggaaaccaaggctcagcaggatcatacagcaagatttcccctgattgcatggctagtaagtgttgaggctgagattctaactgaggtctatctcatggaaaacccatgctcacagccactgtgctgtgtgctcttcctgtctggatgtggtccttgtctgggtacctcagtgttctcatgaggcacctctggcttctgagatgtagacagaaactaggtattaggttggtgcaaaagtaattgcagtttttgccataaaagtatgttttagaattaacatcccaaatgaaaggtacttgaagtttaagccactctgaatactaataagatacatagtgtaatagtaacgtatgcctgagacccagcctaatattcttctttgaattcacacttaacactcactcacgcaaccaattttattgaagcgctctttgtgcaagaaagtccactttgaaactagagttctccagggaaacaaaagcctccttagaaacaatgttggaatctggattgctgtggaagaaacttaaaaagcttgagtcccttccacttctattcttggatgggttttggcccctagctggttcagaaattctttatcctcatttagattctctaaaggagtggctcattccagcccagcacagcctcattctgcccatagcaggtttccaccctggctctgctcccccgcagcgcgagcaccaggaggggacagctgctgggcccactttgcataggggcatgtatgacccaggcagggcggactctctgtggaaaaacttcagggctgctttctggctttagtcatattcgttagatgaaacttgtaggtgttgctaagacattctgcgccctgaaattgggagtggttttgaaaactggtctcaactattagattccgaacaactaagcttccacattcattgacagttacatgcagcaaagaagtctttctcattgcctgtttttccatccttctatgtgcaaacactatgtatcttattagtatttagagtggcttaaacttctagtacctttcattagggatgttaattcttaaatacacttttaatggcaaaaaccgcaattacttttgcaccaacctaaaacctagatgtttctgtctacatagtcagatagtgagtggaggcagtgcaagagatgtcagttttgcagcttgcttttcttcagttcctcgcatcagattctgttctctgttctgattctcttttcagacacctgtttctcctcgttttctagtttctggtagtattacctcagaatctagagctaacccccgagtgctccttggctgagagcactttaatacctaatggatgataacaggatctaacatggagttgtggagaaatcatggacacaggatttatttatttaataaatatatttattgtcactacatggagagtacaccatactcacctctggatgagtggggaaactgctgatatraggtcatttccccaaaatgacgcttttgttatcatgtcagggtggctttacttccaccattagttgcttccttttttttttttttttttttttgagatggagtctcactctgttgcccagactggagtgcagttgcatgatctcggctcactgcaacctctgcctcctgggttcaagtgattcttgtgcctcagcctcccaaatagctgggactacaggcatgcaccaccacgcccggctaatttttgtatttttagtagagacagggtttcaccatgttggccaggctggctcgtactcctgaccttaagggatctgcctaccctggcttcccaaagtgctgggattacaggcgtgagccaccatgttcagcctgcttccttttttaaaaccaattttttcctatgctgatattctaggaaatgttagtaagcatacagtaaaatgtgctcaaagtgcacataaacctgggacatgttggagttaaacaaaactaaatagttttcttagctgcagggtgcccagagcctgcaacgtacgaatgtgtgtcataattgttcacaaagggctccatcatgttaagcatttcctagttatttgaccatagaacttcttttttcatggcaagtctattaatagctcctagaacagagttccagtgatcattgtgtgatgaacactgaaggtctttttcaaaagctttgaaggttcttgtcaaaagtacatgcattatccaggagaggaaatgcaattgaccaccactatcccagaataagctggctgaaattagctagctaatctcacttggcaaggcctgaacaacagcttcctctctcttgagtttgaatccctgtctgtcatttctgcatgatctatgctaatttttgaccccactgatcctctttcttgccccacaatttatcctccctaactgacacagatatagtgggcatcagagataatgttttccaggctccagcaagagccaccctttcaacccccagtcccaacaacgaaacactgtaagaagctttgtctatgtcaggcattctctggcttacaaggaggaaagattttccttcctaacctaactgaacttaatcctgaacttaatcctgaaatcttctcatcgctttttcacctctgaaaaatgtgaccttaatcaaacatgactgctaaatattggacagggtgagagccacagagaatcaaaaggaaacatgctgaaagg

SEQ ID NO: 715499 - DNA, 2840 bp, Homo sapiens
tcaagcggtccactcacctcagcctcccaaagtgctgggattacaggcgtgagccactgtgcctggtctgtgatacatattattgcattgaatccccaagtaagttagagattcttagtctctctacagttaaggaaaccaaggctcagcaggatcatacagcaagatttcccctgattgcatggctagtaagtgttgaggctgagattctaactgaggtctatctcatggaaaacccatgctcacagccactgtgctgtgtgctcttcctgtctggatgtggtccttgtctgggtacctcagtgttctcatgaggcacctctggcttctgagatgtagacagaaactaggtattaggttggtgcaaaagtaattgcagtttttgccataaaagtatgttttagaattaacatcccaaatgaaaggtacttgaagtttaagccactctgaatactaataagatacatagtgtaatagtaacgtatgcctgagacccagcctaatattcttctttgaattcacacttaacactcactcacgcaaccaattttattgaagcgctctttgtgcaagaaagtccactttgaaactagagttctccagggaaacaaaagcctccttagaaacaatgttggaatctggattgctgtggaagaaacttaaaaagcttgagtcccttccacttctattcttggatgggttttggcccctagctggttcagaaattctttatcctcatttagattctctaaaggagtggctcattccagcccagcacagcctcattctgcccatagcaggtttccaccctggctctgctcccccgcagcgcgagcaccaggaggggacagctgctgggcccactttgcataggggcatgtatgacccaggcagggcggactctctgtggaaaaacttcagggctgctttctggctttagtcatattcgttagatgaaacttgtaggtgttgctaagacattctgcgccctgaaattgggagtggttttgaaaactggtctcaactattagattccgaacaactaagcttccacattcattgacagttacatgcagcaaagaagtctttctcattgcctgtttttccatccttctatgtgcaaacactatgtatcttattagtatttagagtggcttaaacttctagtacctttcattagggatgttaattcttaaatacacttttaatggcaaaaaccgcaattacttttgcaccaacctaaaacctagatgtttctgtctacatagtcagatagtgagtggaggcagtgcaagagatgtcagttttgcagcttgcttttcttcagttcctcgcatcagattctgttctctgttctgattctcttttcagacacctgtttctcctcgttttctagtttctggtagtattacctcagaatctagagctaacccccgagtgctccttggctgagagcactttaatacctaatggatgataacaggatctaacatggagttgtggagaaatcatggacacaggatttatttatttaataaatatatttattgtcactacatggagagtacaccatactcacctctggatgagtggggaaactgctgatatgaggtcatttccccaaaatgacgcttttgttatcatgtcagggtggctttacttccaccattarttgcttccttttttttttttttttttttttgagatggagtctcactctgttgcccagactggagtgcagttgcatgatctcggctcactgcaacctctgcctcctgggttcaagtgattcttgtgcctcagcctcccaaatagctgggactacaggcatgcaccaccacgcccggctaatttttgtatttttagtagagacagggtttcaccatgttggccaggctggctcgtactcctgaccttaagggatctgcctaccctggcttcccaaagtgctgggattacaggcgtgagccaccatgttcagcctgcttccttttttaaaaccaattttttcctatgctgatattctaggaaatgttagtaagcatacagtaaaatgtgctcaaagtgcacataaacctgggacatgttggagttaaacaaaactaaatagttttcttagctgcagggtgcccagagcctgcaacgtacgaatgtgtgtcataattgttcacaaagggctccatcatgttaagcatttcctagttatttgaccatagaacttcttttttcatggcaagtctattaatagctcctagaacagagttccagtgatcattgtgtgatgaacactgaaggtctttttcaaaagctttgaaggttcttgtcaaaagtacatgcattatccaggagaggaaatgcaattgaccaccactatcccagaataagctggctgaaattagctagctaatctcacttggcaaggcctgaacaacagcttcctctctcttgagtttgaatccctgtctgtcatttctgcatgatctatgctaatttttgaccccactgatcctctttcttgccccacaatttatcctccctaactgacacagatatagtgggcatcagagataatgttttccaggctccagcaagagccaccctttcaacccccagtcccaacaacgaaacactgtaagaagctttgtctatgtcaggcattctctggcttacaaggaggaaagattttccttcctaacctaactgaacttaatcctgaacttaatcctgaaatcttctcatcgctttttcacctctgaaaaatgtgaccttaatcaaacatgactgctaaatattggacagggtgagagccacagagaatcaaaaggaaacatgctgaaagg

SEQ ID NO: 715500 - DNA, 2840 bp, Homo sapiens
tcaagcggtccactcacctcagcctcccaaagtgctgggattacaggcgtgagccactgtgcctggtctgtgatacatattattgcattgaatccccaagtaagttagagattcttagtctctctacagttaaggaaaccaaggctcagcaggatcatacagcaagatttcccctgattgcatggctagtaagtgttgaggctgagattctaactgaggtctatctcatggaaaacccatgctcacagccactgtgctgtgtgctcttcctgtctggatgtggtccttgtctgggtacctcagtgttctcatgaggcacctctggcttctgagatgtagacagaaactaggtattaggttggtgcaaaagtaattgcagtttttgccataaaagtatgttttagaattaacatcccaaatgaaaggtacttgaagtttaagccactctgaatactaataagatacatagtgtaatagtaacgtatgcctgagacccagcctaatattcttctttgaattcacacttaacactcactcacgcaaccaattttattgaagcgctctttgtgcaagaaagtccactttgaaactagagttctccagggaaacaaaagcctccttagaaacaatgttggaatctggattgctgtggaagaaacttaaaaagcttgagtcccttccacttctattcttggatgggttttggcccctagctggttcagaaattctttatcctcatttagattctctaaaggagtggctcattccagcccagcacagcctcattctgcccatagcaggtttccaccctggctctgctcccccgcagcgcgagcaccaggaggggacagctgctgggcccactttgcataggggcatgtatgacccaggcagggcggactctctgtggaaaaacttcagggctgctttctggctttagtcatattcgttagatgaaacttgtaggtgttgctaagacattctgcgccctgaaattgggagtggttttgaaaactggtctcaactattagattccgaacaactaagcttccacattcattgacagttacatgcagcaaagaagtctttctcattgcctgtttttccatccttctatgtgcaaacactatgtatcttattagtatttagagtggcttaaacttctagtacctttcattagggatgttaattcttaaatacacttttaatggcaaaaaccgcaattacttttgcaccaacctaaaacctagatgtttctgtctacatagtcagatagtgagtggaggcagtgcaagagatgtcagttttgcagcttgcttttcttcagttcctcgcatcagattctgttctctgttctgattctcttttcagacacctgtttctcctcgttttctagtttctggtagtattacctcagaatctagagctaacccccgagtgctccttggctgagagcactttaatacctaatggatgataacaggatctaacatggagttgtggagaaatcatggacacaggatttatttatttaataaatatatttattgtcactacatggagagtacaccatactcacctctggatgagtggggaaactgctgatatgaggtcatttccccaaaatgacgcttttgttatcatgtcagggtggctttacttccaccattagttkcttccttttttttttttttttttttttgagatggagtctcactctgttgcccagactggagtgcagttgcatgatctcggctcactgcaacctctgcctcctgggttcaagtgattcttgtgcctcagcctcccaaatagctgggactacaggcatgcaccaccacgcccggctaatttttgtatttttagtagagacagggtttcaccatgttggccaggctggctcgtactcctgaccttaagggatctgcctaccctggcttcccaaagtgctgggattacaggcgtgagccaccatgttcagcctgcttccttttttaaaaccaattttttcctatgctgatattctaggaaatgttagtaagcatacagtaaaatgtgctcaaagtgcacataaacctgggacatgttggagttaaacaaaactaaatagttttcttagctgcagggtgcccagagcctgcaacgtacgaatgtgtgtcataattgttcacaaagggctccatcatgttaagcatttcctagttatttgaccatagaacttcttttttcatggcaagtctattaatagctcctagaacagagttccagtgatcattgtgtgatgaacactgaaggtctttttcaaaagctttgaaggttcttgtcaaaagtacatgcattatccaggagaggaaatgcaattgaccaccactatcccagaataagctggctgaaattagctagctaatctcacttggcaaggcctgaacaacagcttcctctctcttgagtttgaatccctgtctgtcatttctgcatgatctatgctaatttttgaccccactgatcctctttcttgccccacaatttatcctccctaactgacacagatatagtgggcatcagagataatgttttccaggctccagcaagagccaccctttcaacccccagtcccaacaacgaaacactgtaagaagctttgtctatgtcaggcattctctggcttacaaggaggaaagattttccttcctaacctaactgaacttaatcctgaacttaatcctgaaatcttctcatcgctttttcacctctgaaaaatgtgaccttaatcaaacatgactgctaaatattggacagggtgagagccacagagaatcaaaaggaaacatgctgaaagg

SEQ ID NO: 715501 - DNA, 2840 bp, Homo sapiens
tcaagcggtccactcacctcagcctcccaaagtgctgggattacaggcgtgagccactgtgcctggtctgtgatacatattattgcattgaatccccaagtaagttagagattcttagtctctctacagttaaggaaaccaaggctcagcaggatcatacagcaagatttcccctgattgcatggctagtaagtgttgaggctgagattctaactgaggtctatctcatggaaaacccatgctcacagccactgtgctgtgtgctcttcctgtctggatgtggtccttgtctgggtacctcagtgttctcatgaggcacctctggcttctgagatgtagacagaaactaggtattaggttggtgcaaaagtaattgcagtttttgccataaaagtatgttttagaattaacatcccaaatgaaaggtacttgaagtttaagccactctgaatactaataagatacatagtgtaatagtaacgtatgcctgagacccagcctaatattcttctttgaattcacacttaacactcactcacgcaaccaattttattgaagcgctctttgtgcaagaaagtccactttgaaactagagttctccagggaaacaaaagcctccttagaaacaatgttggaatctggattgctgtggaagaaacttaaaaagcttgagtcccttccacttctattcttggatgggttttggcccctagctggttcagaaattctttatcctcatttagattctctaaaggagtggctcattccagcccagcacagcctcattctgcccatagcaggtttccaccctggctctgctcccccgcagcgcgagcaccaggaggggacagctgctgggcccactttgcataggggcatgtatgacccaggcagggcggactctctgtggaaaaacttcagggctgctttctggctttagtcatattcgttagatgaaacttgtaggtgttgctaagacattctgcgccctgaaattgggagtggttttgaaaactggtctcaactattagattccgaacaactaagcttccacattcattgacagttacatgcagcaaagaagtctttctcattgcctgtttttccatccttctatgtgcaaacactatgtatcttattagtatttagagtggcttaaacttctagtacctttcattagggatgttaattcttaaatacacttttaatggcaaaaaccgcaattacttttgcaccaacctaaaacctagatgtttctgtctacatagtcagatagtgagtggaggcagtgcaagagatgtcagttttgcagcttgcttttcttcagttcctcgcatcagattctgttctctgttctgattctcttttcagacacctgtttctcctcgttttctagtttctggtagtattacctcagaatctagagctaacccccgagtgctccttggctgagagcactttaatacctaatggatgataacaggatctaacatggagttgtggagaaatcatggacacaggatttatttatttaataaatatatttattgtcactacatggagagtacaccatactcacctctggatgagtggggaaactgctgatatgaggtcatttccccaaaatgacgcttttgttatcatgtcagggtggctttacttccaccattagttgcttccttttttttttttttttttttttgagatggagtctcactctgttgcccagactggagtgcagttgcatgatctcggctcactgcaacctctgcctcctgggttcaagtgattctygtgcctcagcctcccaaatagctgggactacaggcatgcaccaccacgcccggctaatttttgtatttttagtagagacagggtttcaccatgttggccaggctggctcgtactcctgaccttaagggatctgcctaccctggcttcccaaagtgctgggattacaggcgtgagccaccatgttcagcctgcttccttttttaaaaccaattttttcctatgctgatattctaggaaatgttagtaagcatacagtaaaatgtgctcaaagtgcacataaacctgggacatgttggagttaaacaaaactaaatagttttcttagctgcagggtgcccagagcctgcaacgtacgaatgtgtgtcataattgttcacaaagggctccatcatgttaagcatttcctagttatttgaccatagaacttcttttttcatggcaagtctattaatagctcctagaacagagttccagtgatcattgtgtgatgaacactgaaggtctttttcaaaagctttgaaggttcttgtcaaaagtacatgcattatccaggagaggaaatgcaattgaccaccactatcccagaataagctggctgaaattagctagctaatctcacttggcaaggcctgaacaacagcttcctctctcttgagtttgaatccctgtctgtcatttctgcatgatctatgctaatttttgaccccactgatcctctttcttgccccacaatttatcctccctaactgacacagatatagtgggcatcagagataatgttttccaggctccagcaagagccaccctttcaacccccagtcccaacaacgaaacactgtaagaagctttgtctatgtcaggcattctctggcttacaaggaggaaagattttccttcctaacctaactgaacttaatcctgaacttaatcctgaaatcttctcatcgctttttcacctctgaaaaatgtgaccttaatcaaacatgactgctaaatattggacagggtgagagccacagagaatcaaaaggaaacatgctgaaagg

SEQ ID NO: 715502 - DNA, 2840 bp, Homo sapiens
tcaagcggtccactcacctcagcctcccaaagtgctgggattacaggcgtgagccactgtgcctggtctgtgatacatattattgcattgaatccccaagtaagttagagattcttagtctctctacagttaaggaaaccaaggctcagcaggatcatacagcaagatttcccctgattgcatggctagtaagtgttgaggctgagattctaactgaggtctatctcatggaaaacccatgctcacagccactgtgctgtgtgctcttcctgtctggatgtggtccttgtctgggtacctcagtgttctcatgaggcacctctggcttctgagatgtagacagaaactaggtattaggttggtgcaaaagtaattgcagtttttgccataaaagtatgttttagaattaacatcccaaatgaaaggtacttgaagtttaagccactctgaatactaataagatacatagtgtaatagtaacgtatgcctgagacccagcctaatattcttctttgaattcacacttaacactcactcacgcaaccaattttattgaagcgctctttgtgcaagaaagtccactttgaaactagagttctccagggaaacaaaagcctccttagaaacaatgttggaatctggattgctgtggaagaaacttaaaaagcttgagtcccttccacttctattcttggatgggttttggcccctagctggttcagaaattctttatcctcatttagattctctaaaggagtggctcattccagcccagcacagcctcattctgcccatagcaggtttccaccctggctctgctcccccgcagcgcgagcaccaggaggggacagctgctgggcccactttgcataggggcatgtatgacccaggcagggcggactctctgtggaaaaacttcagggctgctttctggctttagtcatattcgttagatgaaacttgtaggtgttgctaagacattctgcgccctgaaattgggagtggttttgaaaactggtctcaactattagattccgaacaactaagcttccacattcattgacagttacatgcagcaaagaagtctttctcattgcctgtttttccatccttctatgtgcaaacactatgtatcttattagtatttagagtggcttaaacttctagtacctttcattagggatgttaattcttaaatacacttttaatggcaaaaaccgcaattacttttgcaccaacctaaaacctagatgtttctgtctacatagtcagatagtgagtggaggcagtgcaagagatgtcagttttgcagcttgcttttcttcagttcctcgcatcagattctgttctctgttctgattctcttttcagacacctgtttctcctcgttttctagtttctggtagtattacctcagaatctagagctaacccccgagtgctccttggctgagagcactttaatacctaatggatgataacaggatctaacatggagttgtggagaaatcatggacacaggatttatttatttaataaatatatttattgtcactacatggagagtacaccatactcacctctggatgagtggggaaactgctgatatgaggtcatttccccaaaatgacgcttttgttatcatgtcagggtggctttacttccaccattagttgcttccttttttttttttttttttttttgagatggagtctcactctgttgcccagactggagtgcagttgcatgatctcggctcactgcaacctctgcctcctgggttcaagtgattcttgtgcctcagcctcccaaatagctgggactacaggcatgcaccaccacgcccggctaatttttgtatttttagtagagacagggtttcaccatgttggccaggctggctcgtactcctgaccttaagggatctgcctaccctggcttcccaaagtgctgggattacaggcgkgagccaccatgttcagcctgcttccttttttaaaaccaattttttcctatgctgatattctaggaaatgttagtaagcatacagtaaaatgtgctcaaagtgcacataaacctgggacatgttggagttaaacaaaactaaatagttttcttagctgcagggtgcccagagcctgcaacgtacgaatgtgtgtcataattgttcacaaagggctccatcatgttaagcatttcctagttatttgaccatagaacttcttttttcatggcaagtctattaatagctcctagaacagagttccagtgatcattgtgtgatgaacactgaaggtctttttcaaaagctttgaaggttcttgtcaaaagtacatgcattatccaggagaggaaatgcaattgaccaccactatcccagaataagctggctgaaattagctagctaatctcacttggcaaggcctgaacaacagcttcctctctcttgagtttgaatccctgtctgtcatttctgcatgatctatgctaatttttgaccccactgatcctctttcttgccccacaatttatcctccctaactgacacagatatagtgggcatcagagataatgttttccaggctccagcaagagccaccctttcaacccccagtcccaacaacgaaacactgtaagaagctttgtctatgtcaggcattctctggcttacaaggaggaaagattttccttcctaacctaactgaacttaatcctgaacttaatcctgaaatcttctcatcgctttttcacctctgaaaaatgtgaccttaatcaaacatgactgctaaatattggacagggtgagagccacagagaatcaaaaggaaacatgctgaaagg

SEQ ID NO: 715503 - DNA, 600 bp, Homo sapiens
tttaaaagtggggaagatgaagaaagtatatacaaaaatgatttagctgttttcagtaattacatgagcggtggtggtattggcattattgttctgagactgttgtatgtataatgtggaataaaacaaatgtgtaattatgaaaaaaaagagaataaacagggtgacaggtgtgggatagtcattttaaagaatatttagtagctgattcttttttaaagctctccatgcttaaaatataaatattctgaaagaaaacaaaagccaagaccctttttgtagagagttggagaatgctaggactttctgggagtgctggcttttgcasaggcatgggtaaacattagtgaagttattgctgagaacagctcgggacaggaggggaatgaaaagagaagacagtatggagacaatgagagaaaaggactgaaatgtagtcacctgagcaacttaagatccgtttgtcattagaaagagactagaacagcaacatcaccctcataaagtgtagtcatctgggctgggcactgtggctcatgtctgtaatcccagcactttggggggccaaggtgggcagatcattaggtccggagtttgaga

SEQ ID NO: 715504 - DNA, 600 bp, Homo sapiens
tttaaaagtggggaagatgaagaaagtatatacaaaaatgatttagctgttttcagtaattacatgagcggtggtggtattggcattattgttctgagactgttgtatgtataatgtggaataaaacaaatgtgtaattatgaaaaaaaagagaataaacagggtgacaggtgtgggatagtcattttaaagaatatttagtagctgattcttttttaaagctctccatgcttaaaatataaatattctgaaagaaaacaaaagccaagaccctttttgtagagagttggagaatgctaggactttctgggagtgctggcttttgcagaggcatgggtaaacattagtgaagttattgctgagaacagctcgggacaggaggggaatgaaaagagaagacagtatggagacaatgagagaaaaggactgaaatgtagtcacctgagcaacttaagatccgtttgtcattagaaagagactagaacagcaacatcaccctcataaagtgtagtcatctgggctgggcactgtggctcatrtctgtaatcccagcactttggggggccaaggtgggcagatcattaggtccggagtttgaga

SEQ ID NO: 715505 - DNA, 1200 bp, Homo sapiens
ccgcacctggcctcctatctttctctacagcaacgtgatgaagtaaatgtaaacccgaactaatgggcaaaacattttccacttttaggggttttaaactacctgaaagagacatttacccatactccaagttacgacatgagccctgccatgctcagcgtgcttgtcaaaatgatgcttgcacaagcccaagaaagcgtgtttgagaaaatcagccttcctgggatscggaatgaattcttcatgctggtgaaggtggctcaggaggctgccaaggtaagactccctggttcctgtgactttggggagtgggcggtaaatgctggcacaggagcactggaagtagcggggccttcccacgggagcttgcctgtgacctgggcattgtgccagctccggccagtactgctggcttgagttttcttggcaagtgttggtgtttcagatacggatcactgattccatgtgcagcttaacctaaaaaccagcataatgacagcagcctgatccccctgttaactgtgacagtgacagaacgaggggttgcttggagttgctcccagattctggagcagcccctggcaggggctgttgcatgagaagaagaaagggctctttctctgcaaatgggttcatgagggcccttgtgccgggctgccccttcccaatgccccttctatttcaggtgggagaggtctaccaacagctgcacgcagccatgagccaggcgccggtgaaagagaacatcccctactcctgggccagcttggcctgcgtgaaggcccaccactacacggcgctggcccactacttcactgccatcctcctcattgaccaccagggtaaggcctgtggggttcaggggtttggccagggctgtggtccagctgccccaggggtgattctgagctgagcgagagctaactgccttccctggagatgctcacaggctgaaggcagaggatgagaatgacccatgactgaggcagctgctgcacaggccatggtggggttaggggttataagcttctttagagagaggaagaggaggcacctttaattctgcctgtgtgcaagaggatgaattttcacctggaatctagaatctaagggaatgccaaaaatgctggcatcaagataggtaacattttaaggtaatattttaaaagaatccaaattaatgcaggccgggtacagtgg

SEQ ID NO: 715506 - DNA, 1200 bp, Homo sapiens
ccgcacctggcctcctatctttctctacagcaacgtgatgaagtaaatgtaaacccgaactaatgggcaaaacattttccacttttaggggttttaaactacctgaaagagacatttacccatactccaagttacgacatgagccctgccatgctcagcgtgcttgtcaaaatgatgcttgcacaagcccaagaaagcgtgtttgagaaaatcagccttcctgggatccggaatgaattcttcatgctggtgaaggtggctcaggaggctgccaaggtaagactccctggttcctgtgactttggggagtgggcggtaaatgctggcacaggagcactggaagtagcggggccttcccacgggagcttgcctgtgacctgggcattgtgccagctccggccagtactgctggcttgagttttcttggcaagtgttggtgtttcagatacggatcactgattccatgtgcagcttaacctaaaaaccagcataatgacagcagcctgatccccctgttaactgtgacagtgacagaacgaggggttgcttggagttgctcccagattctggagcagcccctggcaggggctgttgcatgagaagaagaaagggctctttctctgcaaatgggttcatgagggcccttgtgcygggctgccccttcccaatgccccttctatttcaggtgggagaggtctaccaacagctgcacgcagccatgagccaggcgccggtgaaagagaacatcccctactcctgggccagcttggcctgcgtgaaggcccaccactacacggcgctggcccactacttcactgccatcctcctcattgaccaccagggtaaggcctgtggggttcaggggtttggccagggctgtggtccagctgccccaggggtgattctgagctgagcgagagctaactgccttccctggagatgctcacaggctgaaggcagaggatgagaatgacccatgactgaggcagctgctgcacaggccatggtggggttaggggttataagcttctttagagagaggaagaggaggcacctttaattctgcctgtgtgcaagaggatgaattttcacctggaatctagaatctaagggaatgccaaaaatgctggcatcaagataggtaacattttaaggtaatattttaaaagaatccaaattaatgcaggccgggtacagtgg

SEQ ID NO: 715507 - DNA, 581 bp, Homo sapiens
tgacagagaaacataaatagaatcaccctacctctaaataagcataggacaaaactaactactatacaaataaaagcaaataaaaaagagctcaagttcagtgwcaaaacaacaagcagcagagtaggtcagagcccagagcagttgttaattaatttttaaaattatattggaaaagcggggtcagttgttcctctgtccctcacacaggcatcacctaacaaggtagtttatccccaaaccaaaatatgagaactgttttatgagcaaaaaaccaaaccaaaaaactgttttagggttctgctctagacaagtatatagaatgtgagtgccagctctgagtaaaaaacaggaaagagacaagaattaaggtctaagcttccattcacaaggtataaaggaaaagcaaaaagcagagaatattatggaattgattcccaaatgaaagtcctgcgctcactctttagagctgggatcctgatgatgaagacacagaggtcaccttagtctggagaaggaaggggctttctctcaactacatcacaaccaatctgtatgtataacctggctttatgccccct

SEQ ID NO: 715508 - DNA, 581 bp, Homo sapiens
tgacagagaaacataaatagaatcaccctacctctaaataagcataggacaaaactaactactatacaaataaaagcaaataaaaaagagctcaagttcagtgacaaaacaacaagcagcagagtaggtcagagcccagagcagttgttaattaatttttaaaattatattggaaaagcggggtcagttgttcctctgtccctcacacaggcatcacctaacaagktagtttatccccaaaccaaaatatgagaactgttttatgagcaaaaaaccaaaccaaaaaactgttttagggttctgctctagacaagtatatagaatgtgagtgccagctctgagtaaaaaacaggaaagagacaagaattaaggtctaagcttccattcacaaggtataaaggaaaagcaaaaagcagagaatattatggaattgattcccaaatgaaagtcctgcgctcactctttagagctgggatcctgatgatgaagacacagaggtcaccttagtctggagaaggaaggggctttctctcaactacatcacaaccaatctgtatgtataacctggctttatgccccct

SEQ ID NO: 715509 - DNA, 1133 bp, Homo sapiens
agtgcctgtgagtctaatctctcatggcgatgtgacaagaacccagattttagctgaactaaggaaaacgtcctacaacattatttttttaactttgaaataaccgaataaataaacctatgcatgcctttgaccttaacatcaagtaagttttataacccgtttgcatttttcctatatatttttttccattaagttcttttattgaatagactggtggggtttttttaagcagttttagattccaagttaaattgagcagaaaatatgaagattttcttatacctgaaaccccaacatgcacaatttcccctactatcaamaactcccaccagagtggtacatttgttacaactgatgaacctacactgacccatcattaccacttaaaaaccatggttttcattagcgtttgctcttagtactatatatatgatgggttttgacaaacgtataatgacatgcatcaaccattacaatatcatgcagcatagcttttcttccccccaaatcctttgtactccatttgttcatctctccacctaccagcaccccaggccttggcagccactgaattttttattgtttccatagttttgcagatttaatttggtgccttctcaatttataagagtctgttgtgatatagagcaatccttctcttcctggtatagagagggaaacacatttacaaatggagacttcattataaatacaaattgctcttacaaaaaagtaacttacactctgtttacaaagcctctcctgtgtatgctatttcacaaaattatcagctcaaattaatccttctgccagagaggcatattttggggtgacatattctagtctcccacagtatatttatctggtctcctataatatatttatgtatatttctggactttctgttctgttacattggtctatttttcaattctttcaccaataccatgctctcttcatcaccatagttttatactaagtctagaaagcaattaacttgtgtattttaatctcgtgttatgttatgtgtccctcaaaagttcatgtattggaaacttaattgccattttaacagtattaagaggtgtgggctttatgaagtaactaggccatgggggtccactccttat

SEQ ID NO: 715510 - DNA, 1133 bp, Homo sapiens
agtgcctgtgagtctaatctctcatggcgatgtgacaagaacccagattttagctgaactaaggaaaacgtcctacaacattatttttttaactttgaaataaccgaataaataaacctatgcatgcctttgaccttaacatcaagtaagttttataacccgtttgcatttttcctatatatttttttccattaagttcttttattgaatagactggtggggtttttttaagcagttttagattccaagttaaattgagcagaaaatatgaagattttcttatacctgaaaccccaacatgcacaatttcccctactatcaacaactcccaccagagtggtacatttgttacaactgatgaacctacactgacccatcattaccacttaaaaaccatrgttttcattagcgtttgctcttagtactatatatatgatgggttttgacaaacgtataatgacatgcatcaaccattacaatatcatgcagcatagcttttcttccccccaaatcctttgtactccatttgttcatctctccacctaccagcaccccaggccttggcagccactgaattttttattgtttccatagttttgcagatttaatttggtgccttctcaatttataagagtctgttgtgatatagagcaatccttctcttcctggtatagagagggaaacacatttacaaatggagacttcattataaatacaaattgctcttacaaaaaagtaacttacactctgtttacaaagcctctcctgtgtatgctatttcacaaaattatcagctcaaattaatccttctgccagagaggcatattttggggtgacatattctagtctcccacagtatatttatctggtctcctataatatatttatgtatatttctggactttctgttctgttacattggtctatttttcaattctttcaccaataccatgctctcttcatcaccatagttttatactaagtctagaaagcaattaacttgtgtattttaatctcgtgttatgttatgtgtccctcaaaagttcatgtattggaaacttaattgccattttaacagtattaagaggtgtgggctttatgaagtaactaggccatgggggtccactccttat

SEQ ID NO: 715511 - DNA, 549 bp, Homo sapiens
taaaaatggcaaataagaataaaaacaatagaaaaaacaaattttcttaaaatcgtcaatgtaaatggaacataatgttagatctgaacaatgcctgcagagtttcctgaacttatgatacttcgcagaatcacataagacctattgggctacctataaaagcatatacacactactacctgtagttgcccttaaactgatggctgacccctgctaagtatttggcaaatatagttagattcttgtaaccaatgtggcaactattggttgttaatttgattcaaaattgagaagaattcaatttacaagagaaaggagaaaaatgaattggacaattaatcaacttaatctcaagactggttttgtttttgtttttttartcaagaagttaaaaatgatactaaggatacttaaagcctgggtgataatgctaaatgttgccataaaaaagataaatggacattgttgtgtttggttatttcaaatttttagacaccaaaaaaaaaatgaaaagaaaaaaacatttcatatatggcaaagtaaaactca

SEQ ID NO: 715512 - DNA, 1368 bp, Homo sapiens
actgatgctgagctttttttcatgtgcttctctatactattttttttaacttcttgggtgtcaataatttttggaaaataaagagctcaaacttttaatttatagcatcaatattttattttatattttaaatattttatttctagcatgtatatgctacatatatgtgtgtgtgtrtatatatatatccatagatatcatgcaataatattattttgcaagaacacataaaaataaaaagatacacattaaacagattagaatggttgcctctagtgaagtaagtagtatttggagacttaaaaaaataaactgtaaactaaaaatataatcctaagccccccaacaactgaacctaccccctcttggccaaggggactccagagaatcctcaaaaactgagttcccagccatgatggaaagggagcttgggcacgcctcattatccctttttgagtttaggcacaacaaccaaccagcattaatgttagaatagagatcataaggctgataaaaacagactctttgtggctgtaagataccaaatcataaacaagacctaggaccaggcaaggcacaagttaaattatgcccgaaggccactggtgttgctaaacaggtcatattgtggctggctctgacatcattattttaacttaaacatccctttctgttaactccaagtttttagacaaacttttgttcctttaactgattgccaattaaaggatatctgaatatcagaattcacctatgacttgtaagccccctgctttgagatatcctgccttttggggcaaaaccaatgggtaccttccctatattgatttatgtctttgcctgtaactcctgcctccctgaaatgtacaaaaccaaactgtaatctaaccaccttgggcacactttctcaggactccttgagactgtgtttccctaggctatggtcactcagactggatcagaataaaccttgttaaaatattttacagggtttgatttttccattaacaaaataaagcagccagacacggtggctcacacctataatctcagcactttgggaggctgagagaggagcattgcttgagtccaggagtttgaggctgcaatgagctataattgtaccactacttcagcctgggtgacagagtgagaccccgtctcattatatatatattatatatatataaaatatatatataattaaaaatatctcagagtatgcttaagcaaaataataataaattaaaaataaataaaactaagcaagaggaggcattgagaagaccaagatgacaaaggaccacgatccaaggagtatgattaatttgaacgtttgcacatgaagtccaaaaggaaaaataaaat

SEQ ID NO: 715513 - DNA, 640 bp, Homo sapiens
ttatattatattattacattcctttgccattccaaacagaaaagattctaacttcctcttcctcccaatttcttgcccttatatgccctctttatttcttgtgtttgtgggatgtcacagtattgtgttaaagtgtttaaatattaactgtgttttgtcaaacagrttcatttgttatttgatttggggaatctttgaaagtaatacaggatttaaacgttttaggtatttcaatatagtgtttatttaaagtagttctaagctgggaaattagacgttatataatcaaggctttgttttcttacttttacatatctatctaaatactttcagaaagtattttaaaagtttcttctaaacagaactctgaaaatggaacaagatttttaggggcactcctaatttgtagaagccctgagataaatcttacaaagccagcggctgtcatctattttatctggtttcaaagtttgattttgtacatttgttctttaaatatgtacacctgtgaaccagaagttacagagaaatttatatgctctttaaatttccacaaatgacttagacttgatctttagccttacccaaatattcagaaaaaaaaaagaaaaggaagaagtgaagttaagcatcaaattca

SEQ ID NO: 715514 - DNA, 640 bp, Homo sapiens
ttatattatattattacattcctttgccattccaaacagaaaagattctaacttcctcttcctcccaatttcttgcccttatatgccctctttatttcttgtgtttgtgggatgtcacagtattgtgttaaagtgtttaaatattaactgtgttttgtcaaacaggttcatttgttatttgatttggggaatctttgaaagtaatacaggatttaaacgttttaggtatttcaatatagtgtttatttaaagtagttctaagctgggaaattagacgttatataatcaaggctttgttttcttacttttacatatctatctaaatactttcagaaagtattttaaaartttcttctaaacagaactctgaaaatggaacaagatttttaggggcactcctaatttgtagaagccctgagataaatcttacaaagccagcggctgtcatctattttatctggtttcaaagtttgattttgtacatttgttctttaaatatgtacacctgtgaaccagaagttacagagaaatttatatgctctttaaatttccacaaatgacttagacttgatctttagccttacccaaatattcagaaaaaaaaaagaaaaggaagaagtgaagttaagcatcaaattca

SEQ ID NO: 715515 - DNA, 787 bp, Homo sapiens
ctaagtgatttatgtattttaatttatagcaacccgttgagaaaggcattattattgtaaatttttgtgggtttttttgttgttttttgttattgttgttgttgttgttttgagacggagtctagctctgtcacccaggctggagtacagtggcacaatcttgggtcactgcaacctctgccttctgggttcaagcgattatcctgcctcagcctcttgagtagctgggattacaggcatgcaccactacactggctaatttttatatttttagtagagacagggtttcaccctgttggccaggctggtctcgaactcctgacctccagtgatccacccaccttgacctcccaaagtgttgggattacaggtgtgagccaccgcacccggcctcttattgtacattttatagatgaggacattgaagcacagagaggttaagtaactttcccaaagtcacacagctagtaaagtgtcagagytggaattcaaacccatttgttataactaccatagaaaacttattatagtaagtgctgtcttcatttttctctctttaaagtcacatgttatctagaagcacatgtaaaaattgaaagattgagtgaaataagccagtatggatcagtcgttctaaagcataataaaggcacttttaaacaatccctgttggagcaaaagtctacttctcgtaatcaacagcaacctgtcactatcgtaattttaaaagacttaactattttgtcagaatgtgttccttaaaatgatgcttttacaaaaagaaaaa

SEQ ID NO: 715516 - DNA, 639 bp, Homo sapiens
tctatttatttatcttaacaatacttttacatgcctctcattgtctcataaatttggatcctagttgtaacagcattttatttgttatgtttataagttttaggcttgtccatgcccttctctctagtctgaatgtcctaacttcttcatcagtccatgtcaaatcctaatcacctttcaagaaaaagtactatcatcttcatgaaggattttmtgatcacttttaccctaatccccatgtcagtttgaacatttctgtattctcttacttctctctttaaagctccatcaacagaatattcattgcttatgtcatctaagatttctttgtaaccctttttacttattagcagtctgtaaaattcatcatttttcttcttcacttccatgatatcctccaaataacttaatactggagattattcaaaggtacattgcttagaaggtgccttatttagcagtgtgcttaagaaggggtacaaaccaagtgccagacgatttagtttccacactccagttgggtgatcaaagctctataatatttggcaaataattcaataatctctgagacacaaattctgtatatgtaaaatgacagttatattaatgtatgcttttaattttttgtaagaaaaaata

SEQ ID NO: 715517 - DNA, 1208 bp, Homo sapiens
aaagaagttccagcatagcaataagaaatgatgaaggataagattaacatctacaaaacgtacgctttgactaaggaaacatgcacaataacatgtcttatgcagttcacacagcatagcatttcatcttttcactgttccggctcatgttataatggaagagggtgatcaccagaatgtaaatattgtaaaagtacacaaactaaaccagtgataggaaaaatataatcaccagccagagctagctgaatgacaaggcaggttagtagtcgtttcatgtttaattttggcatttttgttcatgtgtttttgaaacagtatctggctataggcaattctttcctttttgtgtcctggttttaccatgtataaaaggaaatcatttaatctagtgaagtgggaggattatgtttgaaagagtgtgtgtgtgtgtgtgtgtgtgtgtgtgcgtgcatgcacagaataatatatgttcttataagggactgagaaaatctaaagggagaagatagatattaaatactgattaaaatgatctgagaaagccagtattaaacataatgcattcctcttaaagcattttattcaaaatatcagtaagaaaagatttaataatattaataaacaacctgctcacaaaatatgatgagtaggaaaagtgactatgatgaatcattttaataactaatgaatagataagatggatgccagcaattgccttctctaatgcaccttcattctcctggtgatggacaaattattttgtattgcacctggggtacactattaaattcactcctaatcattcatcatttcacggtcgtcccatcctcaggaatttcagttatttttaatgcctactttcctttagtaattgatgcattcaaagtgaagtyatctattctaagttagccttgggtttcacagagacacatgcagtaaaagcctcttgttcttccagactaccaggctggtgattctgccatatggatcctaaaggggctgataggtttaatattaaaccgtaatgaagagatgtcacaaaaatatgatgtgtatttagcatttggtctttggagagaccatctctgtaaattgcagttccttcttggcatcttcattgtattctctgactcatatatgagtgagccctcgtggggcaccatatttcaacaagtcaccctgactcccccatctctctacacatt

SEQ ID NO: 715518 - DNA, 1505 bp, Homo sapiens
tgctgagaattgtatgtgtgcacatgaattagcataacatgcatatatttcctagctgtatacactgagagaggctgcaaagtgtgaggccccagtaacagtgagcacacttaatgtccagattttggtttctaaacatcatctttcaaaaaacaataactagaatgccttggagagttcattgattccagggcaggtgcagagaatctgggacaccttgtgtaccagattttaaggatttgctaagaaaaaaaaacaaaaaacaaaaacagtggcatattgaaagggcmcactaaccaacttgaaagagcttctaatgttcaaagtgggaataatttgagcaaggaaagaaagatagtatcagattataacccaaggactatgataaaattacatgagtctatactaatagaaataaattactgaaaaattttaaatgaggtagaagtgaatattctttcttatagaaaattccaaatcacaaatatccaaagaataaggaatatagaaatcactctaaaaataataattgctacaggaaaatctatctatgaatgctaaaattggtgggcataatttgaagtggaaccagtaaatttgcatagactccaagtatctcttttcaaatatttaataactataaagagaaagatgcagcttttaatgcagaatcctggcagcatcacttagccaagtgatcaaagttaatactactggtaatatactgatatcacgtgcctcttgagtgacctactgagaggtcacatcctctctgtgtcatcatttctaataatgtgtaacctcaatctgatgatgagaaaacatcagacaaactcaaattcaggggcagtctacaaaatcacagactagtcatcttcaaaaatgtcaaagtcataaatggcaaagacaggaattgtcacagattggagaagactaaagagacataaaaactaaatgcagcatgagatcttcaattggatccaggaacatgacaagtaaaaagctggtgaaagcaaagtaatctctgtagtgtagtttataatactgtaccaaaattaattgcttaatttggataattgtatcaaggatatgtgagatattaacacaagataaagctgggtgaagagtatacaggaactctattatattacctttgcaactcttctctaagtctaaaattatttcaaaatttgtaaagcttaaagagaaaaatgtttcccaggttattgtgacaatgaatcgggcttgagaatcactgtgctgatgattggtgactgagtttcctccagctctttgctcttgtaccagagagtagaattgctcagatagagcaaagcagaaaataggtcccaggctgaatgaaatagggcccaaatggtaaaatagcaaaatcttaaaccattgctggacataaggtaggaattaagaagaagaacaggaggaggaaaaggaggaagaagaggagagagggggaagggaaggaagaggaagaagaaaagggagag

SEQ ID NO: 715519 - DNA, 1283 bp, Homo sapiens
cagttcacaccttcttttccatgtgatttacagggcagttcacacctttttctgtgtgatccccattgtgggatttacagaatgtggctttgcaaacagtgtgccatggatctttgcatattcttattagagtcagaggctcctaatggttctgaaacatattttccttcataataaatttcaaacacttcgtttccagtgccaggaagattggaatttttatatttttttataaatggacaaattcttttttttttctttttctttttctttttttttttcctcgagatgaagtcttgctctgtcacccaggctggagtgcaatggcacaatcttgggtcactgcaccctccgcctcctgggttcaaggtacactcctgcttcagcctcctgagtagctgggcttacaggtgtgtggctaaccttttgtattgacaaattccttaaatagcgttttatagaatgggattgcagatacaattagatttaggaaaatctccaaaattttgtacaactcattataatgagcagtataatgaacattgtgataaaaaagcttggaccaactagaggtctaattgtcctttgacccaataacttagtgaatgatacagtgtttctttgcagcagctcttcatcatctttacaacaggtactgtacttggatcatcagtagttgtaatagttgcaataaacttatactaaaatataatatactatgtaaatttagatataaaatgctacataaaacaagatttttatgaatcattaaaatatacattgttaactgaaaggaggtcattttcttctctttaagagagctaggtaatactaccaaacagtatataaatgagcatggcttatttaaagaaaatacagtggagcaggcagctcagaaacataaatccaattactaagtcagataagaattttgtcatcattttacaggatatcacaaactgatgaatttctgagagacctcaatcaattaatttttaaaagatgttggatttgtacagggctttatatttttcaaaatattttattttatttgaatgtaagctttctattctaaccctttcctgggtttttytcttgaagacattagctgtacactcagaatgtacagcattctgaaactgtcaaagaacagacaatattccagtatacacaaaacttcccatctgcaatttttagttcaaagacccatggagctttggaggtgggataatgtacccaccatagcttttgttgctttttgtgttagtcaatggcttctattt

SEQ ID NO: 715520 - DNA, 1570 bp, Homo sapiens
aatttataaagaaaggaggtttagttgagtcacagtttcacatggctggagagccctcaggaaacttataatcatggcagaagttgaaggggaagcactttctttataaggtggcaggagggggagagcaggggaaactgccatttataaaaccatcagatctcataagaattcactcactatcatgagaacagcatggggtaaacagcccccatgatccagtcaccttccaccagggccctcccttgacaagtggagattacatttgagatgagatttgggtggggacacagagccaaaccatatcagtactttttcttttttaatatctgtgataatttgttgcatcttacaataagtactaagccacagtctaattgccagctttgttttctttctcagtgctatacaaggtaatgaatggtayctcttactgtcagtggtgtcttggatttggcagaacatgatgcatacctctgtaatagcctagcaggtccccagatgcccaaatatcaggtctcatgcaatgcttttatttcttcaaaacttcgtgtcctgaaagtatgaaacataaaacttcctcccaatttaataacaattaattttcctctggagagagattcctggcagggccacctcactgattgtcagtttatgtactgcaagaaggtgcttggtcaaaggaggtgatgtaaccctgccagtgcttcctccacttggctggctgtggagaaaggccataggaaggaatgccttttggtaattcatctgctcagactgggtgaggtttgaatttgtccacccagagcagctacctttttataattcacacaggcatagttgtgcaagctgcaggcctgactccccatatcatagttttaacttaatctctttctttttccatccagtcatctctctgtcttcattgtttcttaccttccaaggagcctaaatttaaaggaagcttaatttagttttcctatctacgtgcagataaattctatctctagaggatgttaattatttttttgacctttcagcatccatttcttcctcttttcgtaactgttctctgatttctctatggacagtcactgcctcccgcatgctcagcccaagaattctgaaacggttttgggcaggggtaggaacatgtatgacatagaactaagtcagagcattgtgcctctccgaccatagaggaacctggtctgatcagagttaagaagatagagtggaccctcttcctaggaatcctggccaacagactctcatggtttgctgtactttgaataaagaggagataaggtctggagctgctgttgtggccttgagccacagtggtggaacttctttgaggatgaagccaacaacctggaaggctgaactgaaaggatgagagaaactgaatcaagattacattatttagggtttgagaacagctgtatctgaaaccaacaatattcctgacattattattatgttaacagataaatacccatttttacttcagcatgtgtgggtagactacttttaatttgcagttgaagagtctgataccccctctccc

SEQ ID NO: 715521 - DNA, 594 bp, Homo sapiens
atttttgaaactcaatgtattaatctttgaaatgggtctcaaaaaaatttagataagtgattgtatcttcttcataccagaagtcaccaagaaaagaatttcagcccactaaggcataatataaaagttcattatagaattatataaagaatacatayagttacacagagagactatatacaattacacatatagggagactatacatacatatacatacatgtatacatactatacatgtgtaacaatagttacacatatagaacatatacattatacatatatagttatatatgtttaaaaaatataaatacatttaaggctcaatacatcactatataagttctgatatggtttgactgtgtccccacccaaatctcatcttgaattgtagctcccataatccccacatgtcatgggagggaccctgtgggaggtaattgaatcacgggggtggtttttcccatgttgttctcctgctagtgtattagtcttatgagatctgatggttttataaaagggagttcccccacacatgctctcttgcctgctgccatgtgagacatgactttgctcctcatttgccttctacca

SEQ ID NO: 715522 - DNA, 594 bp, Homo sapiens
atttttgaaactcaatgtattaatctttgaaatgggtctcaaaaaaatttagataagtgattgtatcttcttcataccagaagtcaccaagaaaagaatttcagcccactaaggcataatataaaagttcattatagaattatataaagaatacatatagttacacagagagactatatayaattacacatatagggagactatacatacatatacatacatgtatacatactatacatgtgtaacaatagttacacatatagaacatatacattatacatatatagttatatatgtttaaaaaatataaatacatttaaggctcaatacatcactatataagttctgatatggtttgactgtgtccccacccaaatctcatcttgaattgtagctcccataatccccacatgtcatgggagggaccctgtgggaggtaattgaatcacgggggtggtttttcccatgttgttctcctgctagtgtattagtcttatgagatctgatggttttataaaagggagttcccccacacatgctctcttgcctgctgccatgtgagacatgactttgctcctcatttgccttctacca

SEQ ID NO: 715523 - DNA, 594 bp, Homo sapiens
atttttgaaactcaatgtattaatctttgaaatgggtctcaaaaaaatttagataagtgattgtatcttcttcataccagaagtcaccaagaaaagaatttcagcccactaaggcataatataaaagttcattatagaattatataaagaatacatatagttacacagagagactatatacaattacacatatagggagactatacatacatatacatacatgtatacatactatacatgtgtaacaatagttacacatatagaacatatacattatacatatatagttatatatgtttaaaaaatataaatacatttaaggctcaatacatcactatataagttctgatatggtttgactgtgtccccacccaaatctcatcttgaattgtagctcccataatccccacatgtcatgggagggaccctgtgggaggtaattgaatcacgggggtggtttttcccatgttgttctcctgctagtgwattagtcttatgagatctgatggttttataaaagggagttcccccacacatgctctcttgcctgctgccatgtgagacatgactttgctcctcatttgccttctacca

SEQ ID NO: 715524 - DNA, 639 bp, Homo sapiens
atgatcagagcacagatccccatatttggaagacaaggtcctttttgctcatgctggtttcaataagctatgatcaagcagcttcagggacatgtgcacaactgactgccattgggattaggatggggactgggtagttgcttcggaggtaagacctgaaattgaccaaaattaactgcaatttaccatctaagccttcccctggaagttgcaaggcttcaatagactccagagtttcaaaagagttgtatcagacaaattctggcagttcaattgttatctagatgaggaaaaagattcctggttcttcctactctgtcacttttccagaattctatatatatatatatatctaaaaacaggattatatacactgtttttaacttctttcaatctaatcaagtcaacagttgttcatgtctacaattctttatgactgagtgatttttcattgtatgaccacacagtgatttattgaactagttccctattattggacattttagsttatttctagtttttcaccactatataccacacacagagttatacatatctttgctcacttgtctgattatttcactaggaaagaggaagttaagattttgaggtgtaattggaatatttaggggacagaaa

SEQ ID NO: 715525 - DNA, 571 bp, Homo sapiens
aaatcaaagtcaaatggtgtttgataataattctaggagacaggtgcttgcaacctttctaaagaaaatattgtggactagttttaactctatgcataaactacagtttacattatatcagaatgaatgtcacaggccacacattcagattttttttttttwaaaaaaagaaaaatctaatttctcctttgatccgctattccacttttagcaggaccgccattcaagtcaattcaaggctttccccttctcaccttctcccagaggatggattcagttgaggtggcgaaaacatcacatcagtgcatctggggaagcaggcctggctctctgctgtcagctgtccaccctggccgccactggactggccattgcccagctggtccttggtggcggccaccccttgtggactggtggggaatcctcattcctgcccttggtccacacctgcacctgctcttacatcctaccatcccaggctcaaggccctccaggttttctggctctcaggaccatcagatacactcagaaacattctgttgttcgctacacaacaccggggggatgaggg

SEQ ID NO: 715526 - DNA, 2604 bp, Homo sapiens
taaatctttgggctaataatcttattgccaaatttgttaaatattacttctaaagaaaatgaatattttatgacacattttcaatgttaaaaagaatataaaatgtatttcaatgattaaccaaatacttgagaaagtaacaagttttatgcttttaatcctttgtgtagaaaattgccacatcattctgagttgtttgtctagaaacatagcatttgtatttgtttgcatttatttttattcagctactgagttctaacctttctaatttcctccacagttatggaagagactgttttcctaaggcttcttgagatcaattaacacattcttatctctgtattacctgcacctggtacatacactgttctcaataaaggttagttaaccactacaggaaggcatagaaataccatttgttacacaattgctaattgtggcacttggcatttgtcactctagaacttataaccattcctagtcctttttaaaagccatagatattttccagtgttgatttaattatcaatactgatatcattgtcatcctcaccatgatcattttcatcatagaggctaaccaaggacctttctgtatatggtgcctctctccctagctttcttctttactttattacttcctttccttctacacaaccacgcaacaaacacatattgagcagcccattttctattattgtccttgatgccaggaatgcacttaaataaaatgggcaagatctctaccattttgtagctcactgtctagagaaagaggccaggaataaatatttaaatagtgtaatgtggcaaacagtgggtgagataagtgaggagtggatggttatggaaggactttctcagaaggtgagcactaggctaagatctaaataacaatatacaaattcactaatcagttgttgagtagagtaattaaacttttgggaaattgataaataatattagtggttaattaatacttacaaatgtaaaaattttgccatatgctttgctgaaattcagctacacttcggattttatttttattgacaaattgaataactgcgtctcaaagaaaatgagataaatgtggattaataattctctatgaatttatcctgtgtccctttcttaagttacatatttttaattatataaccacaaaatatccatgataagcacaaatatatatatatttcacctagtatataatataagaataacccacctcctcctttaaaaaaatcagagaaatatctctaatgcagattttaggattttayttttctctttcaccaatgaacttcaaaataactagctcctcacttaccaagagaatattctggtattaatgtatattctatcatatctcaatctagacatcttgttagtcagaagacaggaacaacattgagtgttatagttttgttttctattatttttacaatacatatatattacacataatcagacaataatataaaattattgggtaacagcaactcaacaatgacaatggcttatgcaaataagggattgtgcctttgatgaattacatggtagctgtagatctggtcatttgactctcctctatttgtcctcatttcaggatccaaactgaaggaaaaacctcaatatatagcaaagtccatagcagaggtaaaagagcaagagagctgttgaaacaaagtgatggctcttagcgtttctgctcagagtcaccataccttcacttgtgatcatgttcactggccaaagaagtgtcacactcctactgttatcacagaggaggggaagaaaatgcctttcacaggaagacacagcaggcctcatctaatgaatgggaatatataatgtttttaatctccttacaggaagaggagaaatatataggacatttccctcagttagaaataaatgagacattttcctacacatcttaggctactagtgaattcttgttgtatatattttttatcaaaatgttttctaaaggaatttgagttgtcttcggaaaaattgcaagccttatctgcttcttttttaaattttattattattatactttaagttttagggtacatgtgcacaacgtgcaggtttgttacatatgtatacatgtgccatattgttgtgctgcacccattaactcgtcatttagtgttaggtatatctcctaatgctatccctcccccctccccccaccccacaaccgtcccgggtgtgtgatgttccccttcctgtgtccatgtgttctcattgttcaattcccacttatgagtgagaacatgtggtcttcttagctttattctgaataatgcttataaatatatccctgtcactctatcatattgtttctgattaagttcctaccatccattcctatttacaaatgtatttcaaactctataataattagaggacattgaattaatcattggagtttcattaggtgttctgtaagatttacaactcattttgtaagtttctaagagtgcctatttgtctgctttacaaatatagatcatgtgaaataatctttcaccttcagtttatagaaattaatctttgtgcaatctacttctgctatctaagtagaaatca

SEQ ID NO: 715527 - DNA, 592 bp, Homo sapiens
tgagtttgttggtactagggcaaagcatggaggaaaaaagaaaaaagagatagagaaagaccatgagtcataatgacatctttcgtcccttcgaaccaacttttcttgagtccatagtattatatgctcygatgctttagccaattaagttaaatccatccttatgcattttaaagtattcgaactaaaataatatcatcaggaaacatgtgagtaaaagaagggccacctcattaccttttggcaataaaaggcagagtttaaattataaatatttacagaaatatatacaccaatggatttccaagaaaatgtgaatgatatgccacttaggaaaataaaacgatctcccagtataaaattaatctcactggaattgctgaatacacatctgatgctcaaaaagaatactccaagaaaatataaattgtttaaatataagtcttaataagcaggatgttaaaaactaaataaagtgacaggggatgcggtggctcaagcctgcaattccagctctttgggggagctgaggggggtggatcgcctgagatcaggagtttgagaccagcctggccaacatggcgaaaccaca

SEQ ID NO: 715528 - DNA, 1311 bp, Homo sapiens
aactagactttttcagctaaacctagctccatctgtttatgtaggacagaagtactctaacttgactgtacattagaatcaactggggaggttttaactactccccccaccaacaatttaattgggggtggggtcaaacatcagtatttattctccaagctccccaagtgattctaatttgcagccaggtctgcaaaccactgatatccaggccagatggccatatatcctgtacctggggaaagagcatttttactgtgaggggacacaaatcagtgaatagtttccaagcccggctggctatctgaatcctactgggagcttttattaaaatacggactaccaggccttgcctctagacctactgaatgggaagcccaaaaaaatgaggttcagcaatgtctgcatattttaaaaacatggccaggcacagtggctcacgcctgtaatcccagcactttgggaggctgaggcaggcggatcacacaaggtcaggagtttgagaccagcctggccaacatggtgaaaccccatctctactaaaaatacaaaaattagccaggcatggtggtatacgcctgtaatcccagctactcggaggctgaggcaggagaattgcttgaacctgggaggctgaggctacagtgagccaagattgtgccattgcactccagcctgggcgacagagggagactttgtctccaaaaaaaaaaatcttcaaatacattttgattgtcatctggggttaggaccaccgacctggatgaaagtcagaagctcttacccctaactcgattgccaacagaatgyttcatgtttagacgagtaatcttagcctgcaaagaattaggaatagcaggggaaaggagtggaggaggggagaagtatttaagaaaaaaataaagagaaaagaaatttaagtgtcctctaagcacccacaagtctgcttcttaaagtgctgataatgagcagtgtgtgctgaaaagaccaatggaactaaattctgaaccagttcatttcggcacatcctgtttatacgactatttaatgagtcattcagccaggatgattttctgtctgaatatgttaattgccatttttttcatagctctctattaaacagtacagataaaataggcatgctcatgtttttaagcgctatcagcctctcaccctcaagagagtgggcaacaggagtaaataagggaaaactttctcttttttcaaagtgtttaattcttttaacatatattggcatttgggaccccacttcaattcaaaagcatatgttagagttagcattaaagtgaa

SEQ ID NO: 715529 - DNA, 1947 bp, Homo sapiens
ttccttacattcccagcaatatgatgatttgctgtctgttatataaaatgtttaaatatttatagctaatatgaattcatcaggtacagttaagtagagcaaatttagttctatgaaactacacaatttcacagaaacaaaatttcaaagactctatcaagaagctataaaaactgcatattagaaaatagaaacaaaaatgaaaaaacgtgtgcaaagatacagaaataaccaaaatcaccaaatatgtaggagagacttaagtaaatgatggtaagtctaacagtttaacactggtcattaaaaaattcagaatgtaaactattggaaaacatattctgtatatgaaaaaatgacacagaaaaagaacacaaaagtatgtaagcactgaataagaatgttttaattgcttttgatcatccaacaaaaatttttttaaccgtgagataacacatgtgaagcaaggatgaataacccagaaatatgaaaattgtgtgaatatatacgaagggacacagacaaaaatcagtttatcagtaacataacagtgtttttaaaaagtcattggaggattttttgctgtaaatctgtttaagtgtataaaatctgaaagagaataaagaagtgtgacggggtccttgtatttttttgtgtgttttctcacaattatccaacattttaacaagcagaggtgtcacgatagcatcttgaaaagtaagatttagttccctatattcttacatatttacacatatccaagcatgccacacaaaaaagaacattcaacccaaactcaccagactattatctgaatgtcactagtcaatgctcttcaatagtcttcagcacaaagagggaaaaataggtggaaacaggacattatgaaagtaaattacataagcaacattagcaacaacataagactcccaacaggatcatgaatcttaaaaagttaagacatgttctggccaggcgtgctggctcatgccttaatcccaaaactttgggaggcccaaggcatgcagatcacttgagcctgggagttcgagaccagcctgggcaacattgtgaaaccatgtctctacaaaaaaatacaaaaattagccatgcatggtggcccacacctgtattcccagctactcaggaggctgaggtaggaggattgcttaagccaggcaggtcaaggctgcagtgtgccctgatggtaccactgcacttcagcatgggcaacagagtgagaccccgtctcaaaaaaaraaaaaaaaaaaaaaagatgtgttctaatgttgagaaaccattgtaccaactgtccccatttcctcagctgtcaaacagatgggatctgaatctctctcagagatactttggcaaatttgagaaatataataaaaataattatttcagagcctaaaataaagcctatgtaaattcataatatggagcattgaccagccataagacagaactgtgctactgtgcacacaactcacttacatgctgaattgagatactctaggaccttcacattcttcctgcatttccctgcttagcatatgtgtaacttcatctatggttcattagcagtagtcttcattgatgtcatgaataaagaacccaagaaaatccaggtaagtgtcatttcccaactgcaaaagcaagttgttgaaagtactccataaaaaatataaagtacgaactgtggttgctaaatgattctaaaaagaagaaaatgaagcacttcacttctttcttcacactttagcagggaattgaaaattcagtttagtgctataagaatcttctcatccctccaccttcccatcccctgaagacctccccacacccagtacacaaatacactcatcaacaattgaaagcaatgccataaatgaataattcaaattgattaagctacctaaaatgaatttttatttccattgaggaata

SEQ ID NO: 715530 - DNA, 1947 bp, Homo sapiens
ttccttacattcccagcaatatgatgatttgctgtctgttatataaaatgtttaaatatttatagctaatatgaattcatcaggtacagttaagtagagcaaatttagttctatgaaactacacaatttcacagaaacaaaatttcaaagactctatcaagaagctataaaaactgcatattagaaaatagaaacaaaaatgaaaaaacgtgtgcaaagatacagaaataaccaaaatcaccaaatatgtaggagagacttaagtaaatgatggtaagtctaacagtttaacactggtcattaaaaaattcagaatgtaaactattggaaaacatattctgtatatgaaaaaatgacacagaaaaagaacacaaaagtatgtaagcactgaataagaatgttttaattgcttttgatcatccaacaaaaatttttttaaccgtgagataacacatgtgaagcaaggatgaataacccagaaatatgaaaattgtgtgaatatatacgaagggacacagacaaaaatcagtttatcagtaacataacagtgtttttaaaaagtcattggaggattttttgctgtaaatctgtttaagtgtataaaatctgaaagagaataaagaagtgtgacggggtccttgtatttttttgtgtgttttctcacaattatccaacattttaacaagcagaggtgtcacgatagcatcttgaaaagtaagatttagttccctatattcttacatatttacacatatccaagcatgccacacaaaaaagaacattcaacccaaactcaccagactattatctgaatgtcactagtcaatgctcttcaatagtcttcagcacaaagagggaaaaataggtggaaacaggacattatgaaagtaaattacataagcaacattagcaacaacataagactcccaacaggatcatgaatcttaaaaagttaagacatgttctggccaggcgtgctggctcatgccttaatcccaaaactttgggaggcccaaggcatgcagatcacttgagcctgggagttcgagaccagcctgggcaacattgtgaaaccatgtctctacaaaaaaatacaaaaattagccatgcatggtggcccacacctgtattcccagctactcaggaggctgaggtaggaggattgcttaagccaggcaggtcaaggctgcagtgtgccctgatggtaccactgcacttcagcatgggcaacagagtgagaccccgtctcaaaaaaagaaaaaaaaaaaaaaagatgtgttctaatgttgagaaaccattgtaccaactgtccccatttcctcagctgtcaaacagatgggatctgaatctctctcagagatactttggcaaatttgagaaatataataaaaataattatttcagagcctaaaataaagcctatgtaaattcrtaatatggagcattgaccagccataagacagaactgtgctactgtgcacacaactcacttacatgctgaattgagatactctaggaccttcacattcttcctgcatttccctgcttagcatatgtgtaacttcatctatggttcattagcagtagtcttcattgatgtcatgaataaagaacccaagaaaatccaggtaagtgtcatttcccaactgcaaaagcaagttgttgaaagtactccataaaaaatataaagtacgaactgtggttgctaaatgattctaaaaagaagaaaatgaagcacttcacttctttcttcacactttagcagggaattgaaaattcagtttagtgctataagaatcttctcatccctccaccttcccatcccctgaagacctccccacacccagtacacaaatacactcatcaacaattgaaagcaatgccataaatgaataattcaaattgattaagctacctaaaatgaatttttatttccattgaggaata

SEQ ID NO: 715531 - DNA, 1038 bp, Homo sapiens
tgctttaaagtagtgtagaatatttgttaaaaagaacatattaattatgtttttagaagcttctgtaaggaagaaagaagtttgaccccccaacttttctcttttctagaactgcaaattactgctattttaaatagactttgttgtttaactgtacatccaggaaaatctaggaaattaaagaagcatgcatataaatgattgtgtagcagaacatgaacattaaattcatacagtgaagaaattmaagttagaaatactctcaaacataagaaggttctagaatcaatcctttaagcacagtctgagacatggtatatctttgcacttacttggaccttggtttctattcctgtgatgattattggatttgatgccatctgatgtcctgttcctcagattctatgaagctgagtctgagattaacttaggtctgagattgacataaaggggaaccggtccctagatttcctcagggctgagaagttattgatttctcaagtataataggactgcacagacgcacaatttgcaccaatcggaacaaaatgtttaacaagttctgagtatagaaaacactttgcaatttgaatttctatgattccaaaattcaaaaaagctcctttttgattaaatgcactgccctcaaccacacatgctcattttctctgtctactgctttgtcattctgtttatttaactttacttggcataccagagttttaacgctgagattttaaagtacatatgcaaaattggaatgtgtcagagaacctaggaacagattcatcaaaggagtcatgaggcacattgcacatgctttaacatcaaggtgtaaacggagcccattaaactattagttaagtggtgatcaggagcaagagcctgattagattacaaaatcttctgtgtgtgagcgcggtatgtgaaaacataacacttgatcctcaccatagtgccaggaagattcaattagagaactggtatgtgcccagatttggggacataaagggcaactggattttgaaggaaagatgg

SEQ ID NO: 715532 - DNA, 541 bp, Homo sapiens
aaggaaggaagaaaaaaaagaaagaaagaaagaaaaagaaagagagaaaatacaggttccacagttctrttccatgattctactgaatcagcatctctggggaggggagccaactaatttaattttaataagctctccaataagattctaaagctatgtttgagaaacacggattaagccgtgttagtctttcttcttacaggagcaatctgaggttgaactattcttgcagtttgtaataacaattcattaatgttttagatactcgatcagattcagttggctagattttcttcaggtgggtatctacgttcataagtaaaagcatatatgtaacttaaatttcttctgtactttctcctggtattgcaaacaacatcacatttagccacataaactaagttggacaacttttgcctgtttttttttaactggggatagaaaaataccttaaaataaaaattaactttcttgaaagttgcctagaacttgcctgtagagccatatgggtctgatgttttctggaaagaggaatctttta

SEQ ID NO: 715533 - DNA, 643 bp, Homo sapiens
ccttgattttgcaattttgtgagccaatagatgttgggttttctattgcttacaacagcaaaaaagccatgctgatacgtgaggattagttagttgctaatatgttctaaagtctttgaacatgtaaaaggcacttgaagagcttgctttacacatagattcttagttcttaatcacagagactttaattccgttgggagtggggagaggcagggagaaaaacatgaggtttatatttttaagaagcaccctctgtttttctaaagcttatagcctacacacgacacattgggcagaactaaggtggtgatgacctgcttcctttttcagaaatgaccaacarctctgcagagggaatgttttagacaaatattataatcaaataaaaagcaacttgaatttatatcccttaattatttacagtttgaactccactcctttctttgagagagctttatcctgcttccaaaaaaggcctgggaaaattttttcaaatcttaatagctctaccataagttataaaagtctcctgtacttgtaatttaatttaaaataatccaagactgaagtgttaaattttttttggtaattttaaagagcaatttattagtttaccatgagatttgaaaccaggatacacata

SEQ ID NO: 715534 - DNA, 1145 bp, Homo sapiens
gtggtttcacaacatcccatttcaatcagcacctgtttatgttgacgctagcaatagcagaggatgagggcatagaaaaaattaagcatttgcaataaacactgaaaatgaacttttttattacttgaaaatataattctagttctttgccatataaataacgtgattcccctgcattgtatgatcccctttctgcctgcaacatgaagtttcaatgctcatcttcttcttcttggctttgaatgtctcagactctctgaccagtgctccagagcgcatttcatatttttccacagcagaggaaagggagactgtccactctcgagggtgtgtggctctgtggggagcctcgggatgcactcccgggggatttaaggccaggtgctggagctctcccccagctttgtttctgagctggtgacacctttcacagtttatgtgtgtggtctctggcaagccacttaccaagaaggaaactgaggcaaggccacaagcatcaaggtgtcagcaccacaaccacagaatgactagtgaagagagcacacacggggccttgctgttcttgccatcactgccaaccatgtccgactggacacagctttgtttccaccggcctcacccatgggtgtataagctccatgagggcagtgcctggcctggttcttctgtggatcctctgttctggatacaagagatggactacatatgttcacggagcaaaacaaaacagtgccaaacacgacattacagagatgcaggcataaatcagaaccagtctgtggtccctcggggttcccattcaggcggtgaaggggcaacaggccgatttcctgctcaagccagcctctgtccacttcaagcatttgtggarggcctgtagcaaatctcaaggggacatgccctcctccgagcgggcgagtcagccccttgggaacaaggccactgaactgtggcctggccagggtgctcctcaggctggagaaagaagacgcccctgagtgtccacaggtgaaccccgtgtgccccaggccagaggctttgatgaccagacttcattctctgcaggcagccccgcttcctgcccacatttctccttcttggccgtacaaagatcacagcttttcagaacccacacaaacattgac

SEQ ID NO: 715535 - DNA, 1145 bp, Homo sapiens
gtggtttcacaacatcccatttcaatcagcacctgtttatgttgacgctagcaatagcagaggatgagggcatagaaaaaattaagcatttgcaataaacactgaaaatgaacttttttattacttgaaaatataattctagttctttgccatataaataacgtgattcccctgcattgtatgatcccctttctgcctgcaacatgaagtttcaatgctcatcttcttcttcttggctttgaatgtctcagactctctgaccagtgctccagagcgcatttcatatttttccacagcagaggaaagggagactgtccactctcgagggtgtgtggctctgtggggagcctcgggatgcactcccgggggatttaaggccaggtgctggagctctcccccagctttgtttctgagctggtgacacctttcacagtttatgtgtgtggtctctggcaagccacttaccaagaaggaaactgaggcaaggccacaagcatcaaggtgtcagcaccacaaccacagaatgactagtgaagagagcacacacggggccttgctgttcttgccatcactgccaaccatgtccgactggacacagctttgtttccaccggcctcacccatgggtgtataagctccatgagggcagtgcctggcctggttcttctgtggatcctctgttctggatacaagagatggactacatatgttcacggagcaaaacaaaacagtgccaaacacgacattacagagatgcaggcataaatcagaaccagtctgtggtccctcggggttcccattcaggcggtgaaggggcaacaggccgatttcctgctcaagccagcctctgtccacttcaagcatttgtggaaggcctgtagcaaatctcaaggggacatgccctcctccgagcgggcgagtcagccccttgggaacaaggccactgaaytgtggcctggccagggtgctcctcaggctggagaaagaagacgcccctgagtgtccacaggtgaaccccgtgtgccccaggccagaggctttgatgaccagacttcattctctgcaggcagccccgcttcctgcccacatttctccttcttggccgtacaaagatcacagcttttcagaacccacacaaacattgac

SEQ ID NO: 715536 - DNA, 637 bp, Homo sapiens
tccattcatcctcccctacaagtgctcggcccttctggccttgctgagcgttaaatccccgtccagctgtttgaccctattacaggaacatgataggcacccctgtcatttgaaatgcctgcaacagtcggatgcaccaaatctatcttcccgacaggtaaacctatggataatttatttttatgtgctttcaarggatgttgacaacagtcaggaacgtccgtgttcaggggagtgggtctcgcagcgccagtggtcactgttaatgagcaggaggggtggcggttgcaagggcgtccagctccaccggcctccagacccgcgcgtgcagcctgggccccgcaccagcaagatccggttccgtccaagagattccgactcagactcagacacggttctgcccaattactttcagctaaagccacccacctgaaacatcccccaggacgtgggcaggtgtcacccagagagcagggatggtgaaaaccatgctgcacagatcgggacgcagagcttcacatggctgcactaaactagtgcaggttgggcccgattaaaatatttacctggcttgacatcttccacatagccacttgctcccatgctgttcatgccgctacctcaaagaattatctgc

SEQ ID NO: 715537 - DNA, 637 bp, Homo sapiens
tccattcatcctcccctacaagtgctcggcccttctggccttgctgagcgttaaatccccgtccagctgtttgaccctattacaggaacatgataggcacccctgtcatttgaaatgcctgcaacagtcggatgcaccaaatctatcttcccgacaggtaaacctatggataatttatttttatgtgctttcaaaggatgttgacaacagtcaggaacgtccgtgttcaggggagtgggtctcgcagcgccagtggtcactgttaatgagcaggaggggtggcggttgcaagggcgtccagctccaccggcctccagacccgcgcgtgcagcctgggccccgcaccagcaagatccggttccgtccaagagattccgactcagactcagacacggttctgcccaattactttcagctaaagccacccacctgaaacatcccccaggacgtgggcaggtgtcacccagagagcagggatggtgaaaaccatgctgcacagatcgggaygcagagcttcacatggctgcactaaactagtgcaggttgggcccgattaaaatatttacctggcttgacatcttccacatagccacttgctcccatgctgttcatgccgctacctcaaagaattatctgc

SEQ ID NO: 715538 - DNA, 609 bp, Homo sapiens
cacacaatacttgggctcagccccaccagactacagccactccgatatgctgtttccctcttccccaggggacctccttcatcctttcccaggagaaagaccccctggctccaagctggacaatkacatccatgacaccattgcaaactctaatccaccctaaacccaacaaacttccagatcaaatgcttctgctctgcactcccttcaccccgaaatcatccaggtctttgtggagactctgcattccaggatttcaatgatgtccccaacacaaatccatagtggacaaacagggagtgcactccaatatgctaattttccaagttagtgataagagataagcgtaaacctggatctgtcattatcaccttcttggacttcatcagccaaatgacagcctgaaaacaaagatgctttcagacaggcaaagagtagccccttaagaaggcagacaacaggacttggaacaggcaggccgcacctgcagtgccctgtgacttgtctgaggatcacagtcagtgaatctagaaccctccctccaacctgctcctcctagcccaggtcctgatccccattcaccttcaggaagccgagctaccttgctgt

SEQ ID NO: 715539 - DNA, 609 bp, Homo sapiens
cacacaatacttgggctcagccccaccagactacagccactccgatatgctgtttccctcttccccaggggacctccttcatcctttcccaggagaaagaccccctggctccaagctggacaatgrcatccatgacaccattgcaaactctaatccaccctaaacccaacaaacttccagatcaaatgcttctgctctgcactcccttcaccccgaaatcatccaggtctttgtggagactctgcattccaggatttcaatgatgtccccaacacaaatccatagtggacaaacagggagtgcactccaatatgctaattttccaagttagtgataagagataagcgtaaacctggatctgtcattatcaccttcttggacttcatcagccaaatgacagcctgaaaacaaagatgctttcagacaggcaaagagtagccccttaagaaggcagacaacaggacttggaacaggcaggccgcacctgcagtgccctgtgacttgtctgaggatcacagtcagtgaatctagaaccctccctccaacctgctcctcctagcccaggtcctgatccccattcaccttcaggaagccgagctaccttgctgt

SEQ ID NO: 715540 - DNA, 616 bp, Homo sapiens
ctttcctcagtgacccttcaagtcgtgaatgccagactttccacccattataacagcctcttaaactggctgtgcatgatctattaggttggtgcaaaagtaatggcaaaaaccgcaactgcttttacaccaacctaattcttggataccatttttctcactataaaaatcacatactgtctagctggaggatggtaaaggttatcctatgttatcagataatgaacagttggtgggaagggctcatagtttaagcatcttattcttgttactattgacagagtctattgctgatagtatccagtgcatcaaagaagcaccatacatgttagtttaatgaacatgacatcagaagcttttcctcatgtgctgtacacatcatccgtttaagataagatttccagaccycaaaggaaagacttgatacttttgcagagagacattctaaagcttcacatggatctgactgaagtcaatgttttcatacatcatactaagattgtttagcataattgcataaataagcagtgatagactctatcattaaggatttgaaacatcccttaggtctcaatatctgagataaaactgtaatgcatattgcttgaaaagaaga

SEQ ID NO: 715541 - DNA, 1112 bp, Homo sapiens
ctcatttctgtttctgcatcatgtgtatcttagtaggaatggttgcattcatttaccacttcacaaaagggcgatgtgtatgatttttactgagcgaaattaattttttatggacttcttttttagccactgtataaaatcacccgcatgtacagcataacttcatttttaattaaatatcctaakattccatcaggtgtttaacttggatttagcagggtgattatttcttgggtaattcaataaaatgtattagaaagctgaagctatgtgccaaggtttacagctttatcactgccatattgtatttattacacaattgctaaacctcagcaaatatgtgtctgatgatctaattaatatacaaagctatcttattatactaaaagcaaatctttcagtaatgatttaaagcataactctaaaagatttgacagtcccctacaagcacttgctgacttaaatcaaattaaaatatttataactgggaaaaagttggtaacaaatggcaaagctgaaaaaaaattgctgcagtatcaaagaagagatcagacattttgatgataaatgctttttttttctgtgcaaataatggatttcttagccacatatcaaagcataagatgagattttaattatttttgtgagttgttaaatgaatataaatttaagttgcacccctaagtgtttttgtagctttttaatatgtgttgtttcaaaatgacaaaaatgaagcatgaggcctacatgagtgttgctttacttcaaaagtaacttcaaatggattgaggttggttgattttttttaagtttattttattactgttatagtatggataatagaaattatttttgttagaaaaaagttatcttgctagttatatccaaagttagcatttattattaatgtcaaactattacatttcctggcatggccaaattagcacatttttcatcataaaaggtatatgttgatttcattaatatttgtttttttaaggcatattttttccagaaatatgtataagtgtatatcatttttacatacgaagtctaaaaaaattcagaagcaagggaaaattctcagaacagttgggacatggcataccttt

SEQ ID NO: 715542 - DNA, 1112 bp, Homo sapiens
ctcatttctgtttctgcatcatgtgtatcttagtaggaatggttgcattcatttaccacttcacaaaagggcgatgtgtatgatttttactgagcgaaattaattttttatggacttcttttttagccactgtataaaatcacccgcatgtacagcataacttcatttttaattaaatatcctaagattccatcaggtgtttaacttggatttagcagggtgattatttcttgggtaaytcaataaaatgtattagaaagctgaagctatgtgccaaggtttacagctttatcactgccatattgtatttattacacaattgctaaacctcagcaaatatgtgtctgatgatctaattaatatacaaagctatcttattatactaaaagcaaatctttcagtaatgatttaaagcataactctaaaagatttgacagtcccctacaagcacttgctgacttaaatcaaattaaaatatttataactgggaaaaagttggtaacaaatggcaaagctgaaaaaaaattgctgcagtatcaaagaagagatcagacattttgatgataaatgctttttttttctgtgcaaataatggatttcttagccacatatcaaagcataagatgagattttaattatttttgtgagttgttaaatgaatataaatttaagttgcacccctaagtgtttttgtagctttttaatatgtgttgtttcaaaatgacaaaaatgaagcatgaggcctacatgagtgttgctttacttcaaaagtaacttcaaatggattgaggttggttgattttttttaagtttattttattactgttatagtatggataatagaaattatttttgttagaaaaaagttatcttgctagttatatccaaagttagcatttattattaatgtcaaactattacatttcctggcatggccaaattagcacatttttcatcataaaaggtatatgttgatttcattaatatttgtttttttaaggcatattttttccagaaatatgtataagtgtatatcatttttacatacgaagtctaaaaaaattcagaagcaagggaaaattctcagaacagttgggacatggcataccttt

SEQ ID NO: 715543 - DNA, 1112 bp, Homo sapiens
ctcatttctgtttctgcatcatgtgtatcttagtaggaatggttgcattcatttaccacttcacaaaagggcgatgtgtatgatttttactgagcgaaattaattttttatggacttcttttttagccactgtataaaatcacccgcatgtacagcataacttcatttttaattaaatatcctaagattccatcaggtgtttaacttggatttagcagggtgattatttcttgggtaattcaataaaatgtattagaaagctgaagctatgtgccaaggtttacagctttatcactgccatattgtatttattacacaattgctaaacctcagcaaatatgtgtctgatgatctaattaatatrcaaagctatcttattatactaaaagcaaatctttcagtaatgatttaaagcataactctaaaagatttgacagtcccctacaagcacttgctgacttaaatcaaattaaaatatttataactgggaaaaagttggtaacaaatggcaaagctgaaaaaaaattgctgcagtatcaaagaagagatcagacattttgatgataaatgctttttttttctgtgcaaataatggatttcttagccacatatcaaagcataagatgagattttaattatttttgtgagttgttaaatgaatataaatttaagttgcacccctaagtgtttttgtagctttttaatatgtgttgtttcaaaatgacaaaaatgaagcatgaggcctacatgagtgttgctttacttcaaaagtaacttcaaatggattgaggttggttgattttttttaagtttattttattactgttatagtatggataatagaaattatttttgttagaaaaaagttatcttgctagttatatccaaagttagcatttattattaatgtcaaactattacatttcctggcatggccaaattagcacatttttcatcataaaaggtatatgttgatttcattaatatttgtttttttaaggcatattttttccagaaatatgtataagtgtatatcatttttacatacgaagtctaaaaaaattcagaagcaagggaaaattctcagaacagttgggacatggcataccttt

SEQ ID NO: 715544 - DNA, 1112 bp, Homo sapiens
ctcatttctgtttctgcatcatgtgtatcttagtaggaatggttgcattcatttaccacttcacaaaagggcgatgtgtatgatttttactgagcgaaattaattttttatggacttcttttttagccactgtataaaatcacccgcatgtacagcataacttcatttttaattaaatatcctaagattccatcaggtgtttaacttggatttagcagggtgattatttcttgggtaattcaataaaatgtattagaaagctgaagctatgtgccaaggtttacagctttatcactgccatattgtatttattacacaattgctaaacctcagcaaatatgtgtctgatgatctaattaatatacaaagctrtcttattatactaaaagcaaatctttcagtaatgatttaaagcataactctaaaagatttgacagtcccctacaagcacttgctgacttaaatcaaattaaaatatttataactgggaaaaagttggtaacaaatggcaaagctgaaaaaaaattgctgcagtatcaaagaagagatcagacattttgatgataaatgctttttttttctgtgcaaataatggatttcttagccacatatcaaagcataagatgagattttaattatttttgtgagttgttaaatgaatataaatttaagttgcacccctaagtgtttttgtagctttttaatatgtgttgtttcaaaatgacaaaaatgaagcatgaggcctacatgagtgttgctttacttcaaaagtaacttcaaatggattgaggttggttgattttttttaagtttattttattactgttatagtatggataatagaaattatttttgttagaaaaaagttatcttgctagttatatccaaagttagcatttattattaatgtcaaactattacatttcctggcatggccaaattagcacatttttcatcataaaaggtatatgttgatttcattaatatttgtttttttaaggcatattttttccagaaatatgtataagtgtatatcatttttacatacgaagtctaaaaaaattcagaagcaagggaaaattctcagaacagttgggacatggcataccttt

SEQ ID NO: 715545 - DNA, 1112 bp, Homo sapiens
ctcatttctgtttctgcatcatgtgtatcttagtaggaatggttgcattcatttaccacttcacaaaagggcgatgtgtatgatttttactgagcgaaattaattttttatggacttcttttttagccactgtataaaatcacccgcatgtacagcataacttcatttttaattaaatatcctaagattccatcaggtgtttaacttggatttagcagggtgattatttcttgggtaattcaataaaatgtattagaaagctgaagctatgtgccaaggtttacagctttatcactgccatattgtatttattacacaattgctaaacctcagcaaatatgtgtctgatgatctaattaatatacaaagctatcttattatactaaaagcaaatctttcagtaatgatttaaagcataactctaaaagatttgacagtcccctacaagcamttgctgacttaaatcaaattaaaatatttataactgggaaaaagttggtaacaaatggcaaagctgaaaaaaaattgctgcagtatcaaagaagagatcagacattttgatgataaatgctttttttttctgtgcaaataatggatttcttagccacatatcaaagcataagatgagattttaattatttttgtgagttgttaaatgaatataaatttaagttgcacccctaagtgtttttgtagctttttaatatgtgttgtttcaaaatgacaaaaatgaagcatgaggcctacatgagtgttgctttacttcaaaagtaacttcaaatggattgaggttggttgattttttttaagtttattttattactgttatagtatggataatagaaattatttttgttagaaaaaagttatcttgctagttatatccaaagttagcatttattattaatgtcaaactattacatttcctggcatggccaaattagcacatttttcatcataaaaggtatatgttgatttcattaatatttgtttttttaaggcatattttttccagaaatatgtataagtgtatatcatttttacatacgaagtctaaaaaaattcagaagcaagggaaaattctcagaacagttgggacatggcataccttt

SEQ ID NO: 715546 - DNA, 927 bp, Homo sapiens
cctatgcctatgaatgagctgaggacatttctccaaaggaatcaatgaaagacaagaaggggtcatttggcctcaaatggacattttagaaaaaaaaaacagaatcttcagcaaactacttttgagtttttgttttattttgcatttatttcctctctgttttgtttgagactatttggagaaggtctggcaacttttttcactgactaatttatctagttttktatgacctaaactaatttagaataaaagaatatgagagctggtaggaaatgtagagattatccacactgactcttcattccactgctcagtaacttgaagccccaaacattaaacgaagtgtccaaaagtcaaagagctagtaaaaggcacagctaggctagaactccacctcttgagtgttttctctgctctatcatgggatcaccctcatctctctcaggatgaaaaaaaattctacagagcctgataatcagaacttctaactcctctaaagatactaactgcatttgggaactgcacttctgacaactgaattacttaggaatgttgtgtttagtgacccccactgcttgtcaaactatttgttttatttcttcatgtttaattctatctgaatgaactcagtacctagtttataccatttttaatgggaaatctcatatggcacatacagttggccactgaacaacacaggtttgaactgcatgggtccacttacatgcaaattttcttcttcctctgtcacccctgagacagcaagaccatccgctcttcttcctcctcctcctcagcctactcaatgtcaagatgacgacagtgaaaacctttgtgatgatccacttccacttaataagtagtaaatatattctttcttcattacgattctcttaatgacattttaataacattttattttctcta

SEQ ID NO: 715547 - DNA, 1960 bp, Homo sapiens
tggaacacatgcaaaaccagcggaaatgttgtagaggaaaagtaatcaaagtttcatacacaatctgatttggtctcccatttctgtaaatagcaatacatgcttaatggatacaatctgatgatctagtgcaattactcttaaggaaagaaagtggagatatagaaataatgttgactcaaaaaccactcccctgacagcctaacattttcttctctggaaactggggtaacgaggctatggacctggcacatattagagaagagtggccttcacaccctatcctgccaagattctgttggcttcccacccacaaaaatcaagatattcaaagcaactgaggcaaacctagtgcaaccctgtgtgactctgacaacaagaaagagaagctccccgtgggtcaaatgtcaggaatgcccacatctcagctattgcagacactctgtacctagattctcctcctaytcctaaaaacattgccatgaaagagcacacaaagatggaattcagcttttcattcaaagcttcaaaaggcaatgaaagagaaatgaggatcatgggaggagggagatagcggaatgaaggtttcaatgatgtcccaaaatataaaacaaatcagcagaattctggtcattgttgctacactgatcacagttttgggtgatcataaaagatgaagagtagcatacctttttggaaatgcatgacagaacacttggcaggtattttcataataaaatttcactcatcaaatttactaaccaagtctattcagcattttcagacctcagctctcaatgtaatagtccctttatcgttgcggaaaaatccagtcaccagtcacagatgtcccactcattagtacagattcccagggtttttggtctaattaaaaaatctgagcaagcatgggagtttattcctgtaatctcagcactttgggaggcccgggtaggaggatcgcttgagcccagaagtttgagaccagcctgggcaacatagtgagacactgtctcaaaaaaaaaaatcagccagatgtggtggcacacacctgtggtcccagctactcaggaggctgagatggaaggatctcttcagcacaggaggttgaagctacagtgagccctgatcatgccactgtactccagcctagacaatagagtgagaccttgtctttaaaaaaaaaaaaatcagctgggtgccgtggctcatgcctgtaatcccagcactttgggaggccgaggtgggcggatcacctgatatcaggtgttcgtgaccagcctgaccaacacggagaaaccccatctctactaaaaatacaaaattagccgggcatggtggagcatgcctgtaatcccagctactcaggaggctgaagcagaagtatcacttgaacccaggaggcagaggttgcagtgagctgagattgcactccagcctgggcaacaagagcaaaactccatctcaaaaaaaaaaaaatcatctttagggatgccctttttcctaactcagttagttgcctgtccacttgccataaactatactgcactggccaaatgaattattttctggcttttcacagggcctacttttaattttaccaaagccatggctactttttctttcctaagaactcagatcattttttaatttattttctgctcaaatctcaagccaaacttctcaaggttttttttaacagggttcactaaaaagaagtaaatgttctttttcagaacttgtatgcatgaacaaaaactgaggtcacccaaataaatgtaagaaagaaataacttgtatcatatagtcatctcattcagaaaattaaagggaaaccaaaaaaaaaaaaaagaaagagaaaaaagagatcaaatgacccttgcctcagtcaccagtgctacgtattgttcaagacaaatccacagttcacatttcattggcaatactaatgtatcactat

SEQ ID NO: 715548 - DNA, 1960 bp, Homo sapiens
tggaacacatgcaaaaccagcggaaatgttgtagaggaaaagtaatcaaagtttcatacacaatctgatttggtctcccatttctgtaaatagcaatacatgcttaatggatacaatctgatgatctagtgcaattactcttaaggaaagaaagtggagatatagaaataatgttgactcaaaaaccactcccctgacagcctaacattttcttctctggaaactggggtaacgaggctatggacctggcacatattagagaagagtggccttcacaccctatcctgccaagattctgttggcttcccacccacaaaaatcaagatattcaaagcaactgaggcaaacctagtgcaaccctgtgtgactctgacaacaagaaagagaagctccccgtgggtcaaatgtcaggaatgcccacatctcagctattgcagacactctgtacctagattctcctcctattcctaaaaacattgccatgaaagagcacacaaagatggaattcagcttttcattcaaagcttcaaaaggcaatgaaagagaaatgaggatcatgggaggagggagatagcggaatgaaggtttcaatgatgtyccaaaatataaaacaaatcagcagaattctggtcattgttgctacactgatcacagttttgggtgatcataaaagatgaagagtagcatacctttttggaaatgcatgacagaacacttggcaggtattttcataataaaatttcactcatcaaatttactaaccaagtctattcagcattttcagacctcagctctcaatgtaatagtccctttatcgttgcggaaaaatccagtcaccagtcacagatgtcccactcattagtacagattcccagggtttttggtctaattaaaaaatctgagcaagcatgggagtttattcctgtaatctcagcactttgggaggcccgggtaggaggatcgcttgagcccagaagtttgagaccagcctgggcaacatagtgagacactgtctcaaaaaaaaaaatcagccagatgtggtggcacacacctgtggtcccagctactcaggaggctgagatggaaggatctcttcagcacaggaggttgaagctacagtgagccctgatcatgccactgtactccagcctagacaatagagtgagaccttgtctttaaaaaaaaaaaaatcagctgggtgccgtggctcatgcctgtaatcccagcactttgggaggccgaggtgggcggatcacctgatatcaggtgttcgtgaccagcctgaccaacacggagaaaccccatctctactaaaaatacaaaattagccgggcatggtggagcatgcctgtaatcccagctactcaggaggctgaagcagaagtatcacttgaacccaggaggcagaggttgcagtgagctgagattgcactccagcctgggcaacaagagcaaaactccatctcaaaaaaaaaaaaatcatctttagggatgccctttttcctaactcagttagttgcctgtccacttgccataaactatactgcactggccaaatgaattattttctggcttttcacagggcctacttttaattttaccaaagccatggctactttttctttcctaagaactcagatcattttttaatttattttctgctcaaatctcaagccaaacttctcaaggttttttttaacagggttcactaaaaagaagtaaatgttctttttcagaacttgtatgcatgaacaaaaactgaggtcacccaaataaatgtaagaaagaaataacttgtatcatatagtcatctcattcagaaaattaaagggaaaccaaaaaaaaaaaaaagaaagagaaaaaagagatcaaatgacccttgcctcagtcaccagtgctacgtattgttcaagacaaatccacagttcacatttcattggcaatactaatgtatcactat

SEQ ID NO: 715549 - DNA, 1508 bp, Homo sapiens
tcccaaagtgctgggattataggcttgagccaccgtgcccagccagcattggtaaatcttatgtataattttaaaattaaccaatacattcatttcctttggcaaagtataaaaagcataggatttgaatttggaagaccttggttcaagttctgcttctgccacttaatagtactgtgacctttgtgaggctctgtttccattttcattccccatcttggttgaggcttgtgagcttcaaatgagataatatatttaaaagcattttgtgaaccataaactgccacacaaatgttgattattgttaatattttatatttagtcttgctggtacaataaaaagttagtaataaatgccccatgagctgtcttaattccagagaagacatatgaactaatatacccagcttgggtcatcaaaaggtatatttatataagggttactgctaagcagtgacaatcacgggtgtgctaatttcatcctgggatctgcaagcagccttaggtggagaaaagaggaggcacagaacagagataaataaaggcttagtttctacacagccttgtgaaagactgtgttttaagggttgagttcaaccattaaggttgatggtgttttatagtatttattgatgcttaaaagtaaaatttatcaatttttaaaagaatagttttatgagtcaccaaatttataaatatggtcaaatgtgtattccacacttttcagagaaattatgtagctcttctggtaacagtgagagtcctttgcttacacagtcaacaacataggaaaagagattcagttttcctatggcaagtttcacatcctggaaaatgttttatcagttggatgctggggccatctctaggttagaaagtgtcaatgggaagtagttcaggttcagatatgggtaggatctgtgcttcctagtttggagaagggtttctgatgatgagttgggatttggttttcattcttctggcctcatagatgagtggccagtttcatttcattgattggctctatcttcagtttatgtgctcattctttccattggaaactcctttaactcttctgctgaaaatgttctctagggttcaactttagggaaatcttagcaaattttatttattactctagctattatgtttattttcataacagcttttctgaaggaggacatctaacacatctaggtgttcataatgtgagcctcatttgtattttcagagaaragttttatcttgagtttgaatgaactgtggaattagctgagttaagagactctcatttttgctatccatgaggcagaaaagtggtgtgaaggatatatgacttcagccaattgactactgaccagtctttctgttgtttaggccataggaaatagggcatttggagacaggtgctaaggaaatgagtagcacttttgtgtgtgtgtggttgtaggaaccactgtacaccctagaacactttattaagaccttactgcttatgtaattgaaaa

SEQ ID NO: 715550 - DNA, 1508 bp, Homo sapiens
tcccaaagtgctgggattataggcttgagccaccgtgcccagccagcattggtaaatcttatgtataattttaaaattaaccaatacattcatttcctttggcaaagtataaaaagcataggatttgaatttggaagaccttggttcaagttctgcttctgccacttaatagtactgtgacctttgtgaggctctgtttccattttcattccccatcttggttgaggcttgtgagcttcaaatgagataatatatttaaaagcattttgtgaaccataaactgccacacaaatgttgattattgttaatattttatatttagtcttgctggtacaataaaaagttagtaataaatgccccatgagctgtcttaattccagagaagacatatgaactaatatacccagcttgggtcatcaaaaggtatatttatataagggttactgctaagcagtgacaatcacgggtgtgctaatttcatcctgggatctgcaagcagccttaggtggagaaaagaggaggcacagaacagagataaataaaggcttagtttctacacagccttgtgaaagactgtgttttaagggttgagttcaaccattaaggttgatggtgttttatagtatttattgatgcttaaaagtaaaatttatcaatttttaaaagaatagttttatgagtcaccaaatttataaatatggtcaaatgtgtattccacacttttcagagaaattatgtagctcttctggtaacagtgagagtcctttgcttacacagtcaacaacataggaaaagagattcagttttcctatggcaagtttcacatcctggaaaatgttttatcagttggatgctggggccatctctaggttagaaagtgtcaatgggaagtagttcaggttcagatatgggtaggatctgtgcttcctagtttggagaagggtttctgatgatgagttgggatttggttttcattcttctggcctcatagatgagtggccagtttcatttcattgattggctctatcttcagtttatgtgctcattctttccattggaaactcctttaactcttctgctgaaaatgttctctagggttcaactttagggaaatcttagcaaattttatttattactctagctattatgtttattttcataacagcttttctgaaggaggacatctaacacatctaggtgttcataatgtgagcctcatttgtattttcagagaagagttttatcttgagtttgaatgaactgtggaattagctgagttaagagactctcatttttgctatccatgaggcagaaaagtggtgtgaaggatatatgacttcagccaattgactactgaccagtctttctrttgtttaggccataggaaatagggcatttggagacaggtgctaaggaaatgagtagcacttttgtgtgtgtgtggttgtaggaaccactgtacaccctagaacactttattaagaccttactgcttatgtaattgaaaa

SEQ ID NO: 715551 - DNA, 642 bp, Homo sapiens
atatttcctaaagcattgagtgcagtgtccaacacatagtaggcactcagtagtgaattgtatactgatttgcaagctggacttgttttcaacaaccattccttcctatgtttcttgttatagctcctctacctctttagggagctccacagggactcagttcaagtccctaattctcttagtgacagtacaccagggtggttaagagcataggttctgaagtcagacttcctggtttcagtttctgtctttgctatttgttagctrtctgaccttgagcagttagttagctttctgtgcctctgttttcttgtctataaaatgggataataggctgggcgcggtggctcacacctgtaatcccagcactttgggaggctgaggcgggtggatcatggggtcaagagattgagaccatcctggccaacatggtgaaaccctgtctctactaaaaatacaaaaattagccagacgtggtggtgcttgcacctgtagtcccagctactcaggaggctgaggcaggataattgcttgaacccaggaggcgggggttgcagtgagctgagattgcaccactgcactccagtttggcaacagagtgagactccgtctcaaaaaaaaaaatcataataatacctagca

SEQ ID NO: 715552 - DNA, 642 bp, Homo sapiens
atatttcctaaagcattgagtgcagtgtccaacacatagtaggcactcagtagtgaattgtatactgatttgcaagctggacttgttttcaacaaccattccttcctatgtttcttgttatagctcctctacctctttagggagctccacagggactcagttcaagtccctaattctcttagtgacagtacaccagggtggttaagagcataggttctgaagtcagacttcctggtttcagtttctgtctttgctatttgttagctgtctgaccttgagcagttagttagctttctgtgcctctgttttcttgtctataaaatgggataataggctgggcgcggtggctcacacctgtaatcccagcactttgggaggctgaggcgggtggatcatggggtcaagagattgagaccatcctggccaacrtggtgaaaccctgtctctactaaaaatacaaaaattagccagacgtggtggtgcttgcacctgtagtcccagctactcaggaggctgaggcaggataattgcttgaacccaggaggcgggggttgcagtgagctgagattgcaccactgcactccagtttggcaacagagtgagactccgtctcaaaaaaaaaaatcataataatacctagca

SEQ ID NO: 715553 - DNA, 642 bp, Homo sapiens
atatttcctaaagcattgagtgcagtgtccaacacatagtaggcactcagtagtgaattgtatactgatttgcaagctggacttgttttcaacaaccattccttcctatgtttcttgttatagctcctctacctctttagggagctccacagggactcagttcaagtccctaattctcttagtgacagtacaccagggtggttaagagcataggttctgaagtcagacttcctggtttcagtttctgtctttgctatttgttagctgtctgaccttgagcagttagttagctttctgtgcctctgttttcttgtctataaaatgggataataggctgggcgcggtggctcacacctgtaatcccagcactttgggaggctgaggcgggtggatcatggggtcaagagattgagaccatcctggccaacatggtgaaaccctgtctctactaaaaatacaaaaattagccagacgtggtggtgcttgcacctgtagtcccagctactcaggaggctgaggcaggataattgcttgaacccaggaggcgggggttgcagtgagctgagattgcrccactgcactccagtttggcaacagagtgagactccgtctcaaaaaaaaaaatcataataatacctagca

SEQ ID NO: 715554 - DNA, 2061 bp, Homo sapiens
taattatatagatatagatacattttgtatctatagatatgaaagattttgctagagcaaagttaacattattttggagaatcaactttgaagattgaaaagctcttcaggaactgcagtttacatagggtaacctgatttctaattttgttaattccttaaggtagattcctgaagtaactttaaggggaaattcttgtttttctagctaagatcttttcaaataattgatgatcactgaacataataaagttgtatttctataaacatattcactaattcagactttatagagtgccagtcagtttttgcctttactatcagccattaataatggaaacttcaaaggaagcttaacttcagtatgtggtcttaggcgcctcaccttcatctaagactataattaatagaactgttttattaaaaatgagctcttggaagacagatgcatacgtttgctgagctaaaggacaggagtctagctaacaatcataagcttgtgtctcctttgagaccttttattctgtagctcttagttcttgcctagagattgttatcactattattatcatcatcaaatattaaatattaatagtgctgtgctcagtgaacatcaagtaacaagctaagatttcttatcagtcttgcttggggaacctcaggttgccttgaggatttctgggaggctttcagtatataaaattcccatgcagttcagtgggaagaaaagtatttccctgtttttcatcacatttgtcatttgcttgcatgcctggtcctgtgtaataggtagcgttaaaattaaaataaattacttatcagtattcaaaattatctatacataaatgacatatgtaatacgtaattatctattaataaacacattattttttatgtaaaaaaattgcccttatccatatataaaaatagaaatcatcccttgttctgagtctggaccctcatgcaaaatttcataaagggctggtttaccccctggtaactgcaaaattatgctgtgctttttgaagggggttttcttctcatgagctggtatttataccagtaaattagcaatgttactttgcttgtatcttattagagctgcttatggacactcttatgggtttgagaataataagctaacaaattacttgtattttggctgagcgtggtggcttgtgcctgtaatcctagcactttgggaggccgaggtgagtggatcacttgaggtcaggagttcaaaaccagcctggccaacatggtgaaaccccacctctaccaaaaatacaaaaaaactagttgggcatgatggcacatgcctgtgatactcaggaggctgaggcaggagaatcacttgaactggggaggcagaggctgcagtgagccgagatcgtgctactgcactccagcctgggcaacagagcgagactctgtctcaaaaaaaaaaaaaaaatcacttgtatattattaaagtgtttaggattatacatacttgtccatttcttgctaaataaaagtgtcaaccacacagtgtccactgtgcctggacttgatactgtagtttggtttaagttttcttatgcatatacttttaactgagatttttttttggtccaacaagtaaagtctttgcagcatctttttataatctgtcactcatccagggtctccgcctcttctacatttttcttttcttaataaaaaaaaataaatctcttaattttgttctacctacattcctcttggcaatagctacaacatgtcttgggcatcttggcagaagaccaggttatattagataagccagggaaggcagtatttaactcatattttgggaatattgctgattagttctgaaagaagtatataaaatgctgcatgttgtagaatctttgctttgaactggagagaacagaaattcagctgaaagagtaagagtgtggctataaatcaaatctggaacatccctcagtgtttaattagagatgtatgtaagaggctggaggtaggggatggatggtgggaggtggggaaaggtagacttctggrtaaagattttac

SEQ ID NO: 715555 - DNA, 718 bp, Homo sapiens
taaaattttttccactcctcctttttacattatctttggaagcagtatttcctgagttttctagtggagaatttttttttagcctaaaaagttctgtataagaagcaggttaactatccctgattctttaatggtcttactgttttgtagtcccttgctgggttggaaagcttgtctgtcaagtttctccttttcatattacarggaaaacaatactatatcctcagctttgtgactcccctaagaacttgcagtcattttatgagttataattttaaaaatagtcatcagtcttcatgacatatcccttaaacaggtaaagagattttaatgaaaataaatattgagatccacatgtgatgttctcatcaatcatagcatattttcaacagtaatgatgcttctattgatcatgatgacagatattctgtgggggcagtgagaaagcttccattacagctcattttactttcggtgttttggttacttggcacatatagcttattaagtatttgattgtccctttgagacagcatgtctgtattaccccatccaccaaagcaaggctatcttgctctcttcttataggcaaggaagctgaagtgagagaggctgagaagtaactgatggagcacaaagcactgtccctgagcccctcaaggtttgcttaaccatggaactatgttccttgtcctctacctgaacacaagacagaaaa

SEQ ID NO: 715556 - DNA, 718 bp, Homo sapiens
taaaattttttccactcctcctttttacattatctttggaagcagtatttcctgagttttctagtggagaatttttttttagcctaaaaagttctgtataagaagcaggttaactatccctgattctttaatggtcttactgttttgtagtcccttgctgggttggaaagcttgtctgtcaagtttctccttttcatattacaaggaaaacaatactatatcctcagctttgtgactcccctaagaacttgcagtcattttatgagttataattttaaaaatagtcatcagtcttcatgacatatcccttaaacaggtaaagagattttaatgaaaataaatattgagatccacatgtgatgttctcatcaatcatagcatattttcaacagtaatgatgcttctattgatcatgatgacagatattctgtgggggcagtgagaaagcttccattacagctcattttactttcggtgttttggttacttggcacatatagcttattaagtatttgattgtccctttgagacagcatgtctgtattaccccatccaccaaagcaaggctatcttgctctcttcttataggcaaggaagctgaagtgagagaggctgagaagtaactgatggagcasaaagcactgtccctgagcccctcaaggtttgcttaaccatggaactatgttccttgtcctctacctgaacacaagacagaaaa

SEQ ID NO: 715557 - DNA, 1398 bp, Homo sapiens
tgctcacttcttgctcagttatttttcatattagtctcttgagtctccccccacctccagaaaaccttccaacagtgtaaagttttctgtgggaataaaaaatgggttgactgctgttattctaagcgggcacagtagtgctactagctccagaaataaaggactctttcattacctagtgctggtgccggctctgagttatctagcttttatttggagagccccatgaagcatgcaaaattcccactggacaaaaagacccaggctacccttagaaaaataaaaagcacatattgaacaatctgctggaaaccgtcagttgagttcctaaatggtacaggaaaacagaagccagtgaagatgtgacatgggatagtagtccatgtcacccacaatggaaaatatgaacattggaagaatttcctattctaaacaatgtggggtttaaaatacactctggagactctcctgaatgtacaggcttgtagctgctatttatagtgaccgatgtgtactttactgagatttttatcccaacaaaggaactgtatgtgatgtagggagttattaaaatggaaaataagccctcacattctaacctagtcattggtacacatctcaaatgcaatgtcaggtctcactaaaatagatcaactagaagtaagcccagtaaaaattataaaataccttaaaagaaatttaattttgaaaaatgtttaagtctacctacctggtaacttccatcatgctggcaaaacattagaagcttattcaaatggtgaatacatacaaatgatttataattaacaaattaagctgttcaatgtcagtgaatgtttttaaagttatttaaaaggtttaaaaaaaagttgtactctccagtacttaaaaactaagccatggaatgtagcttacatatttaacatgttaaccaaagactttatttataaataattcaaagttgtactttactaatgttcctgaataaatgattaaaaattcaaaaacagtctgcgttaatgcaggtttaggataggctaaaaactgattttccactgctgatgaatagtgctcattagatagcaaactagtggaaagaactgattttattcacaaaatatgcacatgattcctctttaacctgattcacagatgaatgagaatccacttacacagcccacttacacagccaccmcattggtccaacatgctcatgtttcatgccctgtggtactttcttgcagcaccatttagggacctttgggataataaaggtcaagaacttccttggaagacttgaaagcaactgaagtcatcatttctgtctgccagttccacctgaccaaatgacagctgcaaatgcagatctgtcactcctgctggccaatgagaaaacca

SEQ ID NO: 715558 - DNA, 1218 bp, Homo sapiens
aaggtttagcacctatcttatttactgaatgtgtgctttctttctcacatcatgatgtaatttactgagagtaagcaatgtaaatattactaaactatcagaaaaacaaacagcacatttactcacatggaaaaacaataatttttattcagtgtgaaataaaataattatgctgatcagtctaggaaacatctatgcaagtgcatttatacattatatgaaactgctactacttcaatgcagagacaacatcagtttctctgtaaacttcccagcctgttttattttgcatgacaaaagcaatcaccaagttgaaattttggaaagatatgtttcttaattatgctttgcttgatataaacatatatgaaatgcaaagtctagaaaataaaacttataaaatctgtagttttactggcaacagacataatgaaactgcaaaaattataacctagtcggtgaatgtaatttatagacatacgtcattatctttatcaattgaaatcatgtactacattaaattctactggcaataacacaaccaaaaaaggaaagtgaatggtggcaaaaatgtaaggaaaatactccagacagaatttataatgctgtataagcaaaaacacttagactttgtctataataatacctattattgatgtatggcagtgaccatgggcaaaacttgtaaataacctcacaagccattttcttcaccagcaatacagcaatctagtttcccgtaagcatctcaactattactgaaaaatagcctcctggcatttacaaagcagttgacttcatactttagtccgtgcatacataattagatagttatatttaaaatcaatatgcaatccttcaaaagacattatgcttttaaaaccttaactttaaattgatttttaactattttatgtgctttaaaattaacatgtaattcaaccccagatactctgagatggtgttagttgatatatgaatgtgctaaactttctcagtgttagcaacrtaaggttggtactcctacagtttctaacactatcattaattttatactgaatatagaagtacaatttcactttggtttaataaaaaggtgagcttgggataatgctgtgtgtttttactaatttaagctagactggagaaacagacttggaggagaaatacataaagggctgtatcttcaatactgaatattcttgtaagagggctctg

SEQ ID NO: 715559 - DNA, 1030 bp, Homo sapiens
tggacccaggtgatcttcctaccttggcctcctaaagtgctgggatttacaggcatgagccatcatgcccagcctgtgtcccactgttgaacttgccatctttggttcattgtctacaggcgacaaggggacgggcctgaggatttctgatcacagagtcttggttttaatctaggtgtaccacttactggctgttaacagtgtgtcttagttaattcctgagtttgtatcttatttttcagcataatttttaggaaaagcactttgtaaactatgaagtgctatagaatattggttatgatgagggcctcggacttactggtataatccagaccttctccatgggtttattttccttgtttagttgctgtgtttttgatttcttcttttttcacagtatgacttaccctccatcccatgccctcctccagagttctctactccctctcagatggcagctcttcaaatctttgtttatgtactgatgggacaaggctcaagcacccacttcttctctttcagctgttayatttgaacagctttctagatcatatttctctaggacttctatgtttaatagtgggcatttcaaggtttagttttgaatcaggttgacagggcagtggttttgttcttaataacaaaatcactttaggataattagaaccgtatagcaatttaaccttcaaatcacactacttttggctggtcacagtggctcatgcctgttatcttagcactttgggaagctgaggtgggaggatcactcaagcccaggagtttgagaccagcttggtcaacacagcaagaccctgtttctttaaaaaaaaaaaaaaaaaaaaaaaagtcaaatcacatgactttttatataatttacactgagtctaagtgaactattaatactataattctagtattttagtagaatagaaattgtcaaactatggcccatgggccaaatctgacctaccacttgtttttgtaaataaagttctttggaatgcagccatgcacatttgaaaaaaatata

SEQ ID NO: 715560 - DNA, 649 bp, Homo sapiens
tcatgctttctactcaacagtctatgttcatagccaccatcctattagtattgttttgatgaatagtgagtcatttaagaaaagaacgtatttctacagttgggatttcacttgtttatttagggtaggatggaacactttgaatttagattaaaaaatagaaataattagctgccttttactaaaaaactttgtttttatatttagggtgatttgggrggaatatttttaagtatgtaagaatgttgagtactgctgtttgctaactgtgaactctggtgttgtaatcttgttgtgagtctctggcacctcctcccaagagctccttgtttccctctcatgttttatttttctctttagcatttggtcatgcttattactgattacaacttcttgcttattatttctttcttccttcacgagattgaggagtggatttttgactgttttgttcaccactttatccccaacacctagaataatacttggtacctagtagatgctcggttttgttgagtgaacaaaggcagtaaaggccattgattgttggaaatagagatagtatctagctagcttcacacaaggggccttgcaagactaggccacagaacaggtaaattttcttagacacgaaaggaggaaggaggac

SEQ ID NO: 715561 - DNA, 1321 bp, Homo sapiens
ctttaaaattaccaagtggattttgtccgttaaccttcctttatagtgcacttcaaggactatactgttagaaacaagtcagcaatgtatgtcaggtaaagagtgtgtgctcattataagcctgccaataactcatatttgtacagtatttttttccaaaatatgtttgctacattgctcattcgatcttcaagacagcactgtaagagttaaattttataactaggtccagaaaagcttagaggtctttctggtatttaatccactaacgtaattctccaaaaacatatttgccgaatgaatgaagcagtaggaatactgagttggagttttaaggccttatttttttaaatcctagccttccaatttggtagtttggacaatattgggaaagtcagttaatatttctgaatctctgtttcctcatctatacacacaaaacaataatacttgatttacatgtttcttgtatggatttggtgaattagggaatgtgaataccattttttaggatctggcctatactacatgcttaatatgtatttgtggaataactgaacttacatcaaagtgttgcttgagaattgtctgcttcagaattagcttcaggttaatttgaagatttttaactttcttttacgtatttcatcattaaccatatttatatcctagctctgctctcctctgtggggagcaagggcattgcttcaccaatatggctctgagaaggattaaatattttgaagaataaattacacgtgcaattttaatctcatctgagaacacagcctcatcattgttacaaagactatattaagttatgtaatataagtagatgcatttcataatccaactcctctctgctactattagctgtctggaacactatattgagaatagttccaaggccaatctggtttaatagaaaagaaccccatgcatttttagcaataattacccttaatacaagacagcaagaagaacccttttgccccacccataataccccctcagttatagaaagaactttttttttgagacagtatctcactctggcaccgagactagagggcagtggcatgattaccrcttcctgcagcctcgatctcccacgttcaagttatcctcctacctcagcctcttgagtaactgggaccacaggtgcacactaccatgcccagcttattattattattatttgttgtagagacagggtctcactatgttgcccacactggttttgaacttctgttcaaagaacttttaagagcttgaataaaccacattaacagatatattatcttagagaggtaacccagca

SEQ ID NO: 715562 - DNA, 1332 bp, Homo sapiens
ggtaaacataatatatcacattgatgttcagaggaggaagattataatattaatcacttatttaattgcgactataatgttaattagtcacaaaggatcacagaaaaggtgaacttgatttacttgtgaaagaaaaggtcaaccttgtgtatatagaaagatatgagttggatgttctcttgggcgtgggagaactacaggacaaaagaaaaggtagaaatgtatatagacaatgaggaaaaaaaaactggttaagtaaaggcttagaaattagtgactttaaagattggttctgtgggagtggtaattctgaaatattttcaaggggaaagaataagaattagcatataataaatatctactatgttccaggtctttgcaaggtattttgcacatrccatctcattttaaagaaaaatattattgtacatacttaacagatgaagacactaaacttagagaaaatagcttgtctaaggacatggtgagtgagtggcaaagtggggatttgaacctacttctactgaactcatgttctttttattcctcatagtgtcttttattcgcccataaaggtgaaaagtcttccccttgggtcttacactattacgaatcatcctggtatactccaaatcctctatctgccgtaaatgaaataaaggaatatttaatgtcagtttttctcctccacacagaaataaacaattttccctaaattccaactcctcttatatttgaatataattctctcacttatttctataacaaaatgtaaattcttttaacttttttttttttttgagatagagtctggctctgtcacccaggctggagtgcactggcgcaatctcggctcactgcaacctccgcctcctgggttcaagctgttctcctgcctcagcctcccgagtagctgggactacaggcacacaccaccatgcctggctaatttcttttgtatttttaggagagatggggtatcaccgtattgcccaggttggtctcgaactcctgagctcaggcaatccacccgccttggcttcccaattaaaatttctttaaaggacataagctttatttcttcatccattatcttttcttttcactccgagaaaagaagttcttatagtaaatactgatttttgatgatgatgatgatggtgatgatgacaatgacaatagttaaataggacaatgaaaacaatttcaagtttttcattgttcaccaaactttgcacagcccctgatgcataatacactggagctctgggctgataaatacagtcctctaacaagttgaggttcttctcaggtcagatataactagcacat

SEQ ID NO: 715563 - DNA, 1359 bp, Homo sapiens
tcccttaccattttaaaatactttctttgtatttgtggttatattattttccttagtcgcaaagtatatattatttttgtcttcattagatctgtgagaagtttatcgatttcattttctattttaagaaccaagtgttctatttcttaccagtttttttgtgctctaagtaattttctaattttctttttagtgtttcattctttctgttttatttttattctgattgcattttttctaatatcttgatatatagactcaccttattttcattcttttagaaataaccatagtgccttaagtctattaattagtctctaaatatgtttgaaagtgtcccataaatataatatattacattcctattttatgactaagtgtttaattttatttcctttttatgcaattttttgaaaggctaggatgtatttagttttattccaaaacattagtttaaagctagttttagtttctagctttaaattactgtgttcagagaattttgcctttatgagttttgcattttaatatatactaattttttgtgacataataaatgataaaattttgtatagttccatgacgtgtgaaaagaagrcaaattttctttttgtgaagagaaaaagactgagcagttgtggctgcattacccacctcgagcagcagtcaggttctccacgtagaacccaggagtaggagactcagaatcgaatctcttctccctcctcactcctatgggattttttttgatcttcagccacattttcagctgtgtgagaaaccttatcatcaaacacaatggctagcaacgttaccaacaagacagatcctcgctccatgaactcccgtgtgttcactgggaatctcaacactcttgtggtcaagaaatctgatgtggaggcaatcttttcgaagtatggcaaaattgtggactcctctgttcataacggctttgccttctttcagtatgttaatgagagaaatgcccgggctgctgtagcaggagaggatggcagaatgattgctgaccaggttttagatattaacctggctccagtgccaaaagtgaaccgaggaaaagcaggtgtgaaacgatctgcagcacagatgtatggctcttctttcgacttagactatgactttcagtgggattattatgataggatgtacagtcacccagcacgtgtacctcctcctcctcctcctattgctcgggctgtagtgccctcgaaacgtcagtgtgtatcaggaaacaactcacgaagggaaaaagctggcttcaattctaagaatgggcagcggggatcttctaagtctggaaagttgaaagcagatgactcttcaggcaattaagaagga

SEQ ID NO: 715564 - DNA, 1359 bp, Homo sapiens
tcccttaccattttaaaatactttctttgtatttgtggttatattattttccttagtcgcaaagtatatattatttttgtcttcattagatctgtgagaagtttatcgatttcattttctattttaagaaccaagtgttctatttcttaccagtttttttgtgctctaagtaattttctaattttctttttagtgtttcattctttctgttttatttttattctgattgcattttttctaatatcttgatatatagactcaccttattttcattcttttagaaataaccatagtgccttaagtctattaattagtctctaaatatgtttgaaagtgtcccataaatataatatattacattcctattttatgactaagtgtttaattttatttcctttttatgcaattttttgaaaggctaggatgtatttagttttattccaaaacattagtttaaagctagttttagtttctagctttaaattactgtgttcagagaattttgcctttatgagttttgcattttaatatatactaattttttgtgacataataaatgataaaattttgtatagttccatgacgtgtgaaaagaaggcaaattttctttttgtgaagagaaaaagactgagcagttgtggctgcattacccacctcgagcagcagtcaggttctccacgtagaacccaggagtaggagactcagaatcgaatctcttctccctcctcactcctatgggaytttttttgatcttcagccacattttcagctgtgtgagaaaccttatcatcaaacacaatggctagcaacgttaccaacaagacagatcctcgctccatgaactcccgtgtgttcactgggaatctcaacactcttgtggtcaagaaatctgatgtggaggcaatcttttcgaagtatggcaaaattgtggactcctctgttcataacggctttgccttctttcagtatgttaatgagagaaatgcccgggctgctgtagcaggagaggatggcagaatgattgctgaccaggttttagatattaacctggctccagtgccaaaagtgaaccgaggaaaagcaggtgtgaaacgatctgcagcacagatgtatggctcttctttcgacttagactatgactttcagtgggattattatgataggatgtacagtcacccagcacgtgtacctcctcctcctcctcctattgctcgggctgtagtgccctcgaaacgtcagtgtgtatcaggaaacaactcacgaagggaaaaagctggcttcaattctaagaatgggcagcggggatcttctaagtctggaaagttgaaagcagatgactcttcaggcaattaagaagga

SEQ ID NO: 715565 - DNA, 1456 bp, Homo sapiens
tgcctcaactcacatttcaataaattaatcatcaagttccaataattttaattcccaaatatttatcacatcatttctcctttcttggtcccacctacatctttacaaactggtcaatacattcwtcatattttacctagttaatttagataccttctttgtactgtactgtaccactcaaacccatactccccaaggcccccagagaggtgtgacagcaacagaaattactactgctcaccaatatttcgaggtcttgtctctttttgcatgtagaaaaacttcaaccttttcagatctcttacacttaagtaggaccatatgacttctttgagcaatggtttttgtagggaagcaattatttacaggtggaggtaatgaaaagtctgtatgtgactttccgttctctattcccctgcatcatccaccaaaaagatggtgcaaaccggttagccagggtttgagtgaatatttaggtctgaagaccctacttcttccagccaaattgaagatttgtaggttaatttgttatctcaacttaaaagcctaccattactgatacaatgtctaaaacaaaattttgactatgtcacatgcctaaataaatcctccaatagtttgcttaccattcttgaactatggtccaataattttacacggtaaaataaggacttttataagttatcctccactcatcttcatctcatgctcagtgctttcactttatgctctaataatatactaagtgcttattctttttgtgtattcatatcttcacacacttttttttctgaaacagagtctcgctctgtcacccatgctggagtctcactctatcacccatgcctgatcacagtggtgtgatcatggctcaccgcagccttgacctcctgggcttaggtgatcttcccacctcagcctttggggcagctaggactaccggcgcccaccaacacatcagctaatttttgttgaggtgaggtttcaccatgttgcccagactgtttcaagtgatctatctgcctcggcctcctaaagtgctaggattacaggtgtgagccactgagcccagccgtatcttcatacttttgttcctacttttatctctaccttgagttcttgtcctcctactatttaattggataacttctgctcaaactttgagactccattcaggtgtcagcacctccaagaaagatttcttgaacttcaagctgattataaacttctccagggaatgtgtgatatttatctttttaatccccatcttctatcacattgccttttacttaaaaggcacctcaattgatgtttcttgaactctcttcacaaaataattccaagacaaataatcaaaagccttaatcaaatgaaagatttaatcattttaatcaatgaggttttctccacaagactagatacatcatttttaattcacaaacgaattgatcatcat

SEQ ID NO: 715566 - DNA, 1456 bp, Homo sapiens
tgcctcaactcacatttcaataaattaatcatcaagttccaataattttaattcccaaatatttatcacatcatttctcctttcttggtcccacctacatctttacaaactggtcaatacattcttcatattttacctagttaatttagataccttctttgtactgtactgtaccactcaaacccatactccccaaggcccccagagaggtgtgacagcaacagaaattactactgctcaccaatatttcgaggtcttgtctctttttgcatgtagaaaaacttcaaccttttcagatctcttacacttaagtaggaccatatgacttctttgagcaatggtttttgtagggaagcaattatttacaggtggaggtaatgaaaagtctgtatgtgactttccgttctctattcccctgcatcatccaccaaaaagatggtgcaaaccggttagccagggtttgagtgaatatttaggtctgaagaccctacttcttccagccaaattgaagatttgtaggttaatttgttatctcaacttaaaagcctaccattactgatacaatgtctaaaacaaaattttgactatgtcacatgcctaaataaatcctccaatagtttgcttaccattcttgaactatggtccaataattttacacggtaaaataaggacttttataagttatcctccactcatcttcatctcatgctcagtgctttcactttatgctctaataatatactaagtgcttattctttttgtgtattcatatcttcacacacttttttttctgaaacagagtctcgctctgtcacccatgctggagtctcactctatcacccatgcctgatcacagtggtgtgatcatggctcaccgcagccttgacctcctgggcttaggtgatcttcccacctcagcctttggggcagctaggactaccggcgcccaccaacacatcagctaatttttgttgaggtgaggtttcaccatgttgcccagactgtttcaagtgatctatctgcctcggcctcctaaagtgctaggattacaggtgtgagccactgagcccagccgtatcttcatacttttgttcctacttttatctctaccttgagttcttgtcctcctactatttaattggataacttctgctcaaactttgagactccattcaggtgtcagcacctccmagaaagatttcttgaacttcaagctgattataaacttctccagggaatgtgtgatatttatctttttaatccccatcttctatcacattgccttttacttaaaaggcacctcaattgatgtttcttgaactctcttcacaaaataattccaagacaaataatcaaaagccttaatcaaatgaaagatttaatcattttaatcaatgaggttttctccacaagactagatacatcatttttaattcacaaacgaattgatcatcat

SEQ ID NO: 715567 - DNA, 1456 bp, Homo sapiens
tgcctcaactcacatttcaataaattaatcatcaagttccaataattttaattcccaaatatttatcacatcatttctcctttcttggtcccacctacatctttacaaactggtcaatacattcttcatattttacctagttaatttagataccttctttgtactgtactgtaccactcaaacccatactccccaaggcccccagagaggtgtgacagcaacagaaattactactgctcaccaatatttcgaggtcttgtctctttttgcatgtagaaaaacttcaaccttttcagatctcttacacttaagtaggaccatatgacttctttgagcaatggtttttgtagggaagcaattatttacaggtggaggtaatgaaaagtctgtatgtgactttccgttctctattcccctgcatcatccaccaaaaagatggtgcaaaccggttagccagggtttgagtgaatatttaggtctgaagaccctacttcttccagccaaattgaagatttgtaggttaatttgttatctcaacttaaaagcctaccattactgatacaatgtctaaaacaaaattttgactatgtcacatgcctaaataaatcctccaatagtttgcttaccattcttgaactatggtccaataattttacacggtaaaataaggacttttataagttatcctccactcatcttcatctcatgctcagtgctttcactttatgctctaataatatactaagtgcttattctttttgtgtattcatatcttcacacacttttttttctgaaacagagtctcgctctgtcacccatgctggagtctcactctatcacccatgcctgatcacagtggtgtgatcatggctcaccgcagccttgacctcctgggcttaggtgatcttcccacctcagcctttggggcagctaggactaccggcgcccaccaacacatcagctaatttttgttgaggtgaggtttcaccatgttgcccagactgtttcaagtgatctatctgcctcggcctcctaaagtgctaggattacaggtgtgagccactgagcccagccgtatcttcatacttttgttcctacttttatctctaccttgagttcttgtcctcctactatttaattggataacttctgctcaaactttgagactccattcaggtgtcagcacctccaagaaagatttcttgaacttcaagctgattataaacttctccagggaatgtgtgatatttatctttttaatccccatcttctatcacattgccttttacttaaaaggcacctcaattgatgtttcttgaactctcttcacaaaataattccaagacaaataatcaaaagcyttaatcaaatgaaagatttaatcattttaatcaatgaggttttctccacaagactagatacatcatttttaattcacaaacgaattgatcatcat

SEQ ID NO: 715568 - DNA, 1566 bp, Homo sapiens
taaatgtttctcccgtcacttggtaaaggctcccttctgctccttacccttatttataggtgacccttgatctgctccccactaataaattagctcatattttgtagaactttatatgaatgaaagcatatagtttatcttcttttatacctggcttatttcactcagcataattattttgagatttttatcttcaataagaggcattataaaagagaaaaagtgaaaaatcacaatacaaacggtacaaaaataaacataaaagcttatgagagaatattttgaaattacatctcataaaaattgcaaatatagattaaattttaattttacagaagtatctcaaagtaatgagaaatctgaaacaatttgtttaagagtggattgttagttaagtggttaattttatttctctatgtcagcaaagagcaattcaaaattgaaatagaaaacagctattcacaatagtttcaagaatataaagaatttagggataaatcaaacaaactatgaataagctctgtacactgaaactacaaagcactgctgagagaaagtaaagatgacataaataatgaataataaatactgtgctcatgggttgaaagatttaatattgctaagatgttattttccctaaatcatctatagattcaatataatccaaataaaaatcccaataagctgtgttgtgtacattgtcaaactattcataagatttatatagaaattaaatggatttagaaaagacaaagcaattttggaaaatgagaataaaattgagaacttagactatctgattccaagatttactagaaagcttcattaatcaaaacagcatgacattggcataaagaaagaagcatatatcaattgaagagaagagtctagaaatagacccaaatagatgtggtcaattgattttcaagcatgccagtttagttcagtaacatatagtgctggagcagttggcttgtcatatgcaaaagtgtgaaccacaaacttgacttgacactgtactcaaaagtcagttcaaagtatatgtactttgaacacaaaaatataaatgaaaacatgttcaccaaagccttctattttaaagttcccagtattttgttcaagatagtcgaaaactggaaaccacccaaatgcctatcaacaggtgaattcrtaaacaaactgtggtagatacctacaatgaaatattactcagcaattttaaaaaaccagttgaatacatccaacaacgtgggtgagtctcgaaagtattatgtcaagtgaaaggagccgtacaggaaagagtaaataatttattatgtttgtgtcgaattctagaaatagcaaacttacaatgatagaagcagagcagtggtaccagagtccaggtagagggaggaaatgactgcaaaggagcatttttctataatacacctgtggtggttgtaatgctacttgataagtttattgcaattgtaacgtcaaaattggtgaattgtattgtacataaattatagatcataaaatcgttaaaaaagtatcttgtcatacagactcagatactttgaa

SEQ ID NO: 715569 - DNA, 643 bp, Homo sapiens
tgaagtatgttatcagacattaataagtcaaagctgtgtctcaaaggccacaaaaataggaaatcaatgcaaaactaatagctcattgactgagaaagagaatatgctacagttataccaatatatagggattagaggtcagagaaccaaagggtggaagtaggagtgaccctgtcttcttccaaagcactttagagatatcctgaatgctgataaggggggggcacaaaactgtgtactcctgcatcaaccagtcattagattttggctaaccctaagaagagggcaaacacctgggcaaagcagctgcttcctgctgaaggcagagcctaatgagtgactcagaggtgagcctttagccgtcaagagtcccggtagatgaagaaatgaataccttgacccagaaaatgtgatcttgaacagtactccatagtattcactacaatgatttagaataaaatattacaatcatttatttatatgctaaaaggtaagaatgaagggaatataaaaacagcaggctggacaaacaggaacaaatagccagtgggtggaattgaactgaaatacgtgatggttatattaagtggaaattggcsaaagtccaagatagatactattaaactggaaagaaataaaaaac

SEQ ID NO: 715570 - DNA, 895 bp, Homo sapiens
caagaagatgcaacaaatagcttaagggtgttcattaaatacaccatcatcatcctttcttgagcatttaccacgtgcccagagctctgcaactgttttaacactcattatttaatttaaagctcatcgcagccctaagatgccattagtgctaccattttctagatgagagttgagaatttgagagagactcaataacacgcccaaggtcacccagcctcagagctggcgtttgcaagctctgtccttaaatcagggtacacaccaggctgcctccctgaaatcaaactgagaaacttaatcagctcaaaagccatttgttttgagtccattccactacttgaaaattccttatattccacgggagccaaaatcaaattgtcacagaaaaacaagccaagagattggtatctccaaccaccccggctgaggctgggacaacaccgattccagtaaatccactgtgatccttccacccatccatccattcaccaacctctggctgatgccccacatggcaggctctgctggctgccagagaccagagagggtgagatacccacaaggagaccgccaggcaaacacaggggcagactggacccccagcaccttccatgtacaggcttggcgtcctccagaaataatcaaaaccctttgcagttcaggatccaaagaagcatcaaaggggggtgaaaaatgaaacaggaccttgccattggcacccagggcaagcccatcttccccgtgaaacacttagttttcctgatgctgaactgggacttggcaatccaccccataaggtccaygtgcaacactggaccagtccattttagtggatgctctggcatttcacccaggccttaggcccaagatggcaagggagggttgaacaaag

SEQ ID NO: 715571 - DNA, 613 bp, Homo sapiens
tcagccggacgaagtggcggatgcctgtaatcccagctactcgggaggctgaggtaggagaattgcttgaacccaggaggtagaggttgcagtgagccaagattgccccactgcactccagcctgggcaacaagagtgaaactgtctcaaaataaaaaagagactaacacagggtaataacctttcccccacatcccagaggtctaactgaagagaggaaataaggccatgataccaaaaattatcaaagatccaaaagaacttctctcgcccttcatcattctcctaagctagtaataaagtcataaagaagtcttattttagaaattattgtgggctgggcacagtggctcacgcctgtaatccyagcactttgggaggccaaggcaggtggatcacttgaggtcaggtgaaactgaccaatatggtgaaactccatttctactaaaaatacaaaaattagctgggcgcagtggcatggtcctgtaatcccagctacttgggaggcagagacaggagaactgcttgaacccagaaggcagaggttgcagtaagctgagattgcaccactgtactccaagcctggacgacaatgtgagactgtctcaaaaaa

SEQ ID NO: 715572 - DNA, 597 bp, Homo sapiens
agttaattcatgtactagataaaataaatcaatagtgcaaaggaaaaggcatttctaaataaaaaaacttctttcttaattttactataataatagctttgggcttctgtatttcaacaatttcgatttatcaaaatccacatattttgaattttagatagattttgtattatgactattaattgcctctaattactattttctattcttttttttttttttttttgaggtggagtctcactctgtcacccaggctggagtgcaacagctcactgcaacctccaactcccgggttcaagcaactctcctgcctcagccttccaaacagctgggactacaggcacccacmaccatgcccagctaatttttgtgtttttagtagagacggggtttcaccatgttggccaggctggtctcgatctcctgaccttgtgatccacccgcctcggcctccctaagtgctgggattacaggtgtgagccatcacgcctggcctactgtttaattttctaacaaagttttaaatttatttaatctgattctgccttacttcccaaagcaatctttttgctatgttgttttcaatatacagaagct

SEQ ID NO: 715573 - DNA, 567 bp, Homo sapiens
cagattttctttaaaaaatttcctaagtacttcgaaaagactgctcaatgaagctttcatttgaagcattttaaacaatcacatatcatacatacataccaaacaaattttcaaataatgccagctccttcttccaaagtaatattcatcaatttccccacttgactgttctgtctattcaatacaattatggagatttgaaatacacaatagatattgattcagtctctcacataaagttcatttgaaaataagaacttgggagggcattttgagtaaaatcatttacataaaaaataaaatcctggaataaagcttggatttcatcttaaaagaagattaaaaaaaaaaaacataaaattaaagaagcaactattttatacaggaaattytaatagaatctcccctttatgctaatcaaaataattagtgtttctattattcctttggaatctcactataaggctcttcactaaagaaaggaattcaatgctttaaaaatgattagcatttatattattacaggagcaatacactagaacattatttcctacaaatttagaattc

SEQ ID NO: 715574 - DNA, 1287 bp, Homo sapiens
tttccaccgtgctgtgcattgtgtggctttatgctctggctttacatagggcctccacacctgccctaccccacttcagaaggtccaggcttttccactaaaggctggctgggaaagagcgactccagtcctcaagttctctttacaccctctgggcagagaaagaggacacattctcattcatgatcaccagggaaatagatgagttgattagcctaagccaatcagacttcaccctggtccgtccctatcaaagatgctggctgctacccaacagagaagcagtgaattccctagaggaaaatctgggtacttttagtagaagaatgggtaaagtggatgccaaagaggctaccaccaattgttactaacattttattaaaaatgtggtaatatacaagaacacacagatgataagggaaggaaggaaataattaaaatgaactattcagaacactgactacttcttggaggtgagtataagattataagctgggagtggttaaaaagaggcattaatagattgttttactcctatttttataagactagaacagtgctatttttagaggtatcactgaatgtcaagtgcccaacccatacctaatgggttctattaggtgtaaaaatgtgattgaatgaactggattgatttttaaactgttgattaaaaaaataaagatgttcatcctgggtacttcaactctcctttcttcccaatatatataaacctttacactgaattactgtaactttaaaaaaatgttataaattaaagtatccaataccagtatctgatttttttcccatttaatttcatatttctcaggtaaagatatctattttttggagcctgaagcctagaaatagcaaaaccatgcagttgctgttcaccggacactccgggtccagggggtgtgcagctctgtgcctgagcagtccccaggcatgtggggcttttctaaaagtggatacagcggctgtcgcccactgatcctctgtgctgagtgacccagattggcacagcgcagctgggtcctacccagggcgagtacgggaaagaggagtaaaaataaaaactggttgggcagcttaggtggagtcaggatacttgaaagctcacaggttactttgctaattmttgggcagatttttccttttttcttttttgaggggatagtgatgattccaatgacagttttctagatttcttggatttgacaaaatagtttcatacagaacagcaaaatgaagtatgtagaaaatatgttttttgagattagaaca

SEQ ID NO: 715575 - DNA, 889 bp, Homo sapiens
ctgggaagtccaaggttaaggggctgcatatagtgaggggcgttcttgctagtggagacgctgcagaatcccaagatgttgcggggcatcacatggcaagaagggctcactagagacggccaaactggttttggtaagagacccactcttgtgataactgacccactcccttggtaacccattaatccattaattcatgaatgaattaatccaatcatgagggcagaatgctcatgaccaaatcacctcccaaaggttctatttttcaacactgctgcactggggaccaagttttcaacacatgaattctggggtacacacttaagtcatagcacttgggttgagtcttgaaaaattagcaagcattgtcagttggatggggcagtaagggtgaggagaggtgacagcaatggctagacctcgaagggaacatgagcagaggcatggaggtgtgtggtagcagagtgcacttgggaagcagcagagctgggacatagcacatggagagtgctgctggaagaagacacactgggtcacatcagcagaggccttgtgtgccatgcctgagggtttggtgytggaactaaatgggctgggctcagagtcagcctgaatcgcaaacttggctctgccatttactaatgctatgactgtgggggaagttatttggcctctctgtgctttacctcttaatctgtgaaatggtgagggtatttttagcacctaccttgtgaattgtgattaggattaaataaattaatatactcagtgcttgatataaagtcaagtgctcaataagttttggctgctgttagtattttttaatggagtttagattttatctgtaagcaatggggtatgacttaaaagtaagaaagggatgtgatta

SEQ ID NO: 715576 - DNA, 1338 bp, Homo sapiens
tttttttttaaaggatagctaggatatttgcagtcttgtgatgtatggaatcccagtcattagcgcatggcattgtcttatctcctattgctgtcacttgaccgctgatgtgggagtgactgaaattagctttagcaaaacttggggcatcactctaaagagtgaggttaactgaagcaccgtcctaaggctaggtgttctggaagcatctgtagccaaaatcaagagtatgggaagttccaagccttcctcctagtaagtaagctaagtattgtgggtaaaaacacttatttacagctaataagatgatctcactgacatgtttttattgctaaagtcttttacttgggctaaaaggaagatgccaaattgttggaagtcgaattagcttcctggttgaccaaatcagtctcctgtctccagttgagcatcacacagaggttttttattagagcaaccatgatgactcggaggttttgagcagcattcagaggcaaggcctctgggaggcagtggtgcagcatgtttgcctttaaaagctgactgttctccttttgctgaatcttgtttagagaacattctagtttgtgttatgtttgaaagagctcgatwctttgtcctttagtttcaattcaacctatcagatttatcgagcgcctattctgctacacagaatgcctactggacaaaacactgaagccgattgaaagaaaagttgaggttttataggttgactccaaagatgctaatgttaatttggaaggcatttaatttttgactaagggaatgttatgaccccctacatggaccacttctgaaacattaagtgctagtagactatttacagaatgatttccatggaagagctcaagcagccctaaaggatggtgctatcccattttaacatttcatctaattagcctagaaaatgaaaaacacttactggtcaatgaatactaagttgaggatccagttagatagaagcgaaaaagttctgctagttggagtttaagttgatcttctggggtaagagatcttactcttctattagtaccagagagcaagcttaaacttcagttcatgtacagaaatgcaaagctactagaattggaaataggtttctgatggtctgtctggttttgctcgttatgggaaatcagtgtttctatagtgttagtaccctactctttaactgggaagtcctaacttatttattatatttttattttttagagacaaggtctcaaacttctgagctcaagtgatcctcctgcctcagcctccctagtagctgggattataggtgcaagccactgaccctggctcaagaaatcataa

SEQ ID NO: 715577 - DNA, 1338 bp, Homo sapiens
tttttttttaaaggatagctaggatatttgcagtcttgtgatgtatggaatcccagtcattagcgcatggcattgtcttatctcctattgctgtcacttgaccgctgatgtgggagtgactgaaattagctttagcaaaacttggggcatcactctaaagagtgaggttaactgaagcaccgtcctaaggctaggtgttctggaagcatctgtagccaaaatcaagagtatgggaagttccaagccttcctcctagtaagtaagctaagtattgtgggtaaaaacacttatttacagctaataagatgatctcactgacatgtttttattgctaaagtcttttacttgggctaaaaggaagatgccaaattgttggaagtcgaattagcttcctggttgaccaaatcagtctcctgtctccagttgagcatcacacagaggttttttattagagcaaccatgatgactcggaggttttgagcagcattcagaggcaaggcctctgggaggcagtggtgcagcatgtttgcctttaaaagctgactgttctccttttgctgaatcttgtttagagaacattctagtttgtgttatgtttgaaagagctcgatactttgtcctttagtttcaattcaacctatcagatttatcgagcgcctattctgctacacagaatgcctactggacaaaacactgaagccgattgaaagaaaagttgaggttttataggttgactccaaagatgctaatgttaatttggaaggcatttaatttttgactaagggaatgttatgaccccctacatggaccacttctgaaacattaagtgctagtagactatttacagaatgatttccatggaagagctcaagcagccctaaaggatggtgctatcccattttaacatttcatctaattagcctagaaaatgaaaaacacttactggtcaatgaatactaagttgaggatccagttagayagaagcgaaaaagttctgctagttggagtttaagttgatcttctggggtaagagatcttactcttctattagtaccagagagcaagcttaaacttcagttcatgtacagaaatgcaaagctactagaattggaaataggtttctgatggtctgtctggttttgctcgttatgggaaatcagtgtttctatagtgttagtaccctactctttaactgggaagtcctaacttatttattatatttttattttttagagacaaggtctcaaacttctgagctcaagtgatcctcctgcctcagcctccctagtagctgggattataggtgcaagccactgaccctggctcaagaaatcataa

SEQ ID NO: 715578 - DNA, 596 bp, Homo sapiens
gggatttcctttcagggcaccacactgcgctaattccactgttcgttctaccccatgccttcctgtctttcagattcctttctaattttgcatgtaatatgtcctcaaacaatctttgtctgaaagggtatttaattgatagtttgcctagttgtagaattgaaggttcaaaatcattttctctctgatcccattgayctctagcatctatgctgttgtaaattctgatgcaaatgcaaattctgatgctaatgcgattcccttttcttgcaagtgacctctttttttattttctggaagctaagatcttatcattggccttccgaaatttcataagggtattttaggatgtcctgccttccagacaaagacctgtattttccaacagcggttattttctccattttctaggactctgaatgatgacggctgggcctcctggcttgaccctctatggagactctgctgctgatctctgttgggccacttttaggttgtgacttctttgatctggtttagtcattagttcagtataatcctcttcccattttccaacacaaatctctgaccctgatgaactctttgtcatgttgata

SEQ ID NO: 715579 - DNA, 596 bp, Homo sapiens
gggatttcctttcagggcaccacactgcgctaattccactgttcgttctaccccatgccttcctgtctttcagattcctttctaattttgcatgtaatatgtcctcaaacaatctttgtctgaaagggtatttaattgatagtttgcctagttgtagaattgaaggttcaaaatcattttctctctgatcccattgacctctagcatctatgctgttgtaaattctgatgcaaatgcaaattctgatgctaatgcgattcccttttcttgcaagtgacctctttttttattttctggaagctaagatcttatcattggccttccgaaatttcataagggtattttaggatgtcctgccttccagacaaagacctgtattttccaacagcggttattttctccattttctaggactctgaatgatgacggctgggcctcctggcttgaccctctatggagactctgctgctgatctctgytgggccacttttaggttgtgacttctttgatctggtttagtcattagttcagtataatcctcttcccattttccaacacaaatctctgaccctgatgaactctttgtcatgttgata

SEQ ID NO: 715580 - DNA, 599 bp, Homo sapiens
gggcacagcgtggcgaggctgtggctgccacctcagagccgtggctgaggagctcagcccctcctcccactctgtccagagctctctgttgacaagtcgatggttctcctctaggtccaatgtgggcctctgcagctgtggagagagctcacaagcacggctcacatcactgagggtttattcagagctcagcgctaggctgagccctttacatagtgtggccatatgcccccatttgcctgggacaatcctgggttactaatacaatgatcaacagtgcctccttttactctcgagtgtcccggtctggaagataactatatatttgccttaactctacaagcataaytgaatccctacaatgcactacaagaagagcactgctaatagtgtcattttctgatgaagaaacaggctcagagaagataagtaacttgcccaaggtcacacgattagcaagtggcagacccagaaacataggaattcagctcttgacttcaaagcctctttgctttgccacaacatcagatttcctgttctaaaatccattgcttcatgctttgaaggaccgagaagctgctatctccaaatactagaaa

SEQ ID NO: 715581 - DNA, 629 bp, Homo sapiens
atgtgtataattattatttgtcaatttaaaaagtaaattttttaaaaataataatttcattgtaagagctttggtaatactatgagaaataaggaagatgattcctgtgtaaactttatttttaagttatttttcccattcaattcttaaataatatttttaataatattatcacctaaaatgataaaatgtataaaggtagtgataattataaaacayaggaatatataatattactatagtgttatgaataaaggaccatgacaatttatatatcaaaaattatattttcaactacagggagctagggttctttgaacagatgccatttgaactgaaatttgaaagtgagtagaatttagcagcacagacataaagtatctaccaattcagatgattagtgagtactacctatgtgttacaggatgctcaagaggtcttttcctgttatcctggaattgcaggtaagtcccaaagtaagaaaaagaactggacattctgaagaagcccaccaaccagacactccctgaaaagcttagtaaggcagcagagccagtcatcaactttcattgccatcctgtgccactcttcttccttttcacagccacatacagggagaggaatgcaaa

SEQ ID NO: 715582 - DNA, 1260 bp, Homo sapiens
taaagggggaactccaaaggattcaatcacctcccaccaggcctcttttccaacactgaagattacaatttgacatgggatttgggtggggacacagagtcaaaccatatcagaggacttggagattcccagaaggaaaacaatcagccagggyaggaaattaataaaatactcccctcccctagtgaattttactatccaggaaggaaaaggattgggttttccatgggcagacacagagatagactttgaaatacaaaattagggctcaattcttgtgagacaaagaaaagaggaagcaggattggccagaggaagaatttgagtgtcatgtatgcctgacgatgcttgggccaacctgtcatggagcttcaaggtattattggtcagagtgacccatgccagagtgaagtgtctgggcctttctagccagggcttactcagtcacagaatgtgtctcagtcacagaatgtcctaaaaaggccatgatcttgggtgaggcttcctctcacaccttctcttggatcactcagtttgaggaagccaattgccatgttgtgaggtagcccactggagaggctcacattgtgaagaacctgagggaccacatcagtaagcttggaagtagcccctctacaccaacacacacaatagacctttcagatacacttgcagcccccaggtgatagctgaactacaatcctggacaggacttgagtgagaggcaccagcgaagccatgtgctaattcatgatgcacataaatttgagataaaattcttgttttataagctgctaaattctggggatagcttgtaagcagcagtagatgactaatcagttgaggcaaccccaaggcagcaagtccttacttgaaggaggatttgggtggcacatctctatatctgtcatagtctacctgttttgtcatttgtatacacatatatttgagtaacagctcctccaggattctggtgggccacttttccttaggggaaatagaaaagaaggaaattagcagaactaactacagttgctctgctatggttgatctcaggaccaatattgctatttactttatttctcctatactagtcattttaggtcctgcaccatcaggcactatgtctgctgtccttggtcatgtgtctggtagcattactcagactgtcctccccaagaagtctgatctatggttaccatgtcctcctcatgcctgcactgctggatctgtccatttacacttacagttgggcaaggg

SEQ ID NO: 715583 - DNA, 2137 bp, Homo sapiens
gccgggcccagagcaggcccctggctggtgtgtattgaatggagcagaccccaycttcagtcacgtgtttggtccgaatctgatgcttctagatccatcagacagcagctggttgaccccagtgcctgagctgaaactgagcctgtatcaagaatcaggtgatttcatctgtgaggaaaagaaaaagagcttggggcctggcaggacctgataccttctctgattatttgcctaaacgaagactttctttaatgaaggcatgacttctagtcaccatgaaccattttaggtttgaggaggacatgaaacagctattacattttacagagcagtttcttaatctggtttattttttatgttttggcttgtgctcataagccattaattgctgtgccgaaagccagggtgacgttagcaacctaccacttgggaggtgatgagaagaaaaggagctgtgagctgattttctgagtatgagttgagtctgtcagctttgacctttccaatccaactcaatgcctattcaacaaaaaccctgacatttcaaaaggcagcacatccagcccacatctttatgttacaggccgaccacttttcagagccttctttcttcagagctatagccaaaaaagtagcttggcatttctgatacttctgttccctagctttctgaaaaatgaaggggagacaggcaagataaaagtgtctgttcgctgatgtccattcgcctaaatggacctgcgtttgctggtgggtgttgatgtgtcgcacacagctttattttgcgttgaaaaggagaggaccgcaggtgtcgggaagcaagatgagacaggtggaaacccacttcggtacacctatttttagctcagattctatttaagtggaagtgataacttcaaggtaactggcaagacaaaatgagtctgtttgcacagtaattgttttgcccaaaaaaggaacgaacatccttaaggtaatccaaaggctgagtgaagggaaaaatcaaaacaggttactgagagaagaacctctgtaggaggtttaaagaaattagcacagccagaaaaaatacagtgatgaaagtgaggctccggttgatcagaggagccatcgaccgctttgctggctttccctctcctatggcggctcctggggttctcagcaccccagcagggagaggtcactagtacggggggctggacagtgctggagtgtatcaccacatgcagaccaccctgaaaatcctgaaacccacttcttgaccacaggcctctaaccttctgggtccctttgccctcagtctgatcatacctgtgctttgacctcttagagatgtgccccttccctttatacctgtcacccccacctccatcttcaccctcttccctcactggcaccctcttccctcatggcggttggctgaactaaggtcttgccaaaccctcaacccccttgtccctgggtcaactgtactatcttccctctactggaaaatgccctcgtgatgcaggtggcagtgctgggcacagctctgcccagctctctcctctctactaggtgaaggaccacaggagagcagaagtctcgtctgtctgatgacctccctcagtctggcccagagcaggtgctcagtaagtgtgtgtcaaaggaatattccccttgccatatgaagtgggtgtcggggcagaatttaggagttctttggtctcggcacgtttgctgtgtgatatggaataactctccagtccatctttttctaagttttcttgagtacatgagggaagggggcagtggcccaaggtgggagttaatggtcctggacaggccacggaccacctggaagacaacagtcactgagcatgtattgaatcctatgtaggcaagaggctgaggtgggctatgcagactataaggccccaaccctccctcctgcccctcccatccccaaggctcccttcttggctctgccttggattctctggtgactctagcaagttactttttttccttgaacttccgtgtttttctcaatgagacagagagttccaccgggtcatcttgggggtcccttttggctctgacaccccattactcaagtcccatcatgctgacgggtggtcggagctttttcctggga

SEQ ID NO: 715584 - DNA, 2137 bp, Homo sapiens
gccgggcccagagcaggcccctggctggtgtgtattgaatggagcagaccccatcttcagtcacgtgtttggtccgaatctgatgcttctagatccatcagacagcagctggttgaccccagtgcctgagctgaaactgagcctgtatcaagaatcaggtgatttcatctgtgaggaaaagaaaaagagcttggggcctggcaggacctgataccttctctgattatttgcctaaacgaagactttctttaatgaaggcatgacttctagtcaccatgaaccattttaggtttgaggaggacatgaaacagctattacattttacagagcagtttcttaatctggtttattttttwtgttttggcttgtgctcataagccattaattgctgtgccgaaagccagggtgacgttagcaacctaccacttgggaggtgatgagaagaaaaggagctgtgagctgattttctgagtatgagttgagtctgtcagctttgacctttccaatccaactcaatgcctattcaacaaaaaccctgacatttcaaaaggcagcacatccagcccacatctttatgttacaggccgaccacttttcagagccttctttcttcagagctatagccaaaaaagtagcttggcatttctgatacttctgttccctagctttctgaaaaatgaaggggagacaggcaagataaaagtgtctgttcgctgatgtccattcgcctaaatggacctgcgtttgctggtgggtgttgatgtgtcgcacacagctttattttgcgttgaaaaggagaggaccgcaggtgtcgggaagcaagatgagacaggtggaaacccacttcggtacacctatttttagctcagattctatttaagtggaagtgataacttcaaggtaactggcaagacaaaatgagtctgtttgcacagtaattgttttgcccaaaaaaggaacgaacatccttaaggtaatccaaaggctgagtgaagggaaaaatcaaaacaggttactgagagaagaacctctgtaggaggtttaaagaaattagcacagccagaaaaaatacagtgatgaaagtgaggctccggttgatcagaggagccatcgaccgctttgctggctttccctctcctatggcggctcctggggttctcagcaccccagcagggagaggtcactagtacggggggctggacagtgctggagtgtatcaccacatgcagaccaccctgaaaatcctgaaacccacttcttgaccacaggcctctaaccttctgggtccctttgccctcagtctgatcatacctgtgctttgacctcttagagatgtgccccttccctttatacctgtcacccccacctccatcttcaccctcttccctcactggcaccctcttccctcatggcggttggctgaactaaggtcttgccaaaccctcaacccccttgtccctgggtcaactgtactatcttccctctactggaaaatgccctcgtgatgcaggtggcagtgctgggcacagctctgcccagctctctcctctctactaggtgaaggaccacaggagagcagaagtctcgtctgtctgatgacctccctcagtctggcccagagcaggtgctcagtaagtgtgtgtcaaaggaatattccccttgccatatgaagtgggtgtcggggcagaatttaggagttctttggtctcggcacgtttgctgtgtgatatggaataactctccagtccatctttttctaagttttcttgagtacatgagggaagggggcagtggcccaaggtgggagttaatggtcctggacaggccacggaccacctggaagacaacagtcactgagcatgtattgaatcctatgtaggcaagaggctgaggtgggctatgcagactataaggccccaaccctccctcctgcccctcccatccccaaggctcccttcttggctctgccttggattctctggtgactctagcaagttactttttttccttgaacttccgtgtttttctcaatgagacagagagttccaccgggtcatcttgggggtcccttttggctctgacaccccattactcaagtcccatcatgctgacgggtggtcggagctttttcctggga

SEQ ID NO: 715585 - DNA, 1086 bp, Homo sapiens
ttcatgctgttgataaagacatacccgagactgggtaatttatacaggaaagtgatttaattgactcacagttccacatggctggggaggcctcacaatcatggtgaaagaccaagggatgtcttacatggcagcaggtaagagagagtttgtgcagagaaactcccccttatagaaccatcagatcttgtaagacttattcactaccatgagaacagcacgagaaagacccactcccatgattcaagtgcctcccactgggtctctcccacaatacatgggaattgtgggagctacaatttaagatgggatttgggtacagacacagccaaaccatatcactagccctaaggcaggtgccagttacattgtctcaccagagcaccctgagagccacagccaggagagaaatggtgggcaggacccactacaggtccaccctggtgggcatacatgtgcaggcacctgggcaacgcagctcagcacagcctcaygactccaactcccctccgtgaacagccccgggggtcaggatgtggaggaggccaggaccagggaggatggggccactgcatcaccaccctgggctgaagacccctccaccatgtcctgggtaagccacacaacctcacccactttttggtgtaaaacaggtaaaacagcatggaatttgcaaagtatcccatgaatgcgactgttctcctccccactcccctcttctctcctcagaaagtcgccatgaaggaaagaaatgcataaatctgtcttctgcaaaaacaatttttccagccccattctattcttacagcaggagtccccaacccccgggccatgaaccagtacaagaaccaggccacacagcaggaggtgagcagcaggtgtgcgagcattcccgcctgagttctgctgcctgtcagatcagcggtggtgttagattttacaggagtgcaaaccccattgtgaactgcgcacaggagggacagaagctgcacactctgtacgagaatctaatgcctcatgatccaaggtggagctgaggcagtgatgggagtgctggggagcagctgcaaacacagattaacatga

SEQ ID NO: 715586 - DNA, 1086 bp, Homo sapiens
ttcatgctgttgataaagacatacccgagactgggtaatttatacaggaaagtgatttaattgactcacagttccacatggctggggaggcctcacaatcatggtgaaagaccaagggatgtcttacatggcagcaggtaagagagagtttgtgcagagaaactcccccttatagaaccatcagatcttgtaagacttattcactaccatgagaacagcacgagaaagacccactcccatgattcaagtgcctcccactgggtctctcccacaatacatgggaattgtgggagctacaatttaagatgggatttgggtacagacacagccaaaccatatcactagccctaaggcaggtgccagttacattgtctcaccagagcaccctgagagccacagccaggagagaaatggtgggcaggacccactacaggtccaccctggtgggcatacatgtgcaggcacctgggcaacgcagctcagcacagcctcatgactccaactcccctccgtgaacagccccgggggtcaggatgtggaggaggccaggaccagkgaggatggggccactgcatcaccaccctgggctgaagacccctccaccatgtcctgggtaagccacacaacctcacccactttttggtgtaaaacaggtaaaacagcatggaatttgcaaagtatcccatgaatgcgactgttctcctccccactcccctcttctctcctcagaaagtcgccatgaaggaaagaaatgcataaatctgtcttctgcaaaaacaatttttccagccccattctattcttacagcaggagtccccaacccccgggccatgaaccagtacaagaaccaggccacacagcaggaggtgagcagcaggtgtgcgagcattcccgcctgagttctgctgcctgtcagatcagcggtggtgttagattttacaggagtgcaaaccccattgtgaactgcgcacaggagggacagaagctgcacactctgtacgagaatctaatgcctcatgatccaaggtggagctgaggcagtgatgggagtgctggggagcagctgcaaacacagattaacatga

SEQ ID NO: 715587 - DNA, 899 bp, Homo sapiens
ctcattcaaaaaaagtgatcagaggcaaaagcagcatgcagggtcaggcacttctattagtgaatgtatctatttgatataatccacagggccagtatttgcttcagaacagagcaatcatgcacataatatcatccctataaacaaaatgggaaatagcatggacttaacattccaaagtataatatactcttccaaaggagagattgccctcaccctttgtggctgccagtttaaagtgcagagttttgccatggaatgccctttcaattttttattaattacatggaaccaaagactttaaatagcctccgggatcccaaaaaatgatattttaaaattatccagctttactgtcagaaatttaatttgaagttcaaaagtcaagataaaactaaagtcatcaaaacagaaggacaaaagaactttaagtggtcaggaaagaaaggtgtgggtttgtgttcaattgcagaagagtctcagkgtgagagtttatggaaaccccaactagagcccacctgctcaggtgtcttcacgcacacatatgtctcagagaggcacacagtagcagcaaacaactacggccagtttgtgatgttaatgacttttttacagaattacgtaataacgtcattagtattttaaaccctttggcatatgagagccactatgctccggaaagcgtgatcacactgaaggaatccttttcacttgagtccttggcttgaaaatgccactgtttggatggttacttcctgttgagaaccttgaccattttcagggacagaactttaaactctgcttgaagcatcccgcgcatcctctgtctcatcgctggtcatccatgtccctcacacactcatgatttgcgtgcaccaactgtatcacaacctgctggg

SEQ ID NO: 715588 - DNA, 899 bp, Homo sapiens
ctcattcaaaaaaagtgatcagaggcaaaagcagcatgcagggtcaggcacttctattagtgaatgtatctatttgatataatccacagggccagtatttgcttcagaacagagcaatcatgcacataatatcatccctataaacaaaatgggaaatagcatggacttaacattccaaagtataatatactcttccaaaggagagattgccctcaccctttgtggctgccagtttaaagtgcagagttttgccatggaatgccctttcaattttttattaattacatggaaccaaagactttaaatagcctccgggatcccaaaaaatgatattttaaaattatccagctttactgtcagaaatttaatttgaagttcaaaagtcaagataaaactaaagtcatcaaaacagaaggacaaaagaactttaagtggtcaggaaagaaaggtgtgggtttgtgttcaattgcagaagagtctcagggtgagagtttatggaaaccccaacwagagcccacctgctcaggtgtcttcacgcacacatatgtctcagagaggcacacagtagcagcaaacaactacggccagtttgtgatgttaatgacttttttacagaattacgtaataacgtcattagtattttaaaccctttggcatatgagagccactatgctccggaaagcgtgatcacactgaaggaatccttttcacttgagtccttggcttgaaaatgccactgtttggatggttacttcctgttgagaaccttgaccattttcagggacagaactttaaactctgcttgaagcatcccgcgcatcctctgtctcatcgctggtcatccatgtccctcacacactcatgatttgcgtgcaccaactgtatcacaacctgctggg

SEQ ID NO: 715589 - DNA, 899 bp, Homo sapiens
ctcattcaaaaaaagtgatcagaggcaaaagcagcatgcagggtcaggcacttctattagtgaatgtatctatttgatataatccacagggccagtatttgcttcagaacagagcaatcatgcacataatatcatccctataaacaaaatgggaaatagcatggacttaacattccaaagtataatatactcttccaaaggagagattgccctcaccctttgtggctgccagtttaaagtgcagagttttgccatggaatgccctttcaattttttattaattacatggaaccaaagactttaaatagcctccgggatcccaaaaaatgatattttaaaattatccagctttactgtcagaaatttaatttgaagttcaaaagtcaagataaaactaaagtcatcaaaacagaaggacaaaagaactttaagtggtcaggaaagaaaggtgtgggtttgtgttcaattgcagaagagtctcagggtgagagtttatggaaaccccaactagagcccacctgctcaggtgtcttcacgcacacatatgtctcaragaggcacacagtagcagcaaacaactacggccagtttgtgatgttaatgacttttttacagaattacgtaataacgtcattagtattttaaaccctttggcatatgagagccactatgctccggaaagcgtgatcacactgaaggaatccttttcacttgagtccttggcttgaaaatgccactgtttggatggttacttcctgttgagaaccttgaccattttcagggacagaactttaaactctgcttgaagcatcccgcgcatcctctgtctcatcgctggtcatccatgtccctcacacactcatgatttgcgtgcaccaactgtatcacaacctgctggg

SEQ ID NO: 715590 - DNA, 626 bp, Homo sapiens
aagtcccaaagatttcctcctatgctttctaaaggatttgtggttttaggtgttacatttaagcatatcttctctttttttgcctgtggatgatcaattgctccaggaccatttgttgaaaagctcttcttcctttcctttactgaactgcgtttgcaccttttcaaaaatcagttgggtatatttgtatcagtctatttctgggctttctattgtgtttcattggtctatgtgtytattcgtgtgccaatactacattgccttgattactttagctatatagttatcattaacattgggtagagttatccctctaactttactcttccttttaaaatcatgtttagttatcataagtcctttgctttttcatgtacatttatgagtaagcatctatgtctacaaaaacttttctgggaattggatcaggattctgttaaacctactgatctatttgcgaagagttgatgtttgcacaatgttgaatgttccaatccgtaaacatgacatgtgtctgtatttatttaggtcttatttgatttcctttttaagcatttacaattttcaatatactaatattttcaatttagttaattactgcttttatatatatggtgtgggtttta

SEQ ID NO: 715591 - DNA, 618 bp, Homo sapiens
ttaaggacctcagtctcattatggtcttttataatttgagaaataaagtgtctattatagtgtaatgccattggcatccctaatacagtcatgagaaggcacttttcagagtcacaagtaaataaatcaatgcttataaatagacaaactgtttacaatgagatctgtgtacttcacataaaaagaaacaataaaggaagataaaaactgatagacactatttagatcattttatcttcttacaagttttaaagaagtaggtggaagcaatctatctttctctcagagatacccataattcataattttgtatcaccaaaaactggaagaaaggtaatacagtttctattcagcatttcaattatttcatcataaaaggaagtcacattttttgtgtcaaaagcratgggattcatttccaatttctcacctactttccagatttctccatgttcctgtatctgttgatagaggaaaagacagtctccaaatctcctgggaataattttgagccatcataatattctttttagaggggatgcataaagtagacattaaaaatcaagaacccagatcatatcagtgagaagaaatctgcaattcgttaaatatgtgcaa

SEQ ID NO: 715592 - DNA, 618 bp, Homo sapiens
ttaaggacctcagtctcattatggtcttttataatttgagaaataaagtgtctattatagtgtaatgccattggcatccctaatacagtcatgagaaggcacttttcagagtcacaagtaaataaatcaatgcttataaatagacaaactgtttacaatgagatctgtgtacttcacataaaaagaaacaataaaggaagataaaaactgatagacactatttagatcattttatcttcttacaagttttaaagaagtaggtggaagcaatctatctttctctcagagatacccataattcataattttgtatcaccaaaaactggaagaaaggtaatacagtttctattcagcatttcaattatttcatcataaaaggaagtcacattttttgtgtcaaaagcgatgggattcatttccaatttctcacctactttccagatwtctccatgttcctgtatctgttgatagaggaaaagacagtctccaaatctcctgggaataattttgagccatcataatattctttttagaggggatgcataaagtagacattaaaaatcaagaacccagatcatatcagtgagaagaaatctgcaattcgttaaatatgtgcaa

SEQ ID NO: 715593 - DNA, 1699 bp, Homo sapiens
ttttgtcactctcaagggagtggtgttggggcagaattttgtcactcggcctratacagatagcattatgccccatctgttctctgatatcttagctctggtgcttcatgtaagagggagggctccaactttgggcttttgcaagtgggtgttggttgtggtggtatctgcgggttgggtcagcctgacctcaggccctgggggaagtggagaagtgacagcagagttggaatggggtaggtacttccccagttcctaggtccctagatggcacccttgccactgtttacaaatcctgaagaggctgaaccagggtcagaattgcccagtgttcaggtgctgggtgtgatggggaagggtgggctggtccccaggtcactggtgaaactctcaggcaggtacaggcatgaggcttgtatggtaggagcctgaggaagtatcacagctgtgtgggggtagggtttccagaagggctctagggtgcagctgaaatgctcaggcacgggcaggtgagtgcaccgtgtgccagaaggcatcaggaagcagtggaagtgaggtgtgggactggtgtagagccaggcgaagctccttaatttggggaaagggctgcctggctttgctcctttcttttttttccatgggtcctattgcttctgtgaaagcaaaatatcttgggcctcccaaattactaagctaaaaggaaaattcaagctagaaactgcgcagggcaaacctgtctcccactctattcaaagtcatccctctgctcactgagatagatgcatattctgattgcctcctttggaaaggcttattagaaactcaaaagaatgcaaccattttctctcacccacctgtgacctggaagcccctccttgttttgagtttgtccttgcctttctgggtggaactaatgtgcttcttacacatattagttcatgtctcatatactaaacctaaaatctgtaaaaccaagctgtgccctgaccaccttgggcacatgtcaggacttcctgtggctgtgtcgcgggtatgcatcctcaaccttggcaaaagaaactttctaaattaactgagacctgtctcagattttctgggtttactcttccttggtgaatcccaacaggatctcttagatgatccacttgaagagcaggtatttactcaccacgttgtttcctctctgtgagagtcacacacgctagcagcttctagtcaattatcttgaactggaactgctctatacttatacgttgttaataggtatagaaaaatttctatttaaaatgtgcaccatgagtttcactactaccatgacagtatgaggagtactgcaaactcactctacagaaaactggtaaaaattattctttttaaaaaataaaacatttaaggtctccagaattaatcttaaaggtatacgggaaaggaagaaacatttatttgagaatatctactaaaacagtaagaacagataaaatctgtggtatttgagctattaggttggctcaaaagtaactgcggtttttgctgttactttcaatggcaaaaacctcaattacttttgtgcctatctaatacatctgttaaagtatgtagtcagacaagaatagggtaggaaagagccccaccctgccccttactcctccactccccaacccaagaatgttgggcatttgtcaagccatggtcaggcaat

SEQ ID NO: 715594 - DNA, 634 bp, Homo sapiens
ttatacaatcactgtagaaagagatttgataaattctaataaaactatactatagcattatattaataaactatactgtatctcaattctaggaatttatccttaagttctctccatgcatatgcacaactttgttcattgtatcarcagttgtaatttttaaataacaagaacaatctatatggcaaaatatggaaaatagtttgaacgaattatgttacataaaccatacaccccaggaagaactatagcaacctgatagagaaagtgaggacaatctctataaccaatatggagttatttccaagattgcagttaaatgaaaaaaagcacaaagaaatatacaaattaaggtttgtgtgtgtacatatatatatatatcatatatatacatatatggtatatatatatggtatatatacctatatatacacacctatatatgggtatatatacctatatatatatataccttatatatatatatatatatacctatataatttaaaaacattacaaagttatatctgctttttaaagaagaaaaacaaagaataaggcaagaacaaatcaaattatttacctataggctataaaggagcaccgggtacaatgtgtagcttctgagtgtagc

SEQ ID NO: 715595 - DNA, 634 bp, Homo sapiens
ttatacaatcactgtagaaagagatttgataaattctaataaaactatactatagcattatattaataaactatactgtatctcaattctaggaatttatccttaagttctctccatgcatatgcacaactttgttcattgtatcaacagttgtaatttttaaataacaagaacaatctatatggcaaaatatggaaaatagtttgaacgaattatgttacataaaccatacaccccaggaagaactatagcaacctgatagagaaagtgaggacaatctctataaccaatatggagttatttccaagattgcagttaaatgaaaaaaagcacaaagaaatatacaaattaaggtttgtgtgtgtacatatatatatataycatatatatacatatatggtatatatatatggtatatatacctatatatacacacctatatatgggtatatatacctatatatatatataccttatatatatatatatatatacctatataatttaaaaacattacaaagttatatctgctttttaaagaagaaaaacaaagaataaggcaagaacaaatcaaattatttacctataggctataaaggagcaccgggtacaatgtgtagcttctgagtgtagc

SEQ ID NO: 715596 - DNA, 634 bp, Homo sapiens
ttatacaatcactgtagaaagagatttgataaattctaataaaactatactatagcattatattaataaactatactgtatctcaattctaggaatttatccttaagttctctccatgcatatgcacaactttgttcattgtatcaacagttgtaatttttaaataacaagaacaatctatatggcaaaatatggaaaatagtttgaacgaattatgttacataaaccatacaccccaggaagaactatagcaacctgatagagaaagtgaggacaatctctataaccaatatggagttatttccaagattgcagttaaatgaaaaaaagcacaaagaaatatacaaattaaggtttgtgtgtgtacatatatatatatatcatatatatacatatatggtatatatatatggtatatatasctatatatacacacctatatatgggtatatatacctatatatatatataccttatatatatatatatatatacctatataatttaaaaacattacaaagttatatctgctttttaaagaagaaaaacaaagaataaggcaagaacaaatcaaattatttacctataggctataaaggagcaccgggtacaatgtgtagcttctgagtgtagc

SEQ ID NO: 715597 - DNA, 634 bp, Homo sapiens
ttatacaatcactgtagaaagagatttgataaattctaataaaactatactatagcattatattaataaactatactgtatctcaattctaggaatttatccttaagttctctccatgcatatgcacaactttgttcattgtatcaacagttgtaatttttaaataacaagaacaatctatatggcaaaatatggaaaatagtttgaacgaattatgttacataaaccatacaccccaggaagaactatagcaacctgatagagaaagtgaggacaatctctataaccaatatggagttatttccaagattgcagttaaatgaaaaaaagcacaaagaaatatacaaattaaggtttgtgtgtgtacatatatatatatatcatatatatacatatatggtatatatatatggtatatatacstatatatacacacctatatatgggtatatatacctatatatatatataccttatatatatatatatatatacctatataatttaaaaacattacaaagttatatctgctttttaaagaagaaaaacaaagaataaggcaagaacaaatcaaattatttacctataggctataaaggagcaccgggtacaatgtgtagcttctgagtgtagc

SEQ ID NO: 715598 - DNA, 634 bp, Homo sapiens
ttatacaatcactgtagaaagagatttgataaattctaataaaactatactatagcattatattaataaactatactgtatctcaattctaggaatttatccttaagttctctccatgcatatgcacaactttgttcattgtatcaacagttgtaatttttaaataacaagaacaatctatatggcaaaatatggaaaatagtttgaacgaattatgttacataaaccatacaccccaggaagaactatagcaacctgatagagaaagtgaggacaatctctataaccaatatggagttatttccaagattgcagttaaatgaaaaaaagcacaaagaaatatacaaattaaggtttgtgtgtgtacatatatatatatatcatatatatacatatatggtatatatatatggtatatatacctatatatacacacctatatatgggtatatatacctatatatatatataccttatatatatatatatatatacctatataatttaaaaacattacaaagttatatctgctttttaaagaagaaaaacaaagaataaggcaagaacaaatcaaattatttacctataggctataaaggagcaccgggtacaatgtgyagcttctgagtgtagc

SEQ ID NO: 715599 - DNA, 616 bp, Homo sapiens
tatcgcaccattgcactccagcctgggcaacgagaaagaaactccgtcttaaaaaaaaaaaaaaattaacataacatttccacgtggttacaaatgaatatacctcattactttttcataattgtwtaatttgcttattaatgaacattattttcatttgtaaccatttctcccacattccatacacaaggagactgctttcacataagatgtagcctctgttccgagcctgcttctctttatggttctgcctttaatatcacaggcttcctagcatctttccccaaagttagttctccctaaattggcctggcacttgctgctaccactgttagcattcacaacctcagtggcaccttcaattggttccagagctgccacatcagctggttgtaggcgagcagctccaccatcctggctgcatcatgtcctgtcactccacagcagagtggggtggaggtgcggtgtggagtaccaaggactccactgttgtgaccaggcgagccctaggtagtaaatgactacttgcttgtcatttaagttttttggtggtttattgaaatggcaaagactgctactcacttctatttccttaaaacacttctttacatttggg

SEQ ID NO: 715600 - DNA, 1831 bp, Homo sapiens
aaagttttttagagtgctagtttcttgtggactataaaaagttgactgtaggtagttaaatgtatatttggtttaccatatagttgaagctgtttaattcataatggaattctatcattcaaaaaaatttgtagctattgctaagaagcccaatagattttataataaaccatcatgaaagttctgtgtatatatggaagaaagaattattttctcagaacagagagaaactgcactgagattcaaaggctgagcagcgtatttgcctcaggttcagagagttgtggtaacatacatttttaatgtatggtatttgtgtgaggcctctaattttcctccatctctgattactaatttcatctgcctatcccatgggtgcctatgaaggttcgtgtgtgtgtgtgtgtgtgtgtgtataatgtatataatatacatatatgatgaatgcattataaataatatatctggatatattatatataatattttgtgttttgtgaaatatgcagtgttatttagtgtgtatatttttaattcccttaaatgctgttttactatggattttattgtttctcctttgtgtttaccactgttttaaacatttcatcgtgtttctatatgcatatctattcaacttactgcttttgattgctgcattaatatttcatggaatgcattttccacattacttacctgcttctctagtgatgcctccagctactcttacaaacaatgctccagggaatatatcaaatgtgttcccttatggaattgtatatgaatttcctatgcaatayatacccaggagttgtatagttgggtcatagaattggcattacctatgaaagcttactacatgattgctctgtggagtggcttaccagtatgcatgtggattccttttcttcatgttcttgttaacaactttctgtgttctcaaatctcatatttaagccactttgcattatcacactgctaagaattatcacattgattaataacttattatatcacagggtcacatttttattctggcaactagagctgagaaacttacaatggggatattgagggaagattgaaattcttgttgaagtttaaagtgttgcatgataatgttcaagaaggctcactgtctagaggacacagattataccttgttgacccatctagaaacatgatcttatcagagtcctcaagttgattacatttagatagtctgactgccctcaccagttaccaaagttaattaacaagccaataaactaattcatgatgaaaagtaaaactgtagatccttttggccatttcagttgtccttttttttttctctctaggaaatcacaatattatcagatgaaggtagctttgtgagttttatatcagggcaagaggaaatattgatctgaagagtgaagcatcttttattagaattttgattattggaattttatcagaaaaacttttataaaagttattagatagctgaacttttacagttgttaacccagaatgaaagtagccaaaatcattttttccttttccttattttctagtgaaaaatattatgactattatgattagaaatagcaatgtagaaaccatgcatatatatcaggatgtttgcagtttattactagtagaggaatagtagtgtgacaaccagtctgtaaacagagacttcaaagtgaaaatttcccattttaagaataaagaaactctttatggtttttataatagtaaggctaaatctaaatatttcacctaaagattgtataataacagccctgaaaaatgcaaaatgctgaatatgtacatcatgtacatatca

SEQ ID NO: 715601 - DNA, 918 bp, Homo sapiens
cctggacaacatggagaaaccccacctctactaaaaatacaaaaattagctgggcattgtggggcgtgcctgtaatcccagctatttgggaggctgaggcaggagaattgcttgaacccaggaagcggaggtcacagtgagccgagatcatgccactgcactccagcctgggcgatacagcaagacactgcctcaaaaaataaataaataaataaataaataaataataaaataaaataaacattaaaaaaaaagtaaaaacaagtggatggtgtggttgtggaactaaagctgtctctactgttttaaaagggctattgaagcctttaatgcctcttggttttggctagtggggcaaaagtagcctcaacttccatggaaaaaaagagacacaggcatcttatcttttttaacttaaaaatcctgcaaaattttttcttggaactggaattaattttaaaaaaccataaaaataaactgcaggggtctgagagtgtaagaggttactccctttttgattatttgttggaagacaacctctaaaattttggaggggaaagtattcctttcatattttatttggcggatatatacagatggcacattccttttagactagagaaaaaattaagatgcgtgcccttaatcattgaaatggcacaatagtgtatgatggcgatagagcagagatttttctcatgactaattttgcagtgagtgactgttgktgatttgaaaatacataaccgttttaaaggacattaaaggacgtgtcataatttagtcattgttgtttacgttgttatctttcacttatttttcattgggaatctagtttagggcccaaatctgaaagtaagttgtatttttcttcctctgtgctgtaaaatcgagctggctctactacacaacctaaca

SEQ ID NO: 715602 - DNA, 1258 bp, Homo sapiens
ctctagatcctttcctcttttcaatttttcctccccctgaagacctcacccatatccatacacaactttatttactgactgtacacatatgacttacaaatatatatctccaggccaaatatctcctctgagttccagcatatatcgataaccatttctttgacatactcacttgtatataccataggcatcttacagtttttatttctgaaaatgaacttttgattttctgtgccaacttggttcctatcctgagtctacctcagctaggttagttttaccacctcctactcatttgctgaaatatgaaatcttagcatcatctttatacctctatctctgtcacactgtcttcctctatgtcaatttggtcactaagtcaatttcttctatatctcctctgccattattcaggcccaatgtgtcaccrtctcttacctggaatactaaaatggcctcctaaatatttttatcatattcattatggcttattttcaacatattttaaaaacactgcagctagggtgatctttttgaaacaaatctgatcaagccacttcagttttatttttttgtatatttctgttggagatagttgaatttattcatccacatgtcattaaaaagacaacaactaaaaacaaaggctaaaatactttatttactttctttactgtttactaagcattagtcttagtaaaaagtaaataaaaaaataacatgacctgttaagctttgtgcagtctaaccagcctatctcttcagttctgttaataatataatccccacgtactctacaacctagccacaaagggattttagttgctctaatgtgtcatgtgttctcctaccataaagccttaccaatcctactccatcagcctaaaatggtttattccccttcatgtacttaatgtcactcatccttcagatcttagctcaagtgtcacttccttagagaaaactttacttaaacttcaatttaaaatatattgctttctcataaaattgctttatttccttcagaacacttttctcagtttgtatttatttgctcattaacataattatttcaccaatagctacctccccgaaacattacactacactgtaagacttataagcctatggacccattcgactttagttccccattgtaaccccagtgcgtaatatagaatctggcacataatacatgttcaataaatcttgtgccaaaacttaatgaatggctattaatattgaatgtttgcttctt

SEQ ID NO: 715603 - DNA, 1258 bp, Homo sapiens
ctctagatcctttcctcttttcaatttttcctccccctgaagacctcacccatatccatacacaactttatttactgactgtacacatatgacttacaaatatatatctccaggccaaatatctcctctgagttccagcatatatcgataaccatttctttgacatactcacttgtatataccataggcatcttacagtttttatttctgaaaatgaacttttgattttctgtgccaacttggttcctatcctgagtctacctcagctaggttagttttaccacctcctactcatttgctgaaatatgaaatcttagcatcatctttatacctctatctctgtcacactgtcttcctctatgtcaatttggtcactaagtcaatttcttctatatctcctctgccattattcaggcccaatgtgtcaccatctcttacctggaatactaaaatggcytcctaaatatttttatcatattcattatggcttattttcaacatattttaaaaacactgcagctagggtgatctttttgaaacaaatctgatcaagccacttcagttttatttttttgtatatttctgttggagatagttgaatttattcatccacatgtcattaaaaagacaacaactaaaaacaaaggctaaaatactttatttactttctttactgtttactaagcattagtcttagtaaaaagtaaataaaaaaataacatgacctgttaagctttgtgcagtctaaccagcctatctcttcagttctgttaataatataatccccacgtactctacaacctagccacaaagggattttagttgctctaatgtgtcatgtgttctcctaccataaagccttaccaatcctactccatcagcctaaaatggtttattccccttcatgtacttaatgtcactcatccttcagatcttagctcaagtgtcacttccttagagaaaactttacttaaacttcaatttaaaatatattgctttctcataaaattgctttatttccttcagaacacttttctcagtttgtatttatttgctcattaacataattatttcaccaatagctacctccccgaaacattacactacactgtaagacttataagcctatggacccattcgactttagttccccattgtaaccccagtgcgtaatatagaatctggcacataatacatgttcaataaatcttgtgccaaaacttaatgaatggctattaatattgaatgtttgcttctt

SEQ ID NO: 715604 - DNA, 622 bp, Homo sapiens
ttctgcctctctcaaggtagagattgctgcgcacctctccatgcaatgtgtctgaagtttctttcattttttgtgttaggcacctgtgtttcttctccgatgaaagtttacagtgtgaatcttcacactctattttactctaagtggatgaggcacattaataaaacccccaataaaccatcttgaagataaaaccattttaaccatatttcaatgtacagttcagtggcaytaattaccttcataacactgtgaaaccatcattaccatttattccaaaacttttcaccccaaacaggaactcataattggtagaattggatttagaaggaagaacggaaggtttagacctccaattgagaaggcatttaaagtttatccttggggcagactctgcaacaaatgcataataatgttagataaaaatagaaattatgagaataaaaggcacattaaagccaaaaaaacaagaaaatattctctatggatcatcaataaagagaaagaaacaccaataagtaaagctaaagctaaagcaatgacctgctgctctctgaactcaaaatcaggaagtggatttagaaattagtctcccacagggaagctacactttacatatata

SEQ ID NO: 715605 - DNA, 622 bp, Homo sapiens
ttctgcctctctcaaggtagagattgctgcgcacctctccatgcaatgtgtctgaagtttctttcattttttgtgttaggcacctgtgtttcttctccgatgaaagtttacagtgtgaatcttcacactctattttactctaagtggatgaggcacattaataaaacccccaataaaccatcttgaagataaaaccattttaaccatatttcaatgtacagttcagtggcattaattaccttcataacactgtgaaaccatcattaccatttattccaaaacttttcaccccaaacaggaactcataattggtagaattggatttagaaggmagaacggaaggtttagacctccaattgagaaggcatttaaagtttatccttggggcagactctgcaacaaatgcataataatgttagataaaaatagaaattatgagaataaaaggcacattaaagccaaaaaaacaagaaaatattctctatggatcatcaataaagagaaagaaacaccaataagtaaagctaaagctaaagcaatgacctgctgctctctgaactcaaaatcaggaagtggatttagaaattagtctcccacagggaagctacactttacatatata

SEQ ID NO: 715606 - DNA, 622 bp, Homo sapiens
ttctgcctctctcaaggtagagattgctgcgcacctctccatgcaatgtgtctgaagtttctttcattttttgtgttaggcacctgtgtttcttctccgatgaaagtttacagtgtgaatcttcacactctattttactctaagtggatgaggcacattaataaaacccccaataaaccatcttgaagataaaaccattttaaccatatttcaatgtacagttcagtggcattaattaccttcataacactgtgaaaccatcattaccatttattccaaaacttttcaccccaaacaggaactcataattggtagaattggatttagaaggaagaacggaaggtttagacctccaattgagaaggcatttaaagtttatccttggggcagactctgcawcaaatgcataataatgttagataaaaatagaaattatgagaataaaaggcacattaaagccaaaaaaacaagaaaatattctctatggatcatcaataaagagaaagaaacaccaataagtaaagctaaagctaaagcaatgacctgctgctctctgaactcaaaatcaggaagtggatttagaaattagtctcccacagggaagctacactttacatatata

SEQ ID NO: 715607 - DNA, 622 bp, Homo sapiens
ttctgcctctctcaaggtagagattgctgcgcacctctccatgcaatgtgtctgaagtttctttcattttttgtgttaggcacctgtgtttcttctccgatgaaagtttacagtgtgaatcttcacactctattttactctaagtggatgaggcacattaataaaacccccaataaaccatcttgaagataaaaccattttaaccatatttcaatgtacagttcagtggcattaattaccttcataacactgtgaaaccatcattaccatttattccaaaacttttcaccccaaacaggaactcataattggtagaattggatttagaaggaagaacggaaggtttagacctccaattgagaaggcatttaaagtttatccttggggcagactctgcaacaaatgcataataatgttagataaaaatagaaattatgagaataaaaggcacattaaagccaaaaaaacaagaaaatattctctatggatcatcaataaagagaaagaaacaccaataagtaaagctaaagctaaagcaatgacctgctgctctctgaactcaaaatcaggaagtggatttagaaattagtctcccacagggaagctacactttayatatata

SEQ ID NO: 715608 - DNA, 1111 bp, Homo sapiens
tttaattggattccaataaatgacgtttttatcagactaacacaaaaattatttgttctcttcttttcctcttttgttatctatctatcatctatctatctatcttctatctgtctctctatccattcatccatttgccttatgccaattcggtgtgagaggtgcatatatggcaaatacaagaaacacagaaaaaatagattatattaaaatttaaaaactctaattttaagtataataagaataacatgtacatggaatttttaggaaacataatttcctaaaaataggaaatttcctttacaccaaatatatgtttgtattatacatatttctataaagggtctggtgttttaaatttggatcctgtcacaaataaaaattggttgcagttgacaagctttattctgtttaacaactaccaaaattagaattcttaacaactgatggtgaaaaatttacaactgatttttagaaaaattatagattatttatttctaccataaaacaatttagtgaaactaaaagtttaattcaaatggctgccccacattacacacacacacacacacacacacacayacacacacaaacacagcaaaggggattattatttattatgcatttttcttgggccagaaactctgtcaggtgcttttagatatgtcctctctaatcttcactccaaatcctcatgtgataggaacaagctcaaaaacagaaagaagttcaatttgaccaataattacttttaagaaactaaattccaaatttttcccaggatttcagaaatgttgaattatggtatgatactggtgtagagaaaactccttctttcccgtagctgaattttgtctcactcttcactttacaggatgtgtttttacctgagttaaaaacaagtttttaaaaaaaattaaaagttgggagacagattaagatggtggacaggaggcaggactagcttgcagctcccacttggatggtcagagcagtgtgtggagactcacatcgttaacttttgctccaagaactactgcaggaacataccaggaaagctgagagaatccacaaacgctttgaaggaactggatcactgctgcaggctccc

SEQ ID NO: 715609 - DNA, 935 bp, Homo sapiens
aaagcaggtgaaaataatctaaataacatattttccttagtcaactatatccaaatattttcatttcaacatgtaagtataaaaattatcaattgaatgttttacattatttttcacactaaatcttcaacatttaatttgtattgcacacttactgcacatcttatccacaccatccacatttcaagtgctcagtagccacaagtggctcactgatgccataccggacagcttagatttctmcccgtacagaaaattctagaggaaaatgccaggattattgtttcaaaaatattatgtaagattgtagagcttcagtggtagagcaaacctagcaagagttgagacaggaggaattaagattgtcttagtctgttttgtgtcactataaagaatatctgaggctgtgtaatttattaagaaaaaatgattatttggcttatgattcttctggctagaaggttcaagactggcatctggtgatggcctcaggctgcttctactcatgacaggagaagggcagccggcctatgcacagatcccatggtgagaaaggaagcaagggggagagggagaggtaccaggctctctttaacagccagctctctcttgcaggcatgaatagagttaaaactcattcacccccaggggaggtattcctgagccatctgcctctccatgattcagatacttcccattaggtcccaccttcaacactggggatcaaatttcaatatgaggcttgtagggaacaaatattcaaaccatagtggagatgaaggatttgtggatttcttattcccaggctttttctaggctctaccatttcttactgcgaatacaataccccaacaccccttacttgtctctctgcttcctttttttcttatgaatgaatggaggtgacaaaggatttatgactaagagtattggta

SEQ ID NO: 715610 - DNA, 590 bp, Homo sapiens
atgggctaaagaagaagttcttcccagaattttaattgttttgattgggagaggagtttagggtgtctaatccactgtactgctggaaagggaagtgttagcccttccatgttatcttcgttcttaggcagctctctcagtggtcattttcagcactaggcttatatacaacctaattaacaagcccataaaaatgtgcctcttctttattagtttttggaaaagcctcagcattgactccactcatgtagttgcccgcccctgagcaaccactctggtcaggggttgaatatgttggttggcgaggcctgcatcagggagcggagtccatcttatcagcatctcatgaccacatgagccgagtggggaaggatatgtggtgggctgattaaggtccccsaaagatgtccatgtctgaacccctggaagctgtgactatgttaacttatggagcaaaagggactttgaagatgcgattaaggatcttgagatgaggaggttatcttggattatttgggtgggcccaatgtaatcacaagggtccttttaagaaggagcaaggagggtcatagatagagaaggtgacatga

SEQ ID NO: 715611 - DNA, 610 bp, Homo sapiens
tttcaggaacagattgtcttatactcatgtcaatcacatggtcccacttccttgaccgagaaaattggcatgtgatgcaggctgaccaatcagagtcatccctgggagttttgatggaactatcagagaagctctcctttcttggtatctctggcagtaggggaggatattggaggacattcatattaccaagtggaaaaagtaaagaccacaccaaggaacacagagctgagggatgggaggaacatattcctgaagatatcattkgagacacgggattcagccatgcctgaagaccaccagtggagtttcccgttacattccattcctgaattcaatacattcccgttctctttagtttgaattaaattattgaatttctgccatttacatcacagtgtgtccttcttctccctcctcaatagaagagtaattatatatttcttccttttactttaccataacagtcttctcttagaataagaaaaaacctttctcttgaacttggcaggataaaataaaggcactgacccagaatccactgttattcttgtatagatcataaatgcctacagtgaagagcattacactatctttggcgacatctcta

SEQ ID NO: 715612 - DNA, 1433 bp, Homo sapiens
tgacagcatgatgatagctaaaaggagcttcacattctcccattatccaaatgtgaggggtttagcaataaaaaataagtagaaggaactattgacaggggagaaatgggccccaatttcaagggcatctgtctgtgcaagttccaggaaaaaaatattaagaatgtcaatgagaccttaactggcaatgagtagatgtggattgatttgtgaaaattgaggatgtcgaaataaagtggctctcctaaattgagcagaaaaatttggcgcaaatagagtattacttcccaaattgtgaagttattgacttgcaatgacttctataatatatacaagttacaaaggtttgtgtactatgatacaaacacctatgcacataaacatatacttgtacataaaaagtatacaccaaaatattaagagttattatttcaggagatagataataatgttcagtttccttttttttattaatcaggaacatgattttttgtttcaatagttcacatttgtatattgatcatattaatcaaaatatctcacagttctttaatttaaaagccagttaaaataatttcattgatttccaaattatttgggttaagaactgaagaaggatcaagatatattccaaacctttaagggtcattcaccataagccacatggccctctgaccacatttttcctggtactttctataggattagggaaacctaccagtttcagagacctgatgactacagttctcttctgattaatgtgcattgagactcagtgtggctgtgtgagggggcaatgggagtccttactggtgtggatttaataaaatcaagtccctgatcttgaaagatgcttcatgcactaaaaattcaaataatttgattgaggatactttgtaacttaggtttaaaataacaacagcaacaacaacaaatacttatagaacagttactatgggccaggcatgatctaagaagattagatgatacatgatgatgatgatagatggtagatagatgatagacagatagataaagatggatagagagatgatagatagatagatagatagatagatagatagatagatagatagatagatgatagatgataattagacagatcctataacaaagtaaatactattattatctctaattttacagagagagagagttcaagtgacctggtcaacatcgcacatctactaagtgaagctgagaattaaatccaggcagtctagatccagagcccacactcaacaactaaacaactcaggccaggggcagtggctcaagcctgtaatcccagcactttgggaggctgaggcrggcggatcgcccaaggtcgttcgagaccagcctgaccaacatggagaaactccgtctctacttaaaatacaaaattagccagtcgcggtggcgtatgcctg

SEQ ID NO: 715613 - DNA, 1433 bp, Homo sapiens
tgacagcatgatgatagctaaaaggagcttcacattctcccattatccaaatgtgaggggtttagcaataaaaaataagtagaaggaactattgacaggggagaaatgggccccaatttcaagggcatctgtctgtgcaagttccaggaaaaaaatattaagaatgtcaatgagaccttaactggcaatgagtagatgtggattgatttgtgaaaattgaggatgtcgaaataaagtggctctcctaaattgagcagaaaaatttggcgcaaatagagtattacttcccaaattgtgaagttattgacttgcaatgacttctataatatatacaagttacaaaggtttgtgtactatgatacaaacacctatgcacataaacatatacttgtacataaaaagtatacaccaaaatattaagagttattatttcaggagatagataataatgttcagtttccttttttttattaatcaggaacatgattttttgtttcaatagttcacatttgtatattgatcatattaatcaaaatatctcacagttctttaatttaaaagccagttaaaataatttcattgatttccaaattatttgggttaagaactgaagaaggatcaagatatattccaaacctttaagggtcattcaccataagccacatggccctctgaccacatttttcctggtactttctataggattagggaaacctaccagtttcagagacctgatgactacagttctcttctgattaatgtgcattgagactcagtgtggctgtgtgagggggcaatgggagtccttactggtgtggatttaataaaatcaagtccctgatcttgaaagatgcttcatgcactaaaaattcaaataatttgattgaggatactttgtaacttaggtttaaaataacaacagcaacaacaacaaatacttatagaacagttactatgggccaggcatgatctaagaagattagatgatacatgatgatgatgatagatggtagatagatgatagacagatagataaagatggatagagagatgatagatagatagatagatagatagatagatagatagatagatagatagatgatagatgataattagacagatcctataacaaagtaaatactattattatctctaattttacagagagagagagttcaagtgacctggtcaacatcgcacatctactaagtgaagctgagaattaaatccaggcagtctagatccagagcccacactcaacaactaaacaactcaggccaggggcagtggctcaagcctgtaatcccagcactttgggaggctgaggcgggcggatcgcccaaggtcgttcgagaccagcctgaccaacatggagaaactccgtctctacttaaaatacaaaattagccagtcgcrgtggcgtatgcctg

SEQ ID NO: 715614 - DNA, 2462 bp, Homo sapiens
caatcttactgcccccaccttccacccttagctctactttctttgcttaattttctggtacatcatatatgtatttttgtaaggtgtgtatttagaagaaggcaggctgggagaaaataaacacactctataaaacactccctctatttatatagagtgggtagtattgcgtgagtggtggcaaataaatcaagcagttcccagaggagaaacaaaagtgagataaatgcttccaaaaattaaaaagttgaattgatagaagtgccaaaatcctttccaactgtctgaaaacttggaccaaaaacttttaccatgtgaaatgaaaaagtgaggaaggaaaaaaaaatactttgaaagaagggggttctcattgatactttccacggctgttatcactgaatctagacaaaaagttccagatcttcctcaatttaagataaacgtctttgaacttcagcttgccaagaaagcaaggctgacccccgaccctccgtgtgatgtcacttttctcatccattatccttctaaaatagacattttgagacaatttagtgatgcgacatttccatcctgtcggggttccttgggtttgacattcgaaagggggctggaggcgcggaacccgcggcactccgcggccagcgtcctttaaagccgccgccagccagcgccgctgtaaccccgcgcaccggcaggtcgccggctcctgcccttttcagtctgcgccgacgcggctgccggatcccggggactccccgcgccgggaatctcccgccagctgcgcgctgagtccaggcgacggcaggagcacgtggagaggccgagtagccacagcggcagctccagcccggcccggcagcgacatggaaggtgagcctccagcccgcttcttttctccggggtctttgagaaacttaacctgtgcaagcagtagaaagagtttcttctgaatctcagttttgcttctatttacttcttttgtcaaaagtaaatatgaggtatttcagaggacaaagcgcgtcggttctcttaacgtctctcacttgtccttcccccgccctttggaaagtgataacttcttcgcaattttatttctaaagagttgtcagacatggggggtctaccctacatctgcagaggaagagcacttaaggggtgtccctgaaatggctgcaaatctggggtggaataatcaacccttttggatattttttccttcatggcctcagtgtttattggaattagactaatctgagtaacttgttttcttccaagggtaaatggtgtcatatgggaaaggtacattttaaagcggttggcatttgcagttcccttggaactcgatcttctaatgagtcttctttacccagcgcaaaaaatcaggttcacattaggagtttcatatgaattaattttgaaagtcgtaacactatccttgcttctcaaacatttttcattctgtacttccttgggatacctaaaatttcacactgctactgtaaactcttcaatggtcttttcaacaagtgtttctaaaaccttgaaaatggcaaatgcatctcaactcggggggggatggtgggattaagaaattcagaatttcattctattaaaaatgagatattgacacctaactaaaatgttactttgataaatatgaagatcgtgggtattttcttcataataatggaagaatctctaattaacaatgaactgatctttggcagctttatttctagagtatataaagttgttaaaatatcaaaaactttatgcttttaatttttttaattagggcttgaaaactttaaaaattttgcatttttaacatttaaataatggtttattgaagtgtaatttttaacaaaggttttattggccaataacaaggaaaaaaagttgggctgttgtatactatgggaaaaataatttttgaaaagctcatatgctttaattattacaaatgattaatttgtttttatgaaattataaatcagtactccaacactatttttcctagccgtaaccataccacgtatcaaggataatgtacagaatcatgtaaatccatagaaactggagtatttctctataaatgttaatacttccaaattcatttatttaatgtgcaataaagaaactaaatagcatatcttaggttattggtgtactaacacagatgtttaataagcctgaagactcccttaagaagaaaagaatgaaaacttgtgtagaatttaatttagagtgtgtagactataaatggaaagagaatgtagatcaataactttttaaagttgtgtttacatgattagattaaatctataggyccatggagatagatagtatagattatgcttaatgaaaaaactttaacatttaaattttaaaaagaggttaattatatgaatttggctattttaatgtcaggtccttgcgtatagagtatttgatgtggtaaa

SEQ ID NO: 715615 - DNA, 1605 bp, Homo sapiens
ttttcttttccttttyctttttttttttttgagatggagtttcacttttgttgcccaggctggagtgcaatggtacattcttggctcactgcaacctctgcctcctggattcaagagattcttctgcctcaacctcccgaggagctgggactacaggtgcccgccaccacgcctagctaatttttgtatttttggtagagacagggtttcattcaccctattggccagggttttttggagagagatctggtctcgaactcctgacctcaggtgatccacctgccttggcctcccaaagtgctgggattacaggtgtgagccaccatgcccatgccacccttttttattaataaattaaaaacaaaggcttacaataaaattttactggtcctttgaattacccctccctaccacagtattgctggggagaggccttcagaattgttctaagagagctcggtgttttctattatagaatgcttgtttgtcaggtgagggtattggtatctgtatgtggggtggggcactggataggtaggggaaagtcatcggaggcagggacccatgtcttgagggccttttgattgcaaatagaaactccatcagactgttttaggtctcaacatgagtttcccccagcgggaatggaatctgatgcttcatgagcctaagggcagatgatgcagctggctccagggaccagcgcaaggagctggagccccttgtcagagaagagggtgtcttgggcttcacagatgcctatctcagtgtcacgggaagggcactctctttggacttacactgaccagggtttgaatcccagctctacacttactagctgtgtgaccttggaccactcacaacctgtcactaagcctcagtatctttacatggaaagtggacgtaattctgcctaccatcataggattgtgaaggttaagtggaaaagcgtggctcacagctggcacattgtaatcttccataaatgctggtgaattcttgccccactttgtttttatttatttgttttgaggtggagtcttgctctgttgcccaggctggagtgcaatggtgcagtcttggctcactgcaacctccgcctcccgggttcaagtgattctcctgtctcagcctcctgagtagctgggattacagatgtgtgcctggtgatccactcacctcagcctcccaaaatgctgggattacaggcgatagccaccgtacctggcctctcaccctactttgtaccccacccctacctccaccccgaggtgggtaaagtgaactgcgatggggtgctgtgttccttggttttccagtctcagaagcgattaatcttcaataggagctggctcacagagagggaaaagagtcagtgggaggtaaggccctgagatccttaactctcatctctctccactctctccaggaagctgaagagggaactacccttttcattccgatcaattaatacgagagaaaacctgtatctggtgacagaaactctggagacggtaaaggaggaaaccctgaaaagcgaccggcaatataaattttggagccagatctctcagggccatctcagctataaacacaaggttagga

SEQ ID NO: 715616 - DNA, 1605 bp, Homo sapiens
ttttcttttccttttcytttttttttttttgagatggagtttcacttttgttgcccaggctggagtgcaatggtacattcttggctcactgcaacctctgcctcctggattcaagagattcttctgcctcaacctcccgaggagctgggactacaggtgcccgccaccacgcctagctaatttttgtatttttggtagagacagggtttcattcaccctattggccagggttttttggagagagatctggtctcgaactcctgacctcaggtgatccacctgccttggcctcccaaagtgctgggattacaggtgtgagccaccatgcccatgccacccttttttattaataaattaaaaacaaaggcttacaataaaattttactggtcctttgaattacccctccctaccacagtattgctggggagaggccttcagaattgttctaagagagctcggtgttttctattatagaatgcttgtttgtcaggtgagggtattggtatctgtatgtggggtggggcactggataggtaggggaaagtcatcggaggcagggacccatgtcttgagggccttttgattgcaaatagaaactccatcagactgttttaggtctcaacatgagtttcccccagcgggaatggaatctgatgcttcatgagcctaagggcagatgatgcagctggctccagggaccagcgcaaggagctggagccccttgtcagagaagagggtgtcttgggcttcacagatgcctatctcagtgtcacgggaagggcactctctttggacttacactgaccagggtttgaatcccagctctacacttactagctgtgtgaccttggaccactcacaacctgtcactaagcctcagtatctttacatggaaagtggacgtaattctgcctaccatcataggattgtgaaggttaagtggaaaagcgtggctcacagctggcacattgtaatcttccataaatgctggtgaattcttgccccactttgtttttatttatttgttttgaggtggagtcttgctctgttgcccaggctggagtgcaatggtgcagtcttggctcactgcaacctccgcctcccgggttcaagtgattctcctgtctcagcctcctgagtagctgggattacagatgtgtgcctggtgatccactcacctcagcctcccaaaatgctgggattacaggcgatagccaccgtacctggcctctcaccctactttgtaccccacccctacctccaccccgaggtgggtaaagtgaactgcgatggggtgctgtgttccttggttttccagtctcagaagcgattaatcttcaataggagctggctcacagagagggaaaagagtcagtgggaggtaaggccctgagatccttaactctcatctctctccactctctccaggaagctgaagagggaactacccttttcattccgatcaattaatacgagagaaaacctgtatctggtgacagaaactctggagacggtaaaggaggaaaccctgaaaagcgaccggcaatataaattttggagccagatctctcagggccatctcagctataaacacaaggttagga

SEQ ID NO: 715617 - DNA, 545 bp, Homo sapiens
tcctgccttggcctcccaaagtgttaggattacaggcataagccaccatgcctggctgtggatggtagttttaaggtaaatggacaacatcctgtttggaacaccacaactgtaattaaagaaggtaaaaacaaatcagcttggtgagctgaataatctgctgttttcctagaagtgatggaagaactgaacagtgatacatgcccatatgtttcagtttctgattcatgggcaatggccaacagcctggccatgtggtaaggcaagagtgcaatggaaacttggcatattaaagggactctcatatgggacaaagccctgtggaaatcactatgggaatttgakgggtgcattaaagtaggacatgtcaatgctcggtaaaagaccccccttccagatttggaagctgatcagaaccaattagtaggtatcacagtgtgcgtgtttgaggtgagcacgtgggtccataaaatgagtagacaggatgggggatgctacagccactgcagaagatgggctgaatttggacatatttcccttggacc

SEQ ID NO: 715618 - DNA, 686 bp, Homo sapiens
ttaacagttggcagagattagttgacatcaagctgacaaggcaactagaagatgaatggcacttggaaatgggaatctcagagtttaagaaggggaagggatcaagaaaaggaaaaatgaatcctgacagttaagtgaaagggcatcaagtatcattgctatcttcaggagacctctttatcctaaaataataaataaataccagaaattgttcctttaaagctatataaaatggcaaccaaaatttcacagaggtaaaaacaaaatatttttgatggtagttttatttaaaatgagattttacattatacaatgtaaatcataatttaaaatgatgtaattacaacaagtacaagaaaaatggacaagacttytttggcatctttaatcttacaaaatagtaagataccatgatactccttgcttcaaaattaacttttataccacaaacacaaaaagtaattgttccaaaaatatttaaggatttccacaaatttctaaagatttcttagttgttttatttcaaatcactatatattaaattacataagatctttattctgtgagagtttatcacacagactttcattttttgataattttgctttattgattgaagctgttttccaaatgtgtctttgttaaattaatgaaacccacaacttttacaagatttacagttttac

SEQ ID NO: 715619 - DNA, 1286 bp, Homo sapiens
ctcataaactctggtgtgacacagcattttccagatgcgcctggttggtttctaattcccacccatttgcctccctccagacagactgaatctgactctcagggcagcagcctgggcatgcacctaagcacctgagaggattcccatgctcaggcagactgggaaaacacagcatggggaaggggcatgagatgaggagactaaggatgggcatcacagtgcggccaagagcctgaggatgctggcaggttaccttgtctctccacctaggtttctcatccacaaatgagctccttggccatgctttctgcccaaaggctgaaactctaagaaagcagggactgtgtctgccttttcactgcattatcgtcctctgcatttggcaagttttcagcaagcacctgtcggatggatggatggatggatggatgcagggatggatgcagggatgcatgatgaattcatgggagagttagtgagacagcacatcagatgtctgtatacataagaattgagacatctcatggatgagcataatctggtcactgtgcctctggcagaggagcagcagagccatccgtagaaggtgtggtgtctgacattcagaagtgtgtcccactaaaccccagcttgactcaaccaagagccctgtggaagccctgtggaagccccgctctcatcacggggtaggtagaagccaaagccaggaaaatgcaagtcactcaagtagtcccattagaacacagaaacaagtgagacttgtcatcatttagactggtacacttaggacctggctatatcttgattcaagaaaaaatcatgatgacatgagaagaaagaactatcatgaataacacaagatatgttagcaaatattattatcttaggatctttgcttgagtcaaaatatataggaactcttagaatcagcacagtttctggcactttccacccatggtacacccagaaagagccagagaaaacaactcaccttctacttctcctcagagagaaagagagcaaaatccagggcaaataaytgtcctgttttccagataggctcagcagacagttccacagacaggaatacaaaaggacaaaaagccaggggggtcttgtgggtctgtggccgggctgaggctctcagaagcagcagggcatggtgctgaaccggccttccaggctccagggcggttgtctttacccactagatggcatctttggctagattatccgcctcgtagtccttctatatcatctgggagaagtaggttggtgatttacct

SEQ ID NO: 715620 - DNA, 1286 bp, Homo sapiens
ctcataaactctggtgtgacacagcattttccagatgcgcctggttggtttctaattcccacccatttgcctccctccagacagactgaatctgactctcagggcagcagcctgggcatgcacctaagcacctgagaggattcccatgctcaggcagactgggaaaacacagcatggggaaggggcatgagatgaggagactaaggatgggcatcacagtgcggccaagagcctgaggatgctggcaggttaccttgtctctccacctaggtttctcatccacaaatgagctccttggccatgctttctgcccaaaggctgaaactctaagaaagcagggactgtgtctgccttttcactgcattatcgtcctctgcatttggcaagttttcagcaagcacctgtcggatggatggatggatggatggatgcagggatggatgcagggatgcatgatgaattcatgggagagttagtgagacagcacatcagatgtctgtatacataagaattgagacatctcatggatgagcataatctggtcactgtgcctctggcagaggagcagcagagccatccgtagaaggtgtggtgtctgacattcagaagtgtgtcccactaaaccccagcttgactcaaccaagagccctgtggaagccctgtggaagccccgctctcatcacggggtaggtagaagccaaagccaggaaaatgcaagtcactcaagtagtcccattagaacacagaaacaagtgagacttgtcatcatttagactggtacacttaggacctggctatatcttgattcaagaaaaaatcatgatgacatgagaagaaagaactatcatgaataacacaagatatgttagcaaatattattatcttaggatctttgcttgagtcaaaatatataggaactcttagaatcagcacagtttctggcactttccacccatggtacacccagaaagagccagagaaaacaactcaccttctacttctcctcagagagaaagagagcaaaatccagggcaaataattgtcctgttttccagataggctcagcagacagttccacagacaggaatacaaaaggacaaaaagccaggggggtcttgtgggtctgtggccrggctgaggctctcagaagcagcagggcatggtgctgaaccggccttccaggctccagggcggttgtctttacccactagatggcatctttggctagattatccgcctcgtagtccttctatatcatctgggagaagtaggttggtgatttacct

SEQ ID NO: 715621 - DNA, 1286 bp, Homo sapiens
ctcataaactctggtgtgacacagcattttccagatgcgcctggttggtttctaattcccacccatttgcctccctccagacagactgaatctgactctcagggcagcagcctgggcatgcacctaagcacctgagaggattcccatgctcaggcagactgggaaaacacagcatggggaaggggcatgagatgaggagactaaggatgggcatcacagtgcggccaagagcctgaggatgctggcaggttaccttgtctctccacctaggtttctcatccacaaatgagctccttggccatgctttctgcccaaaggctgaaactctaagaaagcagggactgtgtctgccttttcactgcattatcgtcctctgcatttggcaagttttcagcaagcacctgtcggatggatggatggatggatggatgcagggatggatgcagggatgcatgatgaattcatgggagagttagtgagacagcacatcagatgtctgtatacataagaattgagacatctcatggatgagcataatctggtcactgtgcctctggcagaggagcagcagagccatccgtagaaggtgtggtgtctgacattcagaagtgtgtcccactaaaccccagcttgactcaaccaagagccctgtggaagccctgtggaagccccgctctcatcacggggtaggtagaagccaaagccaggaaaatgcaagtcactcaagtagtcccattagaacacagaaacaagtgagacttgtcatcatttagactggtacacttaggacctggctatatcttgattcaagaaaaaatcatgatgacatgagaagaaagaactatcatgaataacacaagatatgttagcaaatattattatcttaggatctttgcttgagtcaaaatatataggaactcttagaatcagcacagtttctggcactttccacccatggtacacccagaaagagccagagaaaacaactcaccttctacttctcctcagagagaaagagagcaaaatccagggcaaataattgtcctgttttccagataggctcagcagacagttccacagacaggaatacaaaaggacaaaaagccaggggggtcttgtgggtctgtggccgggctgaggctctcagaagcagcagggcatggtgctgaaccggccytccaggctccagggcggttgtctttacccactagatggcatctttggctagattatccgcctcgtagtccttctatatcatctgggagaagtaggttggtgatttacct

SEQ ID NO: 715622 - DNA, 1551 bp, Homo sapiens
ggatccaaagttaggagtgctgctgctgcttctcccagggatgggtctgcctcagtatccctgcagagtcagtcctggggtgttggggcagccgtgcacatgtggtctctgtggccggtgttccagtgggtttcagagcagcggctgaaactgtcaatgaaacccccaatgtctgacatctcaggaggcttctcaggtctcccacatggcagcttttttttttcctctttaaaataaaaactttttttcatccttcactaagaaatagcatttccctatacacctgacctcagcaatgtacaccgtaccaaataattacaaatggtaagtgcttttgtgaaaagataatcaacatgccagataaggaaagaaatacaacattaaaaaaaaagaggccataattgtccatacatttggcaaacatacaaagaaaatggacaatactgacacgtttcagggtatcgggcaaaaggattctctgttaagggtggaaactggtaacatcaactctagatggcccatttacacattatttggagagattaaaaaagtacccatccattgaaccagcaattcaatgtgtaggagtgtagcctgcaggtcgcaggtgcacaaagactgtgtaaagggaattggctgcaaaaaggtatttatttgcaaaacactgggaatgagttggaatcaatttataggttgatggttaagggttatgtacagttgttggttgccagcaagagaaacagactctagttgattgaagaaatttaatagatatcgggcaggtcagataaaggatgagaagattagggaattataagtagaaccccatgaaggctggtggataagaagtccatgtgtatacctgccatgccccagttatacacagcctgcttaggacacagctttgttgaattacctgtagaccccagactctgttgaagcattcttgcttccatcacgaataactactgaactttttttgttttgttacatccttccctcagaattttgaaggtccctgataagacatctttgaggtcaggcataaatcatcacttcacatcttgacggcaatgcaacgaagacaagtatctgtctctttgggtctgtctaacaaggagcaaagcctggcctcccaccagcatccagacaatagtggattccctctccatagatgtcaaaaaagaaacagatgctcccgcaggtgaaatgagctctggtccacaatgcaacgcaggctgtgcagaaaatcaaagaggaaccaacccagaagtatcccccaggacaaatcattaagggggaaaaggcaagtggtacaaccctttattttatgattctactaggaaaaaaaatagcggcattccttaaaatattgagayaactggcaggtagaatgaaccaaaaactattaacaggggttcccaggagaatggaggacaattgaaacagggtgtgaagcggagaggcataattcgttctagtgatcctgtcattctcgcctttccaatgatactatattggtgaatgcattgcccagataacatttaaaaa

SEQ ID NO: 715623 - DNA, 1557 bp, Homo sapiens
gtttaaaacatgtttaacaagcatgaatacatatatatggtcatgtgagagtgagtatacaagcagataatggtctggccatctacatagataaaactctgacccacaacctgccaagaaaaccaaccccttatccactgtaaccagcgcaggaagtcacctgctgtgtacaagtcagacatgcaggatgtcagattactatctccagcaaacagtccaggaaggcaaacaatatcttcaggcaccatgggccctaaacaagatttgattcataaccaccagatttcctaatgtttgcccctgatttaaaattagatggctggccrtggtggctcacacctgtaatcccagcactttgggaggccgaggcgggcagatcacgaggttaggagattgagaccatcctggctaacatggtgaaaccccatctccactaaaaatacaaaaaaaaagtaaactggcatggtggcaggtgcctgtagtcccagctacttgggaggctgaggcaggagaatggcatgaacccgggaggcggagcttgcagtgagcagagatcatgccactgcactccagcctgggtgacagagcgagactctgtctcaaaaaaaaaaaaaaaaaaattagaaagctgaagagacaccgtcctaaccaatcccaggggtgccccacttctcatgagcctcctacagctttagaatgtggacagcctctaattagggcatgcctgcagtcttcctgattctcctatctggggttcctgcttttacatttttgctaaatgcaagggacggtggctgcctcccttggtatagcaagccctggataaatcgtttcttcttgctcgctgctgggtgagcttctattatttccatagtgaccagtcatcatcaccttgtcatcagcagcatgtcaatgtagcgtggaaagtggggctggtggatggagatgtcttttgcagagccagggattccacgtggagcatttacattgggacattcactgttgagggtgcttcccctctcccctgcagaccacccccaccaagggtcaacccaagacccccaagctcactttctttcctccaggtcttcactctgatgtcaagtcgtttcatctctctgagttcctctttctttatttgctagaaagggatcctgccctccctttcctatgactcttaggtttgttctgtgataaggtgattcaaggggtagacactgcttcataagctgacccacagtgactgctggaaatgaaagaggttggctgggctcagtgcttcatgcctgtagtcccagcaccttggaaggccatggtgggagcattgcttaaagctgggaggatcgttggaagcctgggcaacatggcaagacactcatctctacaaaaataaaaataaattatctaggtgtggtggtgtgtgcttgtagtcccagctactctgacggctgaagtaggagaatcccttgagcctaggtgtttgagactgcagtgagctaggattgcatcacctcactctagcctggacaacacagtgagaccctaccttcaaaaaaa

SEQ ID NO: 715624 - DNA, 1418 bp, Homo sapiens
aatagttgaagcaatgttgagaaatccaaccagtgtaccaacgtggatttctttatacctacgattcaaactggagctaatcgtttttctgggcttgttggttctattaagaaaatttctttagccttcacttgagtaattttattttctatttatttgagatggagtcttgctctgtcccctaggctggagtgcactggcaagatcttggctcactgcaacccccatctcccaggttcaaacaatattcccacctcagcctcctgagtagcagggactacaaaagcacgtcccaccacacgtggctaatttttgtatttttagtagagatgggttttcaccatgttggccaggctggtttcaaactcctgacctcaaatgacctgcccaccttggcctccccaagtgctgggattacagacatgagccaccacacctggcccacttaagtaattttaaatttaaagcccaagatagaatgatatgaggctatgttttattcaacctctatagaaaacaaatagctttttattctatttagtagtttgaaatgacagccctaacaaaattttcttcatcctgaaaatttccaaacttcttataacttacccctaattttgggactgcagcttaagtgtattagattaaacaccataaaaagctgcaagacgctcttttaagggaagaggaaactggtcagagaaacgcctccaattttcatcgccaacttgatttttaaatccatgaaggatctgtaagagtgaaaaaccattaatttatcaataacaagagaaaaattcagatcagcatagcttctgaaatctaacacagctgatttttttataaattttatccattttaaagtagcaattctcaaacttcgtaggattctacaccattccctgctaatatggtctggctctgtgtccccacccaaatctcatcttgaattgtactcccataattcccacgtgttgtgggagggacccagtgggagataactgaatcataggggtagtttttcctatactcttctggtggtagtgaataagtctcatgagatctgacggtttgataaggggaaaacactttcacttgattctcattctctttcttgcctgctgcgatttaagacttgtctttcaccttccaccatgacagtgaggcctccccaaccacatggaactgtgagtcgaattaaacctctttcttttgtaaattacccagtcttgggcatatctttttgtgtgygtgggggggacagagtttcactcttattgctcatgctggagtgcaacggcatgatcttggctcactgcaacctccacttcctgggttcaagcgattctcctgcctcagcctcctgagtagctgggattacaggcatccgccaccacccctagctaattttttgtatt

SEQ ID NO: 715625 - DNA, 630 bp, Homo sapiens
ttaaaaactaggcttagcctgctctctggtgaactcatgaaatagctgggatttgcccactcctccctgctcccctgacagaagcattctccctttcagaccttttcttttttcttcaagtggtccgcactgcatttcccctttgtaccacttcaaaaccaagccttgaaaaataagtgcgattttactttctcattattcttctctactgcccccatttcccaagccaaggtatgtttttattatttttattttataatttattttyattttttatttttgagatggggtttcgctcatcacccaggctggagtgcaatggcatggtctcagctcactgcaacctccgcctcccaggttcaagcgattctcctgcctgagcctcccaagtagctgggattacaggcacccaccaccacatctggctaatttttgtatttttagtaaagatggggtttcaccctgttggccaggctggtctcgaattcctgacctcaggtgatccgcctgccttggcctcccaaaatgctgggattacaggcaagccatgtttttaaatattgttttttctggtttcctaattgctctgttttcagtacaaacattttagaaagtacagaacagtgtaaa

SEQ ID NO: 715626 - DNA, 2988 bp, Homo sapiens
catgctgtttcaagagagtgacacttactgcctaattctctagtgagataatagcatggttcattttccagtcaggtgtaatcttttgctttcaagtagatatggcataaatgagtttaagcctgaaatcctggctaaaacatatttcatgattaattagtcccttttagaaactcgattaaatgctggatgccacacattaaaatggagaggtgatgactgacagcatagataaacatgggtgtgcataaattgtctctgacctgatttaaaaacttaaactgaaaatttaacatcgaaatgaatattatgataatgtgacatgtccttcattttctcagccattgtaacatcattgagttttaccatagtgtgaatactgacattgtttcattaactttaatatttgttttagtcaaagtgcatacttcctacagcttaaaatattgtgattgtctttagaacccttcaggttttatagaattctaaattttatattcattctctgcttttcctttgagctagttttgagatgaattcaggctatcaccaccagactacaagtatagggtattgacaataactgcttgatgagacttttgatattaagaactgcaaagtaatcgggtctatttaaaaaaaaatttttttttaattagaaaactgagattcagaggagttatttgtagtcatggtcacacaatactttttaatgaatctaaaacctggatgttgttctccacatttatctgatttctttttaagaaaatatctaaatgccttggttattcccytcatagaaagacaaacttaatcatgtagaaatcatgaatacaatctaattttattgtagtgattctataattttatccttcacaatattcttacttccaggccaagaaaactcaacttgactgattgatatgagggtatattttgttgtaactacctttctgctgatctgagaacccagggagtagggtgccctagcaatctatccagggaaaaacattttatgtgtttaatatggtttggctctatgtctccacctaaatctcatcttgaattgtaatccccataatctccatgtatcaagggcaaaacctggtcagaggtgattggatgatgggggtggtttcccccatgctattcacatgataatgagtgagttctcatgagatctgatggttttataagtgtttgacagttcctcttatacatgcattctccctcttgcctgcagccatgtaagaggtgcctacttttccttctaccatgattgtaagtttcctgaggcctccgcagccatgtggaactgtgagtcaacctctttcctttataaattacccagtcttggtagtattctttgtggcagtgtgaaaactgactaatacagtgttgatggaatagaatagaaaatagttttaataaattttccaattatagcaacttaaattgggaaaacgagagaagacagaaaataaaagcttactataataaaatttaaatttcacaaaaatgttaaaatatgaataaacttagaaaaaaataatgtggtaccaaaacctcaaaaataacaatataatttagaagataaaaatactagaaagaatttaccctgtaaacaaacatgagatatttaaaaagcagaaaagaaatactttgaagtttaagattgttttaaagaagttttatggattaaacattttgcattgttaccttaattatccttctccacgtcgtcctgataaattacatcaatccttcaaaattcaacatgaaatcatcctttaacatctttggaatttgtaaataattctaattttaaactacagtgtgatgtttgtatccttgtgcctgtttataaactgatgactcctttggagtaggtattagaataatttttccatgattcacaggacttagtggtggacaccacaatagccattgtgtaaatatgtttaaatggatccagattatctgcttgtcaaaaacatatataaaacaaaatgataatgaaagatagccaaaaaaaataatgatttcaagcttatatgaaatcttattatatccttcaaatgatttactgaaatctttatggtaaaaaaaaaatttttaaattatgacaattatgtctcaaaaggaaaaactgaagttagcacagttcttcagctaacaaactgacttacaaattactatctttgaacaagcaaagaatctgataaatcattgtattatagccacattaacagtaggatatgtgtttacaagagaaattttttacattttgactgtcttagcttgggttccactggaagctaaccctgtggtagggatttaggtatgtttagttaatttgagagataaatccaggaagcacaggtgagggaacatgaaaccaggaagaaggaaagcctagagatatcatgtaaatgagcaggtgaatgttgtagatcactaggctgaatcctgctatggtccctcatgtggagtatgcctcataattatcccattgtggaacctgaagtccatggtatttatccttagattcctacccttcattttttgagagcagacctgagggcattaactgctggagaaagctttcagcagagaaacagaggtgcagtcactggagatgggaagcaatccctgcctagaaactgtcagtagacaatgcaggtgaactgagatgtgggctgagagtgtaagaagtggagtgtcaacaatgttggatacattccctgtgggtatgttaggctatgtgaggatagatcactagacaagtatctgaatatatttaagggacaaccatctttaaacgtatttctatgcacaccaataataagcagtatggttgggatattttctaaagctagcatatttctaaaatacagcaaaacacattttttaaaggtagtaatatcaaatgttaaatacaggtgtttaagcttagtgaggaggagccagtgaacaaaacaaagttaa

SEQ ID NO: 715627 - DNA, 2988 bp, Homo sapiens
catgctgtttcaagagagtgacacttactgcctaattctctagtgagataatagcatggttcattttccagtcaggtgtaatcttttgctttcaagtagatatggcataaatgagtttaagcctgaaatcctggctaaaacatatttcatgattaattagtcccttttagaaactcgattaaatgctggatgccacacattaaaatggagaggtgatgactgacagcatagataaacatgggtgtgcataaattgtctctgacctgatttaaaaacttaaactgaaaatttaacatcgaaatgaatattatgataatgtgacatgtccttcattttctcagccattgtaacatcattgagttttaccatagtgtgaatactgacattgtttcattaactttaatatttgttttagtcaaagtgcatacttcctacagcttaaaatattgtgattgtctttagaacccttcaggttttatagaattctaaattttatattcattctctgcttttcctttgagctagttttgagatgaattcaggctatcaccaccagactacaagtatagggtattgacaataactgcttgatgagacttttgatattaagaactgcaaagtaatcgggtctatttaaaaaaaaatttttttttaattagaaaactgagattcagaggagttatttgtagtcatggtcacacaatactttttaatgaatctaaaacctggatgttgttctccacatttatctgatttctttttaagaaaatatctaaatgccttggttattcccctcatagaaagasaaacttaatcatgtagaaatcatgaatacaatctaattttattgtagtgattctataattttatccttcacaatattcttacttccaggccaagaaaactcaacttgactgattgatatgagggtatattttgttgtaactacctttctgctgatctgagaacccagggagtagggtgccctagcaatctatccagggaaaaacattttatgtgtttaatatggtttggctctatgtctccacctaaatctcatcttgaattgtaatccccataatctccatgtatcaagggcaaaacctggtcagaggtgattggatgatgggggtggtttcccccatgctattcacatgataatgagtgagttctcatgagatctgatggttttataagtgtttgacagttcctcttatacatgcattctccctcttgcctgcagccatgtaagaggtgcctacttttccttctaccatgattgtaagtttcctgaggcctccgcagccatgtggaactgtgagtcaacctctttcctttataaattacccagtcttggtagtattctttgtggcagtgtgaaaactgactaatacagtgttgatggaatagaatagaaaatagttttaataaattttccaattatagcaacttaaattgggaaaacgagagaagacagaaaataaaagcttactataataaaatttaaatttcacaaaaatgttaaaatatgaataaacttagaaaaaaataatgtggtaccaaaacctcaaaaataacaatataatttagaagataaaaatactagaaagaatttaccctgtaaacaaacatgagatatttaaaaagcagaaaagaaatactttgaagtttaagattgttttaaagaagttttatggattaaacattttgcattgttaccttaattatccttctccacgtcgtcctgataaattacatcaatccttcaaaattcaacatgaaatcatcctttaacatctttggaatttgtaaataattctaattttaaactacagtgtgatgtttgtatccttgtgcctgtttataaactgatgactcctttggagtaggtattagaataatttttccatgattcacaggacttagtggtggacaccacaatagccattgtgtaaatatgtttaaatggatccagattatctgcttgtcaaaaacatatataaaacaaaatgataatgaaagatagccaaaaaaaataatgatttcaagcttatatgaaatcttattatatccttcaaatgatttactgaaatctttatggtaaaaaaaaaatttttaaattatgacaattatgtctcaaaaggaaaaactgaagttagcacagttcttcagctaacaaactgacttacaaattactatctttgaacaagcaaagaatctgataaatcattgtattatagccacattaacagtaggatatgtgtttacaagagaaattttttacattttgactgtcttagcttgggttccactggaagctaaccctgtggtagggatttaggtatgtttagttaatttgagagataaatccaggaagcacaggtgagggaacatgaaaccaggaagaaggaaagcctagagatatcatgtaaatgagcaggtgaatgttgtagatcactaggctgaatcctgctatggtccctcatgtggagtatgcctcataattatcccattgtggaacctgaagtccatggtatttatccttagattcctacccttcattttttgagagcagacctgagggcattaactgctggagaaagctttcagcagagaaacagaggtgcagtcactggagatgggaagcaatccctgcctagaaactgtcagtagacaatgcaggtgaactgagatgtgggctgagagtgtaagaagtggagtgtcaacaatgttggatacattccctgtgggtatgttaggctatgtgaggatagatcactagacaagtatctgaatatatttaagggacaaccatctttaaacgtatttctatgcacaccaataataagcagtatggttgggatattttctaaagctagcatatttctaaaatacagcaaaacacattttttaaaggtagtaatatcaaatgttaaatacaggtgtttaagcttagtgaggaggagccagtgaacaaaacaaagttaa

SEQ ID NO: 715628 - DNA, 1550 bp, Homo sapiens
ataacttttcggttattgtcatggaaaagtgcagtaacttctggatgttgccacagcaatgataaactgtattggcactggtgggtgtgtcttgtggagagttgtttttggtgtctcttccctgttttagccagtctttaatctggtccacagttaagtcccacttcctacttccatattattatacacgtgtagtatatattgatattataacatcagtggataattaaatttttaaaatatgtcaagtcttttttcaaaatggttgtgccattttgatttccatcaacaatgtgtgagagttccagttgcttcacatattgacaaacatttggcattatcagccttttaaattttggtcagcctaataggtatatgatggtaactcatgtggatttactttttgtttctgtgataactagaattgttgagaatttttatgcttattttgtccatttgaatatattttgttaattgttcaagtgtattgcttatcgaattagtttgttaaattatcatctgtgggtaagagatatttatacattattcacatttatagtacaccttataaatatgacatatttcattataagtatataaattcatagtaacacaaatctaataatgttggccaggcacagtgactcacacctgtaatcccagcactttgggaggccaaggtaggtggatcacctgaggacgggagtttgagatgagcctgaccaatatggtgaaatcccatctctactaaaaatactctactaaaaatacaaaaaaattagccgcgcgcatggtggcttgcacctgtagtcccaacaattcgggaggctgagacaggagaattgcttgaacccagsaggcagaggttgcagtgacccgagatcgcgccactgcactacagcctgggagacagagcgggaatctgtctcaaaaaataatgataataataataataataatgttatgaattactattatatactatatcattgtattagtctgttcttatgctgctgataaagacatacccaagactggataatttataaaggaaagaggtttaatggactcacagttccacaagactggggaggcctcacaatcatggtggaaggcacgtgaggattatgagagctacacttcaagatgagatttgggcgggaacacagccaaactgtatccatcattaatatttatattcatttattatatcagcttgattttcttccatgttcttttctcaaaagttgtatagtttctccctagttttgtgtattcatttgtgtaaatcacaactttttttttattatactttaagttctgggatacatgtgcagaatgtgcaggtttgtgacataggtatacacatgccatggtggtttgctgcactcatcaaccggtcatctatgttagttatttctcctaatgctatctcaaccctatccccccaccctccaacagccctcggtgtgtgatgttcccctccctgtgtccatgtgttctcattgttcaactcccacttatgaatgagaacatgtggtgtttacttt

SEQ ID NO: 715629 - DNA, 1550 bp, Homo sapiens
ataacttttcggttattgtcatggaaaagtgcagtaacttctggatgttgccacagcaatgataaactgtattggcactggtgggtgtgtcttgtggagagttgtttttggtgtctcttccctgttttagccagtctttaatctggtccacagttaagtcccacttcctacttccatattattatacacgtgtagtatatattgatattataacatcagtggataattaaatttttaaaatatgtcaagtcttttttcaaaatggttgtgccattttgatttccatcaacaatgtgtgagagttccagttgcttcacatattgacaaacatttggcattatcagccttttaaattttggtcagcctaataggtatatgatggtaactcatgtggatttactttttgtttctgtgataactagaattgttgagaatttttatgcttattttgtccatttgaatatattttgttaattgttcaagtgtattgcttatcgaattagtttgttaaattatcatctgtgggtaagagatatttatacattattcacatttatagtacaccttataaatatgacatatttcattataagtatataaattcatagtaacacaaatctaataatgttggccaggcacagtgactcacacctgtaatcccagcactttgggaggccaaggtaggtggatcacctgaggacgggagtttgagatgagcctgaccaatatggtgaaatcccatctctactaaaaatactctactaaaaatacaaaaaaattagccgcgcgcatggtggcttgcacctgtagtcccaacaattcgggaggctgagacaggagaattgcttgaacccaggaggcagaggttgcagtgacccgagatcgcgccactgcactacagcctgggagacagagcgggaatctgtctcaaaaaataatgataataataataataataatgttatgaattactattatatactatatcattgtattagtctgttcttatgctgctgataaagacatacccaagactggataatttataaaggaaagaggtttaatggactcacagttccacaagactggggaggcctcacaatcatggtggaaggcacgtgaggattatgagagctacacttcaagatgagatttgggcgggaacacagccaaactgtatccatcattaatatttatattcatttattatatcagcttgattttcttccatgttcttttctcaaaagttgtatagtttctccctagttttgtgtattcatttgtgtaaatcacaactttttttttattatactttaagttctgggatacatgtgcagaatgtgcaggtttgtgacataggtatacacatgccatggtggtttgctgcactcatcaaccggtcatctatgttagttatttctcctaatgctatctcaaccctatccccccaccctccaacagccctcggtgtgtgatgttcccctccctgtgtccatgtgttctcattgttcaacwcccacttatgaatgagaacatgtggtgtttacttt

SEQ ID NO: 715630 - DNA, 591 bp, Homo sapiens
taacaagtttgaaaaaagatgcacaaatctccatgttgratattcccagtgcacattaataccatggaaaaggaacttatttaactttgttttcccatactttgatctctctgtttctacataacttggaaatgctggtctagatcacagaacaaccaagagagaggggagtgatgtgaacccacagcctttttgactttcacagtctaccgcagtagactttcttctatgagatcatttatatttataagtttattataatatacacaagtttatcacattatacatgtttgccacacagtatacaacagctaccttctatttttttttttactagttcaataatgtacattaagtttatctgattatatagatggaatactgaagggagaaaataggaccctaagaggaaattacacaggaccattttgggagaatagagacagacacacaacctagagggattatgtccaagctaagcacatcagtagtgacttaaaataaatagtggcatgttgaggaagcagcccaggttccaggatttaggtgtcaccattaatcatacccatcacattgacaggacactctata

SEQ ID NO: 715631 - DNA, 637 bp, Homo sapiens
atgggggtgtgttgatttcaaaaagttatgtaagtaaaacactacaatgcaggcccaggcccaaggtggtggaaagcaagcccaggtgagtgcagcaatgaggtggtcttcctccaccaccctaccgctacatgatccagggaagtcaggaaggggtggagagatgggagccatcaatgagtccctcccatctctactggaagtaaatctttccctttcttgatcctcatagtggatggtggcccaagggtaacaaatgtccaggataattcactyagattaagttgacagacaggaaatgataaaaagagattaaattagctgtaaagttgtgagtgtgtgtatctgtgtgacagataaggtggtcaagacagtgctatggggtagctgagaaggttgactgtgctgacactctggaaagatgagttcaccttcagagaatcccagatattcatgaggttcttcctaaatggaaagcatgcaggacaaaatgcagaaatggccttagttctcataacagatgcctcccctaggctgaaacccagcctggtgccctgcagctgatactggatcttttatgttgttctaaattaaattcagagcaattcagcctctgccacaagtactattatgtggg

SEQ ID NO: 715632 - DNA, 637 bp, Homo sapiens
atgggggtgtgttgatttcaaaaagttatgtaagtaaaacactacaatgcaggcccaggcccaaggtggtggaaagcaagcccaggtgagtgcagcaatgaggtggtcttcctccaccaccctaccgctacatgatccagggaagtcaggaaggggtggagagatgggagccatcaatgagtccctcccatctctactggaagtaaatctttccctttcttgatcctcatagtggatggtggcccaagggtaacaaatgtccaggataattcactcagattaagttgacagacaggaaatgataaaaagagaytaaattagctgtaaagttgtgagtgtgtgtatctgtgtgacagataaggtggtcaagacagtgctatggggtagctgagaaggttgactgtgctgacactctggaaagatgagttcaccttcagagaatcccagatattcatgaggttcttcctaaatggaaagcatgcaggacaaaatgcagaaatggccttagttctcataacagatgcctcccctaggctgaaacccagcctggtgccctgcagctgatactggatcttttatgttgttctaaattaaattcagagcaattcagcctctgccacaagtactattatgtggg

SEQ ID NO: 715633 - DNA, 1608 bp, Homo sapiens
tcccattgacaaaatatagtaattctcggtcactgaaaatgtcaaatcctagaaaacatagcattcctacgagtgatgttaacatcgttcccgaacagttgttggccaaagattcactggatgaatctgatttttccgaaatagattattctgatgattcagacgattcccatgttagttctgtttagaaataattccaagaacagtttttatattttattttcacattgaaaatcagttatatttgcttcagcctcaaatagtgtgtttatgtaaaattaaatgagcgctgacagtgagctgcaccttttattttttttttatttttatttttatttttttttgagacagaatctcgctctgtcgcccaggccggactgcggactgcagtggcgcaatctcggctcactgcaagctccgcttcccgggttcacgccattctcctgcctcagcctcccgagtagctgggactacaggcgcccgccaccgcgcccggctaattttttgtatttttagtagagacggggtttcaccttgttagccaggatggtctcgatctcctgacctcatgatccacccgcctcggcctcccaaagtgctgggattacaggcgtgcagccactgcacccagcacacttggctcttcatacagagcacaaagttcagagactggagtagaagtcgatttgagtgaactgagatgcatagagacttgttttttgatggaaggagaaaagacaagggccttggctttgttctgtttttgtcagttcgtgtctggtagtgtgggaagactgccacaaaacagcttagccatggcttcagtctccaatcacggtcaatggactctgagcccttatagagaaaaagctcacaggtgtgaagcagaaaacagtggaggagttcagggaagatttgtaagacactgattctctaagtaccgctccagggtttcagtgacaggctgtggagagcctccactgcccttccaggtcacttcacaccccttgcatgcctatttcagcattggcctcgagtgtggaagtgcattccccagaagagaaccaagtgtggccagtgctccaggctctcctaacagcagaggaatgagagagttctatcataattctgcactggagagataagttggaatggcttctaaaaaaataaagatgttttgaaaatgaaagttttactttttaaagaaatatcaatggcattttataatcttagccaagtatgagaataatgaaattaatttatattttaccacccatcattcccagaaacatttttatagttacccttcctagaagttccaatgacatgttcaacagcttattttcctgtactgctgctaatatgcataccaagaaatgtctttctttgtttggttcaactgattgtataaagccttcttgattatattactcagaattgtaactgctgcttcctgggtgccarggacctttatgaagaagttaattagctatttccttttaaaggatgttcagacatctgcagagaataattaatccagtgttgtgtttccagtgtatatatatcacataaaagtagacaagaatgatttttatgttagcgatgtct

SEQ ID NO: 715634 - DNA, 1292 bp, Homo sapiens
acacacacacacacacacacacacacgagactgtccactcttacctgctcaaggaaagtgcctgtctctggagaaatcattgtaccacaaggaatccaaaggtgggactgaggatggatgaaggactcggcaatgctcaggactagagattccttccctctccctggccccttccatggctgttcaaaaagtcctaaagcaggaaacccattaaaaacatctacctgcaaacacagactgtggaagagaaggacgaagagtaaacctcacaaagaagaatcaaatttccacccactttgtccttccctccaatatcctcactatatatccttacagaccctgttttttctttgttctacatgggaaatcctgctttctaaaggagaatgtttgagaaagtgaccactagatgagaacatgatgaagagctgagagactgaaggtgttgaagacaagcttatctacttaatttgccaagatcctagaaggctaatatcatttttccttgttgaaatgctggaaattcttagtgagtctcctagttgcctccttatattttgcttcaggtaaaaaaaaaaaaaaaaggaatattctttaatgaaacaattcttgaaatgtttatacttttccaaaacaatataatgtacacaaaagtaaatatggggacaaaattttaatgatagagccatagaactgcattgttgacactaacctttcagtgtcactctgagacggagtcactcgaagactcaggataggaaaggtcagggcaacctctaataacatgcttcatttagagcagctaagaggatatgctccatacgcacttgatagtatttctccccaagactctcccctcaaaccagaggcttaggtccacccaggacaccctgtgtcagcacactgtaggatatgatgccctactcctcctccttaactcgcataatcgtagtaactaatgaccacgtttattgtgtgagggtctcagtgcttttcatgtacaatcttgtttagtatccatagtcacaaacactccaagaaatagatattattatgctamatccataagtaagaagattaaggatttacagatcctcattgacaatagtgttaaaggatgtaactgcaactgcaatgttctttctctttcccacagctaggttataaagcaactatgtctgctctttttcattcacttctactcaatttttttcttcctaacctcgaattgactctttttctaatgataacagaatcttagaattacacatatgaagactataaaatattta

SEQ ID NO: 715635 - DNA, 2236 bp, Homo sapiens
attcaccagagaaaaaaagaaggaacacatctttacgggcagaaaataaataggtgcttaaaaagttaaagtcattaatttacggttggagttagttctcttggtgtgctttgcccttgtcaaaggacattggagtattggaaaaatatttattgagtgcctatgagacatgacacctgtgccttgtactttacaagccttctctcttttaacccccgtaacaaaccaatgagcctcaatattttctcatccacgaaatgggagtgaattcaaagattaaacacatgtcaagtgcatacacattgcagtgtttggcatagagtagatcattggtttacacgaccttcatttgacagatacagaaaccaggcctcagagatactgaatacccagccttcaatcacacagccagaggagaggaaaagaggactttcacccaggtatgtccattacataccttcacagtctttcaacagagccatacaaactcctttggctagggtyaaactggagcagaactgtttaataaacaaggtatgtactcaataagacaagaatacgctgtccataacaaaaactctgtggtttgaggtttgattattcctcaccctccatttcagaaatattgggattcctgaaatccccatcaattctgattgtttaaagcatagatgacagatgatagatagatagatagatagatagatgatagatagatagatagatagatagatagatagatgcgtaacaagtagacatgtatactttagtgtaattttactgccatgcatgaccacttccaggtgctctgttttttaaaccttatctgtaatttgtataattaacaagtaaacacttttagataattttagcaaccactgagcaggtgaggtgttaaaaggctcctaaagtcatcacacgcagactatatcctttgatttagcaaaaaccaaaccatatgtgagtatcaaaaaacataaaaccaccaggctccacaaagtcactgaggcaataaaatgagccagttttaaggcaagaagaatgacccccattaaaaaggagttttagaaattaggtatggtaatatggccacagtccgtaggagcagtagtcaaatgaaaatatatttaaagaatggttctggcccctgtggtatgtgtaccctaggagagccaccatctctttaataactttgctgtatttctttaccacattattgaaaactgtttaatgagcagtttccctcagagaagatatcagattctcagaagcagttgccatgagagacactctttaaagcctgatgaaattatgtttatccttttacatttcttcctggggcagttgaaatggccgtgtttttattttcttcttcttttggaaatacatttctgcgtatggaaacaagatatgttcaagatagaaaatttgaaaatacaatgcataaagaacagcagagatcaatgtgatctctctttccaaacacagaggtaactcttaatattctgatatatcacttcttaaatttgaattcctgcgttattcttatatgagtaataataaatacatgtatgttaatcacatttttatactacaattttgtatctcacttggttttttaaattatcattatcccatgttaatcgtaagtcattttgtaatacagacaatagctgcctgaatgcttcaacatcttccagtctgcagtgttcttcttaactattaacatctacacctgctaccaatcattaactctaagccttaaggcagcatctctttttagcttactttttgcatgcgggtaccatctctcttccttcagcatagctctatgattacacatgttgacaccaaagtcagagagccagataccaacttgctcatccaccaccgactagctgtgtgatttgcgataagtcacttacactccctaagcctccatatttttccctccgtgaaatgggtgtgaatccagactaaaaggtaaaatgcacaagtgtatagcatagtgcttagcacagagtaggtcatgggcttgcattgacttgtaaaagtagaaagtcaggaaaaatagcaggataaattatattgataatggtagttataataacatttctccaaacactattaacacaagattcttgagtatagtggactttatttaaagtctgaagataaatttacagcataaggcaagaaaaaatgcaagcttatttcagactcttcctagaaattt

SEQ ID NO: 715636 - DNA, 2236 bp, Homo sapiens
attcaccagagaaaaaaagaaggaacacatctttacgggcagaaaataaataggtgcttaaaaagttaaagtcattaatttacggttggagttagttctcttggtgtgctttgcccttgtcaaaggacattggagtattggaaaaatatttattgagtgcctatgagacatgacacctgtgccttgtactttacaagccttctctcttttaacccccgtaacaaaccaatgagcctcaatattttctcatccacgaaatgggagtgaattcaaagattaaacacatgtcaagtgcatacacattgcagtgtttggcatagagtagatcattggtttacacgaccttcatttgacagatacagaaaccaggcctcagagatactgaatacccagccttcaatcacacagccagaggagaggaaaagaggactttcacccaggtatgtccattacataccttcacagtctttcaacagagccatacaaactcctttggctagggtcaaactggagcagaactgtttaataaacaaggtatgtactcaataagacaagaatacgctgtccataacaaaaactctgtggtttgaggtttgattattcctcaccctccatttcagaaatmttgggattcctgaaatccccatcaattctgattgtttaaagcatagatgacagatgatagatagatagatagatagatagatgatagatagatagatagatagatagatagatagatgcgtaacaagtagacatgtatactttagtgtaattttactgccatgcatgaccacttccaggtgctctgttttttaaaccttatctgtaatttgtataattaacaagtaaacacttttagataattttagcaaccactgagcaggtgaggtgttaaaaggctcctaaagtcatcacacgcagactatatcctttgatttagcaaaaaccaaaccatatgtgagtatcaaaaaacataaaaccaccaggctccacaaagtcactgaggcaataaaatgagccagttttaaggcaagaagaatgacccccattaaaaaggagttttagaaattaggtatggtaatatggccacagtccgtaggagcagtagtcaaatgaaaatatatttaaagaatggttctggcccctgtggtatgtgtaccctaggagagccaccatctctttaataactttgctgtatttctttaccacattattgaaaactgtttaatgagcagtttccctcagagaagatatcagattctcagaagcagttgccatgagagacactctttaaagcctgatgaaattatgtttatccttttacatttcttcctggggcagttgaaatggccgtgtttttattttcttcttcttttggaaatacatttctgcgtatggaaacaagatatgttcaagatagaaaatttgaaaatacaatgcataaagaacagcagagatcaatgtgatctctctttccaaacacagaggtaactcttaatattctgatatatcacttcttaaatttgaattcctgcgttattcttatatgagtaataataaatacatgtatgttaatcacatttttatactacaattttgtatctcacttggttttttaaattatcattatcccatgttaatcgtaagtcattttgtaatacagacaatagctgcctgaatgcttcaacatcttccagtctgcagtgttcttcttaactattaacatctacacctgctaccaatcattaactctaagccttaaggcagcatctctttttagcttactttttgcatgcgggtaccatctctcttccttcagcatagctctatgattacacatgttgacaccaaagtcagagagccagataccaacttgctcatccaccaccgactagctgtgtgatttgcgataagtcacttacactccctaagcctccatatttttccctccgtgaaatgggtgtgaatccagactaaaaggtaaaatgcacaagtgtatagcatagtgcttagcacagagtaggtcatgggcttgcattgacttgtaaaagtagaaagtcaggaaaaatagcaggataaattatattgataatggtagttataataacatttctccaaacactattaacacaagattcttgagtatagtggactttatttaaagtctgaagataaatttacagcataaggcaagaaaaaatgcaagcttatttcagactcttcctagaaattt

SEQ ID NO: 715637 - DNA, 2154 bp, Homo sapiens
atgagaatttatggtttgtagggctagactccctagaccccttagataggaatttgggcaagatttaaaaaatcagagcttagtcctcaatttcaacacataaacaatagaagcattattaataaaaattttgtagttacttttgtattatgtctttgaaatccagtgtagatcttatccttagggtacatcacaaatgttccgcagtcacatatgactattctttacaatgttgctctagactataaactccttgaaagcaggaatcatgttctcctcaatcttgtatctcaaacataaatgtgcttgatacataggaaaaatttatatgtttgataactgacttaaagaatgaatttcaaagttataatttttctaatgcatattccctcaatctttcctcaatctttcctcaatctttcctttgtaaattttgaggaatctcatgccaatattcccatattcactgccagcctttgttaatataatatggaatttgctactcagttttaatatgaaatttgctactcagttatggaatttgcttctcagttatttttagtagtctctcttcacttttagaaataatttgtacattgcaaaaattttattaagaaattaatagcaataatttagatcattggttttgttgttcaaagccaatcactcatttgtttctccttttatgccacagtaattctcaaggttacattatttgtcacatcatactgggttgtagaagtaaaatacaaaaactcaagccaatttctactctcatactttttttttttttgagacagagtcttgctctgttgcccagactggagttcagtggagcgatcttggctcactgcaacctctgcctcccaggttcaagtgattctcctgcctcagcctgcctcgtagctgggattacaggctctcttattttcgtttcataagtccttaatttttttcttactcttcttataaaacgtgtgtaaaaaaggtacttgagtgatgcattccatgtgtcctataataattgtcaatatatttctgttgatgccaacttaactacatcctcaagtttatattgttatctcatctcctgaaaaatgtatgtatattgctccattatcttcaaacataaactgttatgaggaaacatctgagcccagaatgattgctttttattagcattgtttttcctgactagtgcttagattattcctctctaacatgtcaaatttttttttcagaaagtctattttatttaatttcctctggaacatggtaaattattttaatctttgcaaaggctcaaatcgttttgctagttctagaaatatttcttctgtttttttttaatctctgatttctctttatttgttttattttcttattttctaacttagtaatagtttatattgactttctaagccatgtatcagtatcatatttttttcacacctttgtaatttatttcactttctcttctatacttaaagtatgtctcaattctcctctacacagaattgcacacagttgtgctgttgggacttaattttagcctacactccatttgccaaacagtgtccactgagagaagctgaagccactaagagctgtaccttggtcttattctgtcatttataggagaacgtttttcctaattcatcagcccagataaagtacctttgtctaaattgtataaagggggytctaaaattatattcagagagttgttttctatttttcattaataatgtgttttaacttcttactggtctttctgtgtctctatcagattcatagttttactgagcctgcatctcaactggtcacctaagtgttataaacctacctgattaccctctattcatttcttcccacttactactttttttttaattttccctcaacatttgattatcaatgtctgagaagtgtacagtaaacacactcataccccaggacctagatctacaattaacattttatattttatcacatatctctccaattattcatttctctattaacccaccatccatcttaccttttttgatgagtttccaagtaaacaccagaatgcctcaccagaagccaagcattcactagagcttaacatttctttataatttttctctgggctattgtttatatataatg

SEQ ID NO: 715638 - DNA, 644 bp, Homo sapiens
aaaaatgaataaataaatttaaaacacacatacatactaccttttttgagtaatatatagcatagactgtaaaagaaatgtgtagacattaaaattacaattttgaatactatgtagaaaaataaggttaacggaaaaaaataaaaataaatgaagaaaattttagtatgcaattatatagcatacaaatttcaaaaagattagcagttaagttataaaagtaaataccatgttaggatgctggaattatgaacarcctttttctaacattttaacaatattaattgctcttaagatttacagagaaaagaacctattttgttttttcacagatttatttctggaaaggtaaatcttttgtcattctcaccactgtcataagaaacttttgtgttttatttgctaaggaaataattcaaattttagttcatgctaaactcttaaattttcctataacagagggaataatcttggagaaaaccagaaaatctcacttcacctttgtgagatgtctcccagttgaagggaaacccaacctgacatcagcgccccagcatttctctcggctcacttaactatctagaaagcaaaataaaatcatgaagacgagggagctgaaacatgtgtgaaattattagagcatc

SEQ ID NO: 715639 - DNA, 644 bp, Homo sapiens
aaaaatgaataaataaatttaaaacacacatacatactaccttttttgagtaatatatagcatagactgtaaaagaaatgtgtagacattaaaattacaattttgaatactatgtagaaaaataaggttaacggaaaaaaataaaaataaatgaagaaaattttagtatgcaattatatagcatacaaatttcaaaaagattagcagttaagttataaaagtaaataccatgttaggatgctggaattatgaacagcctttttctaacattttaacaatattaattgctcttaagatttacagagaaaagaacctattttgttttttcacagatttatttctggaaaggtaaatcttttgtcattctcascactgtcataagaaacttttgtgttttatttgctaaggaaataattcaaattttagttcatgctaaactcttaaattttcctataacagagggaataatcttggagaaaaccagaaaatctcacttcacctttgtgagatgtctcccagttgaagggaaacccaacctgacatcagcgccccagcatttctctcggctcacttaactatctagaaagcaaaataaaatcatgaagacgagggagctgaaacatgtgtgaaattattagagcatc

SEQ ID NO: 715640 - DNA, 584 bp, Homo sapiens
ataaaattgaacgtacatttccagattatgaaatctttgggttcctttaacgttatattgaataactgtttgcttttttatcttatatcattaggagccaaaatgacagctgagattcttaacttccaatttaacagaaactttcttatatccctggtggaaggattactcccttggtaccaataagatgtcttaaagcagcagagcccagatttagggtcagacttcttcaaccagcagatcttcttaaaccagcagagtccagattttgaggtcaaagratcagcattttacaagtagtttttagtgtgtaatagtaataaatatcagctccacttctgttccttggtttctggacccatgtattctagctatggaaaaagattgcatgatatatcattcagtggctcagagcatagaggactgaaaacctaactcttaaggttgtgctcacagtaggtacagcaactgaatattgaatagctactgaataactttcaaagagaagtcattgctttgaaaacggtccagtgaaatcaccacgtggctagatgtaaaggtatcctgaagtccaaggttaagac

SEQ ID NO: 715641 - DNA, 1344 bp, Homo sapiens
aaaattggagacatcaaaatggctgactataaatgtcccgcaaatatatggactcggaagaaaggaacaggcaataaattgacagctatgacttgactagagtatcagagtaagagtgctggattgcaatggaagagtgagaatgtaccagtggttattggaagtctaagagagcagcatggaggagcttagcttctgcacccctgtctgtgtcaccagattggatctgcttgaagtcaggaggaatatcccattgcaggaaaaaggtaaacagaagacccccacaagcctccaatacccctacgaataattacaatacttaaaaccaaagagtctcacagtccccactgacctgaacccaatttggagaattgccagggactacacaatattgtccgggattaaaagcacaggtgtgcactccctgccccacctccagggagccaatcttctttagcatggccccatcttaaatccagagccatctctggagtgcatgctgctctgggggccagtagccaatgcacctttacagcactagggcttcatttttattatgccagaccaacatgggtttctgaatgccacaactccagccatgtggagcttgagcccaggattggctgtaattctggtcctgcacagcaaagaaaccaatccctgctataattaccaatcactgctataattttggcaaataatattccatgcaaatgaagatgtatatatataaaccaatcactgctataattttggcaaataatattccatgcaaatgaagatgtagataaacaaattcagtaggtttgcaggacacaaaattaatacatagraattagtaatacttctatacatgaaaaacaagctaaaaaggaaatcattaaggcaaccccatttattgtagccacaaaaaataaaataaaagatgtaggaataaagttaaccaaggagttgaaagacctctacaaggaaaagaaaaaaacactgatgaaagaaaaaaaaaagatacaaacaaatgaaaagacatttcttgcacatggatcagaaaaattaatattgttaaaatgaaaatactacccaagtgatctgtagattcatcacaatctcaatcaaaacaccaatggcattcttcacaggaatagacaaaataattctataatttgtatggaaccaaaaaagaccctgaatacccaaagctatcctgagtataaagaacaaacctggaggtatcaaactacaagactttaaaatatattaaattctgtagtaataaaaacagtatgatattggcataaaaattgacacatagactgatggaacaaaagacacataaaagtaatctaa

SEQ ID NO: 715642 - DNA, 1331 bp, Homo sapiens
ttttagaaagtaaatgtacaacttacttttttgttttgtctagattgctttttaaatggatgcatatttacayagcctcagggtacatgtgataatttaatacattaatataatctgtaacgatcaaatcagtgtacttgagatattcatcactttaaatatttctcttttcattatgctagaaccattctaattcttcctctctagctattttgcaatataaaatactttattgtaaacagcattaggtcttatttcttctagcaagctatacacctgtacccattaatcagcttcttttcatccccctctcctccttaccctgcttagcctctggtaacgaccaccctactttctatcttcatgagatccaaatttttggctcccacatgtaagagaggagacgcaatgtctttctatgcccagtttatttcccttaacataaagtcctccaattccatatatagttgcagatgacaagatttggttgttttttgtggctgaataatgaccccattatgtatacataccatattttccttattcattcatccattgattgaattttctttttctgtacaaattcatatatttttcagattctacttaagcaaaagtgttttgatcctgaataaaatttaaatgttaaaaatgcatctcctaaaatatgtgtattaagcttttataaaaaattaaactttagtgttttatgtgatttgactatataataaaatattctctagattcataaatttagtattcatagtttaaattttattggtttctaggtcctgataaatttccaaacctgtccaagtactgatttaaccaccaaagattatgcttttctgtgtgtgagattatgctttcttgtacgtatgagattagaagatattttcatgtaacattaaaaatcattataaatgttgacgttaactcattactaataagtattacaaagtaattaatgagatgttatttttatgtaatggctttgatactaatcatctaataaatatcttttaaactttataaaatttggaagtagaaaattatagtttatgtttcacacacacatttttcacaatcaatttgtcattcttttgatttgaattagcttgggccaaaagtaaaaatctcatttttcttatccacctccaattctctgagtgtgcactttttggttaaaatcaaaactagattaaaagcacagatatcataagaggcagattcttgagccatttcctgctgttcttaaatctatgcttttttgtctaactctttctggatggagaataatgtgttttttatttccttatttccattttttg

SEQ ID NO: 715643 - DNA, 1327 bp, Homo sapiens
gtgactttgtcacctgatttgagttgctaggttcctgactgcccgctgtgtgtgagtcactgctttgggtctcagttgagcaactctgtttcgatggtggttctatcttgtcctctaggctttgtagggcctggtcctgtgctctccccttaactagttatctagatcctgcccctgccctttggtttaccctgactgcccattttgcaccatgggttcaggctcatctctatctgacttgaaatgagaaaaatgaaataaccaagttacttcttctctccttgtgctggttatctattgctatgtaatctattaccctgaaacctagtgacttaaagaaacaataattattttatctttcctattttctatggatcagtacttttgggaagggctcaggtgagaagttctggactggggtctgtcagcatttgagtcaaaagatggctaaggtggagctgctggggctcaccccgcatttctctctctgtagtctcatgcttccctatgtgtctctcaatgggctaggttaggcttcctcacaacatggtatcctcaaagcagtggaagtgcttacatgggggcccagggctcccacatcagtgttctggtgaaaagggcagaaacagaattttatgacctaatcttgcaagtagtgttttgttcgccatactcaataggttgaaaacagtcacaaaacctagcccatatttaagaggggggacttaaatttcatttcttgatgggggatgtggccatctttggaaaatataatctgtaacagccctctactagatactcttctccagtttccctccaacatgacagctaatatctttggaaaagtggatgggcaaaagagactgtgtcttctcacctcagaggaatgcctgttcatctgtaaaaccagatcaaatgcccctccatcctctctgaggcctgccttaactctccatagtgctgtttcttcttctgagctataaaataacaaaattgctgggcgcagtggctcaagcctgtaatcccagcactttgggaggccgaggcgggtggatcatgaggtyaggagatcgagaccatcctggctaacacggtgaaaccccgtctctactaaaaatacaaaaaattagccaggtgtggtggcgggtgcctatagtcccagctactcgggaggctgaggcaggagaatggcgtgaatccgggaggcagagcttgcagtgagccgagatagcaccactgcactccagcctgggcgacagtgcgagactcggtctcaaaaaaaaaataataataataaaataaaataaaataaaataaaataaattaa

SEQ ID NO: 715644 - DNA, 1327 bp, Homo sapiens
gtgactttgtcacctgatttgagttgctaggttcctgactgcccgctgtgtgtgagtcactgctttgggtctcagttgagcaactctgtttcgatggtggttctatcttgtcctctaggctttgtagggcctggtcctgtgctctccccttaactagttatctagatcctgcccctgccctttggtttaccctgactgcccattttgcaccatgggttcaggctcatctctatctgacttgaaatgagaaaaatgaaataaccaagttacttcttctctccttgtgctggttatctattgctatgtaatctattaccctgaaacctagtgacttaaagaaacaataattattttatctttcctattttctatggatcagtacttttgggaagggctcaggtgagaagttctggactggggtctgtcagcatttgagtcaaaagatggctaaggtggagctgctggggctcaccccgcatttctctctctgtagtctcatgcttccctatgtgtctctcaatgggctaggttaggcttcctcacaacatggtatcctcaaagcagtggaagtgcttacatgggggcccagggctcccacatcagtgttctggtgaaaagggcagaaacagaattttatgacctaatcttgcaagtagtgttttgttcgccatactcaataggttgaaaacagtcacaaaacctagcccatatttaagaggggggacttaaatttcatttcttgatgggggatgtggccatctttggaaaatataatctgtaacagccctctactagatactcttctccagtttccctccaacatgacagctaatatctttggaaaagtggatgggcaaaagagactgtgtcttctcacctcagaggaatgcctgttcatctgtaaaaccagatcaaatgcccctccatcctctctgaggcctgccttaactctccatagtgctgtttcttcttctgagctataaaataacaaaattgctgggcgcagtggctcaagcctgtaatcccagcactttgggaggccgaggcgggtggatcatgaggtcaggagatcgagaccatcctggctaacacggtgaaaccccgtctctactaaaaatacaaaaaattagccaggtgtggtggcgggtgcctatagtcccagctactcgggaggctgaggcaggagaatggcgtgaatccgggaggcagagcttgcagtgagccgagatagcaccactgcactccagcctgggcgacagtgcgagactcggtctcaaaaaaaaaawaataataataaaataaaataaaataaaataaaataaattaa

SEQ ID NO: 715645 - DNA, 1798 bp, Homo sapiens
taaaagttggacttctcagtattgtgtttagttctttgaaaacataaaagcctgcaatttctcgacaaaacaacacaagattttttaaagatggaatcagaaactacgtggtgtggaggctgttgatgtttctggtgtcaagttctcagaagttgctgccaccaactctttaagaaggcgacaggatcagtccttctctcgggttctggcccccaaggtcagagcaagcatcttcctgacagcattttgtcatctaaagtccagtgacatggttccccgtggtggcccgtggcagcccgtggcatggcgtggctcagctgtctgttgaagttgttgcaaggaaaagaggaaacatctcgggcctagttcaaacctttgcctcaaagccatcccccaccagactgcttagcgtctgagatccgcgtgaaaagtcctctgcccacgagagcagggagttggggccacgcagaaatggcctcaaggggactctgctccacgtggggccaggcgtgtgactgacgctgtccgacgaaggcggccacggacggacgccagcacacgaagtcacgtgcaagtgcctttgattcgttccttctttctaaagacgacagtctttgttgttagcactgaattattgaaaatgtcaaccagattctagaaactgcggtcatccagttcttcctgacaccggatgggtgcttgggaaccgtttgagccttatagatcatttacattcaatttttttaactcagcaagtgagaacttacaagagggtttttttttaatttttttttctcttaatgaacacattttctaaatgaattttttttgtagttactgtatatgtaccaagaaagatataacgttagggtttggttgtttttgtttttgtattttttttcttttgaaagggtttgttaatttttctaattttaccaaagtttgcagcctatacctcaataaaacagggatattttaaatcacatacctgcagacaaactggagcaatgttatttttaaagggtttttttcacctccttattcttagattattaatgtattagggaagaatgagacaattttgtgtaggctttttctaaagtccagtactttgtccagattttagattctcagaataaatgtttttcacagatagacttgattgtgtcttcctatttgcaaactgcctttggagctttctgtctacttttgtgcactattttacaaaaatcccaggagaaacatgaggcaggtggcttcagccccactttacagatgagaaaactgagacccaggagatgacggtgacgggctgaggtcctaaccgcagcctgggaggtgctgggctgttcactttgcagcgtcaagttgcaggggtcagcaaacgacagccaatgggacccaagtcaggacactgcctgtctgtaaataaagttttattgacaccaccacacccatttctttatgtatatagtggcgtttacgctaccatcagcagaactgagtaggtacagcagaaaccatctggaccacaaagctgaaaaatactcactgcctggccagcaaagcttgctggtctcttctcttgggaggatgacttgastgtaggagtctgagaccagcctgtagaccccaactctacaaataaataaaaatattagccaggtgtggtggtgtgtttctgtagtcccagctactcaggaggttgaggcaggaggctgattgcttgagccccagagctagaggctgcagtgaactttgattgcaccacggtactccagcctgggcaacagaatga

SEQ ID NO: 715646 - DNA, 721 bp, Homo sapiens
ggtgtgatcacagctcactacagccactacctcctgggctctagtgatcctcccatgtcagcctcccaagaagctgggactacaggcaggcactgccacgccaaactaatttttgtatttttttgtggtgatggggtttcgccatgttgcccaggctgatctcgaactcctgggcttaagcgatcctcccgctgcagcctcccaaagtgctgggattacgggtgtgagccaccatgcccagccctctgtttaagtttcttgaggacgcaccacactgtttgtatagtcgctttgccattctgtagtcccaccaacagtttacaaagggctccaatttccccacattctcaccaacgcttgttattttctgtttctttgaaagtagccatcctggggrgtttgctttcaatgcagtctctttttttttttttgcctctgcagagggttcacccagccttcttgtctgtttcaggaccatgggaattttttcacatacacgggtagtggtggtcgagatctttccggcaacaagaggaccgcggaacagtcttgtgatcagaaactcaccaacaccaacaggtttgtggaatcagccttcttatttccttgctgatgcatatctgccgagtcttggttctgttttgggcctcatgtccagcaagtgatagtctcattaggagcgtggtagaacatagcgaagcctggcatttggttcctccct

SEQ ID NO: 715647 - DNA, 1200 bp, Homo sapiens
agttccttcctctgctgtcctgacataccttctctgagcatatatttacctaagctgattcatacccatccttgagactgagccccagcatcactgcattcagaaaaccttttctgactccacatttgattggacactctttttatacttggtttcatagcctcctcttctttcatctcaataatgttttatcaccggcctatcatcatggtcatcgcattgtgaacacagcacagaaagggatgctgaaactggtggagagtgtagactttactgtcactttagccttcacctcctacttatcatgtacaccttcatcatcatagtcttcttcactatcttcttagtggtcattcatatcagtgctatatttgctttgtatgcattgtgttatgtaatctccatgtcaactctatgacctaagtgataccacgtattcctgtgcagcatgcaaaggcttgcagagattagaaacatgctaaggtttatgctgcgattcatacctgcagtctggctgactctagaactctaagcagaatgtcatggaacctcaataacagcaaataattaacattctttaagagtatgatccttcccttatcctccacaatacttattaatatgtcacatacagagacaatattgaaaagcatctgttgatataacaaatttgaatgtcatgtgctaagagaagcaaaacctgcttattcatggcaaaggcttttgcttctcagagttagaagtacctaattatggcacaagttctcatctttctttggaatatcatcaacacataatttctctaatctttgggatgtcagagattggcccccactttctatccaagactggttgcatataccttgamcacgttcttacgagttgagagtcttggttaggaaagtgtctattgaataaatcagagtgattgagttgtaaaagtcaccctacatccatatgtttaaggcattatttattcccataaaaataatttctatataataaaataaaaatctaattatttgagaaatagatagtgtctgctgcatatataatcatttctgtttgcctttgtagtgcttaggggaacttacatgtatgtctgtggaggtatcaaaagatgaaagtatatacaaatgaccctcatcttgaaagctaatgaggaaagacttggggacggtgtcctattatctgagtgac

SEQ ID NO: 715648 - DNA, 3277 bp, Homo sapiens
  misc_feature 2531, 2532, 2533, 2534, 2535, 2536, 2537, 2538, 2539, 2540,2541, 2542, 2543, 2544, 2545, 2546, 2547, 2548, 2549, 2550,2551, 2552, 2553, 2554, 2555, 2556, 2557, 2558, 2559, 2560,2561, 2562, 2563, 2564, 2565, 2566, 2567, 2568, 2569: n = A,T,C or G
  misc_feature 2570, 2571, 2572, 2573, 2574, 2575, 2576, 2577, 2578, 2579,2580, 2581, 2582, 2583, 2584, 2585, 2586, 2587, 2588, 2589,2590, 2591, 2592, 2593, 2594, 2595, 2596, 2597, 2598, 2599,2600, 2601, 2602, 2603, 2604, 2605, 2606, 2607, 2608: n = A,T,C or G
  misc_feature 2609, 2610, 2611, 2612, 2613, 2614, 2615, 2616, 2617, 2618,2619, 2620, 2621, 2622, 2623, 2624, 2625, 2626, 2627, 2628,2629, 2630: n = A,T,C or G
ctgcagccttgaagtctcagactcaagctatctttccacctcagcctcatgagtagctgaaactacaggtgcatgccaccatgcccagctaagttttgtattttctgtagagacaggttttcgctacattacccaggctgtcttgaactcctggcctcaagtgatctgcctacctcggcctcccaaagtactaggattacagacctgagtcaccatacctagcctagaattcttataaattatagatatcttaataatttgagrttttaaaaattaatttcatgcccagtatttttatttaacatttttcttaaggtttttttcatgtagttaaatattatgcataattctgtgagcaggcaaagtattgctgacttgggatcagctacattcagcaagctgccctactaacgcgtgctctgggaggcaggaccatgtggtgacagctcacagcctctgcagtctgctgacctgtattctgaagccaacacttccttgctgttgtgatggttaaatttattatgtgtcaacttcgctagactatggtgtccagttgtttggtaaaattccagactaaatgttgatgtgaaggtatgtctcagatgcagttaatgttttcaatgagtagactatgagtaaagcaaacggccctccttaatgtcagtgagcctcagccaatgagtttaaggccttaggagaaatatactgtctgcccaagaggggatccactgccttgggggctccagcctcctggtctgctctgctgattttggacttgccagcacccacaatcatgtgagccaatttcttaaaataaatctttctgtctgtgtctcactgtctctctgtctctacctttctctttgtctgtctctttcttttctctctatacacacaaacacacagatatattatctatttacctatcatatatctatttatctatctatctatctatctatctatctatctatctatcatctattctttttttctgaagaaacctggttaatacagctgtggaattcaagtaactagttaaagattttttgcctcattttttaatctataaaatagaaataatgatactatttacctcacagagttgatatgagaacaagattcatcatggctttaatgtgtttagaaaatatcttactgacctcatagctcacgggtgtgagctattattattacagctattttacttcttcatttccagtgtggagactgtatttataacattaggatatgcattattgtgcatacatctccctatttatttctgtattatttctttaaaatatataccagtgtctaaccagggtcagttccaaatcccacatgctgtggtttttaccacctctctgacatctgcctcatttcaccattactagctctattgccattcctcaaaattagcaatgcacttccccgtagaaatttgttatttgtgatcatctctcctgtccagaagcaaggtattatacaagtgcatttactttagtcacattataatggctgttttcttttaagaccattctagatactggatgaaacagaagactcataatttccccattcgtagactttactttttatgatgattttgactgagaaatctggattacattgtctgacttagcttagaaatacaaagacatactcaagttttcacaaataatggggcttgtcatatgaagagaagcaagtaacaggatgttgtctgagagcagggtggccaggccttggcgggcagatgtgggggtgttgctcaggcaaccctggcctttgatttttctacaagagggttgtctcttattcttcataaacacactccaggatttggggaatccacatgcctcccttctctggttgtctctgcttatccctggatcctcccccacttatcatctggtctttggcttcctcacatctggactctgggttcttccctgtgagggtgctccatcccctgcgagggtattccttgccctgcgagggtcctccatctcctgtgagggtgctccatcccctgcaacggtgctccatcccctgtgagggtactctatctcctgtgagggtgctccatcccctgtgaggatgctccatctcctgtgagggtgttccatcccctgtgagggttctccatctcctgcgggggtgctccatcccctctgaaggtgccccatctcctgtgaaggtgctccatcccctctgagggtgctccatctcctgtgtggatgctccatcccctgtgagggtgctccatcccctgtgagggtgctccattccctgcaaggatgctccattccctgatgcctccactctgtccacagagaggctcccatggggaccgattggcaaaggatacaaaatctcagtttgtcagaaggaataagttcaagagatcaatattacacaacataaagactaaggtcaataacagtatatcatattcttgaaaataaatgtaaattttaagtattctcacaaaaaatagtaagtatatgaggtaatgcatatgttannnnnnnnnnnnnnnnnnnnnnnnnnnnnnnnnnnnnnnnnnnnnnnnnnnnnnnnnnnnnnnnnnnnnnnnnnnnnnnnnnnnnnnnnnnnnnnnnnnnaattgttatacatattatatatatgtttataattgttttatctttctaataaattaactgctttatccattgtcaatgtaatatggtctattttattctggaaaaattttttgtttaaaagtctattttgtctggtatcagtacaaccactccatctttcttgtggtttactgattgattgcatactatatctttttccaacccactttcaatctatttgtgtttttgaatctaaagaacattgcctttagacagcatataattggataatttttaattcagtctgacaatctctgtcttgtgattatttattccattcacatttaatattattctggatatagtttgatttatgtttgtcattttatatcttctgtctcatgtgtttatttgttcctctactactccattatacctttgttttgtattaagtgaatattttctaataaaacatttacatttgtttacaagcattgttgccgtatttatttaaacatttgttgtagttattctatggcttacaacatacatcatatcttatccaaaaagcttgatttatactggtttaatccaagtagaatactactgctatatagctctgttataattccctttttttgtggtattattattatgcatattgcatc

SEQ ID NO: 715649 - DNA, 2667 bp, Homo sapiens
tgacttttgacccagcataaaccctagcacattgcacacccaccctgtctcttgagtcaaaagacgctgtaccgcccagatgcactggcccgcagaggagcaaaggcggctccctggagggagagaggatggtccatgtcctgggggctccaggcatccccctcccttctaaggggacatagaacatctgaggaaagttgataactttctcaagaatcagctcatttcagcacaaatcttgatgtatagatttgcttaataaaatgaatttatgaatgaggaatgagggacatcacgcttgaaaagtttcattcaaaaaacaccgaagaagaatcccatccactgaggaggcagaaagtggtcagaaagtgttactttcacacaactggtaagaaaacgttaatatagttacagaattataacctgtccgagtcccccgaggaagtgaaaaaacccacagacgagagaagggactcagaaccccgttcacatttggcagagttgggaggtgaaggtgacggacataaaggcactgaagaagactgtggacatttcttcgctttctgaaagccaggtgtaggctgatggcacagagcctgggtccccagagcctcagagagtcctcactcaggagtgcctgcccctggggcaacagccccccaacctcccacctctccaaggcctgcactaccacacttggttctcagttggccagagtctagaaatcgtgaatatatttatcctccttacagaagcagaaaggccctagaatattttaattcctctcttcttgtcttgattatatgtaatagttttgagtattttatctgcattgtattttaacctgatgaaatgctggtattattctaagtcaagcttatttatattaatcacatacttatcattcttccctctttattcctccttcaaaactttcatccgggattactttccttcgacctgaaatacaacctttaacatttcctttaaagcagatcttctggtggctcattctcttattttttttttatttgtctggattttttttttccctgtcctcattcttaaattaggtcatataattacaggttgagaaatgtattttcttagcacattgaaggtacctcactgaaatctggtttccattcttgacattaaaaatcttgttggccagtcatgatggctcacacctgtaattcctgcactttgggwggccaaggtggacggatcactcgagctcagaagtccaagatcagtcggggcaacatagtaagaccctggctctatctaccgcccccgctcctggacaaaaaaaatcttgtcaatttaactctggctcttttgcagatacatgtcttttttgtcttgctactttctaggatttatttctacactatcaattctgttccatttatttataatttttctcattgtagtaaatttcagtgatatttctgatgttgaacatgtttcttacattactgagataaacacaagttattaaggtgtatattttaatacatttatttgttttatctaatacatatttaagggtttgcatttataatcataaatgaaataagttctgaagtttttcattttcctccatttttataatcgaacttgtattaacataataaaatgttcattttattaaatagttaagggtagggagaggaaaaagtgtttataagatctttgataactgtttcaaatccatttaaggttgttagtctactcaggaattttgtttcttttcaacccattgttaacattctgtatgttctagcaactcatctattacacttggaccaccaaagttattcatatatacttattttatttattttttctataatctctgttatctgcttggctgtttcccaatttcttaatttagtgttatattttcttctgtttttcttttctttttttgcaatgcatggtgcatgagcttgttacatccaacaactggggttgttaaacttcttaattgttttgtttttgacattatttgatgacctgggcttgtaaaactcctttattgctttttttcaggcattactttctgttaaactgatttctgcctcatatttattatatttgtcttttctactttcttcagtagtttaatttgttcatcttccaacaatttcttttgaaatcctagctcattcatgtattctgacgaatgtaaaggtataacattattttcatgatctgatgttagtatgtgctccaaatactgacacatagcatttacattgttgatttataattatttcccaattttgtcaatgttgtttctcaactcaaattattttgtaatgttatataattttcagatacctgaaatttctttttgctttcatttagttagcattttctcattttattgctttaataaagtgggtataaagttgatccttggaaattaatgtgtgtgtgtttgtgtgtgtgtacactagtgcccagtaaaatttcatgaataattcatatattattttaaaaacaaaatctctgttttctgtaaagttcatgaacacacatatatatatatattaaagcttattgttattcatatcttctatgtctttgcttattttttactttcttgttctacctatttaggaaagttatgataaagaattcccaactatatttgtt

SEQ ID NO: 715650 - DNA, 848 bp, Homo sapiens
gaggttactaatggcatttgtaagaagcaggcaagcatccaatcagggtacttataatatcatacagtttacagtgacatattcactaatataacaggcgtaaaggccatctcatttcatttcacttttatatttgtcaatacaattattccatcataatttgtcattacttaactttgtcagtcctcattgmcatgacttcacaagttgtgaattccaacctatattttatgtcgagcccataattagaaaacaaaaaatcagatagactttaactcattttattcatttcatatgaaatcattggtttttaacatcatggccatgctattttgctatcattggccttatatcatatgggtaatttcaaaatgcatctctctgctgcacctaatctgatcctactgcatgtcaagtcacactccttacccatactcccctgttttataagatgtagtgtctgatttaagcatttgattttatcttgtattttattcactgtggtaaaataatgtattggtgtaacaatttgaaaaatcttgtatttgttcctgtccaggaaggtagccaagggctttgtattatcttctctcagagaatccagcagggagaatagaaacaactgaagttatcagttcttcctgtctttggtactggccaatctttagaagagttgtcacagatgttggaggggagaagcaattgagaaaaaaaaaattaaaagagactgagaaggagagaaaacaatactgtagatctttctaatagagaccctgggtattagcagacagcaccctgagtaatagaagactttagagaggaataggcaccttatgctccaagataga

SEQ ID NO: 715651 - DNA, 848 bp, Homo sapiens
gaggttactaatggcatttgtaagaagcaggcaagcatccaatcagggtacttataatatcatacagtttacagtgacatattcactaatataacaggcgtaaaggccatctcatttcatttcacttttatatttgtcaatacaattattccatcataatttgtcattacttaactttgtcagtcctcattgacatgacttcacaagttgtgaattccaacctatattttatgtcgagcccataattagaaaacaaaaaatcagatagactttaactcattttattcatttcatatgaaatcattggtttttaacatcatggccatgctattttgctatcattggccttatatcatatgggtaatttcaaaatgcatctctctgctgcacctaatctgatcctactgcatgtcaagtcacactccttacccatactcccctgttttataagatgtagtgtctgatttaagcatttgattttatcttgtattttattcactgtggtaaaataatgtattggtgtaacaatttgaaaaatcttgtatttgytcctgtccaggaaggtagccaagggctttgtattatcttctctcagagaatccagcagggagaatagaaacaactgaagttatcagttcttcctgtctttggtactggccaatctttagaagagttgtcacagatgttggaggggagaagcaattgagaaaaaaaaaattaaaagagactgagaaggagagaaaacaatactgtagatctttctaatagagaccctgggtattagcagacagcaccctgagtaatagaagactttagagaggaataggcaccttatgctccaagataga

SEQ ID NO: 715652 - DNA, 656 bp, Homo sapiens
gctgacttctttcttcccttcatactcagacctggatacagtctttatcacttcaaacatgattgctaatttttgctgtgaacctgctgagtgggttcagacagtaagtgcttatggttgaacattcatttgtttcctaactgccatgagtcactttgctaatttgatattgctacattgttctcttaaacagtagatctgtcattatgcttaaatgtctaaccctggagcataaaaatgtttgacttagaattttatcttagtgcagcatactcacactttttccccttggattttgtctgttctgatctctcttgcagtttttctttaaaatattttcattaacagcatgattgtccactgctaatgttggaagatattttaacatttatcttcctttgtagtctgtttgtggattaaagattgatttgcaagactgcaaagtaggagaaaagtactgattattgaaatctgtcacatagctccaaagaaatgaagtcttytgagagcaaatccaattcttacagaggcccaaacactaagcttttgaagctccttgcatccttgctaatatgaatattcagccaagaggatttagctgacgctttagtttctggtacaagaggcagttccaaatccaggccagcactcttgca

SEQ ID NO: 715653 - DNA, 1227 bp, Homo sapiens
tgtaaaggcctgtgaggagcagcatgacstttgcagtgagccaggctctgatgaggccacgggtcatcagttctgtttcggggtgaacttggatccctagggaaggccgacagaggaccaggcgtcagggggcttagcactgggccacacgcttacagggtgaccagcagcagagggaccccagagacacacctgggtggacacaccccttctagtctgacccttccatagagggcactttgcgggtatcccctgagcccccagcagggaggactcccatggcagccgtgcccactgatgctggctctcctttcaatatgggagctgcctctgtggccagaggctggggctgcattgttgggatggtggggtggagaacagaaaaaccctccctcctgttccagcacccctgaaagatgcatgtgtgctcaatttacgttcttcctggggaccccttctgggggccccagactctgagagccccaggcaggtgcactggtgggggaggggctgagtcctggcctcacggctgtggggtggtgagaatgaagtaaggcggtgcggggaggctgcttggatagggctggcctcccaggaagtcctccatgcctgtcccacctcctgcctgccccggtgggtgcctctggagggttgcaggcgtggcttgtttctgggccctttgaaaacacaagtagcagatgccccatgtgcaggaggcccggagctgctccagcctgggcttcctgcccacacccagtcctcccggcctgctgggagctccccagaggcagacatagtgctgggggcaggggctgcccagtggggcaccaggacttgaggagccctcaagacctgggagggggtaccagtgggtggagtgtggggtcagtcccttcagactttcgaggctccacccacatatcaccaccttcacggcctggatcttggtgtgctcggtagccctgtgacctcgggccagtgcccccacccgcgcctctgccctgtgtctccagcctccttgcctcgtctcattggcaaggcctcttgggaggagccaggctgcccctggggtggccgtggttttcttgttgagaaccctctgggctgggcaggggctgtggcggggccgggcctgcccctcccagggtctgtttcactgccccaggccagctgtttgcagctgagagccctgtgggccgggcgggccgtctacctgtgtggctgtga

SEQ ID NO: 715654 - DNA, 1227 bp, Homo sapiens
tgtaaaggcctgtgaggagcagcatgacctttgcagtgagccaggctctgatgaggccacrggtcatcagttctgtttcggggtgaacttggatccctagggaaggccgacagaggaccaggcgtcagggggcttagcactgggccacacgcttacagggtgaccagcagcagagggaccccagagacacacctgggtggacacaccccttctagtctgacccttccatagagggcactttgcgggtatcccctgagcccccagcagggaggactcccatggcagccgtgcccactgatgctggctctcctttcaatatgggagctgcctctgtggccagaggctggggctgcattgttgggatggtggggtggagaacagaaaaaccctccctcctgttccagcacccctgaaagatgcatgtgtgctcaatttacgttcttcctggggaccccttctgggggccccagactctgagagccccaggcaggtgcactggtgggggaggggctgagtcctggcctcacggctgtggggtggtgagaatgaagtaaggcggtgcggggaggctgcttggatagggctggcctcccaggaagtcctccatgcctgtcccacctcctgcctgccccggtgggtgcctctggagggttgcaggcgtggcttgtttctgggccctttgaaaacacaagtagcagatgccccatgtgcaggaggcccggagctgctccagcctgggcttcctgcccacacccagtcctcccggcctgctgggagctccccagaggcagacatagtgctgggggcaggggctgcccagtggggcaccaggacttgaggagccctcaagacctgggagggggtaccagtgggtggagtgtggggtcagtcccttcagactttcgaggctccacccacatatcaccaccttcacggcctggatcttggtgtgctcggtagccctgtgacctcgggccagtgcccccacccgcgcctctgccctgtgtctccagcctccttgcctcgtctcattggcaaggcctcttgggaggagccaggctgcccctggggtggccgtggttttcttgttgagaaccctctgggctgggcaggggctgtggcggggccgggcctgcccctcccagggtctgtttcactgccccaggccagctgtttgcagctgagagccctgtgggccgggcgggccgtctacctgtgtggctgtga

SEQ ID NO: 715655 - DNA, 1227 bp, Homo sapiens
tgtaaaggcctgtgaggagcagcatgacctttgcagtgagccaggctctgatgaggccacgggtcatcagttctgtttcggggtgaacttggatccctagggaaggccgacagaggaccaggcgtcagggggcttagcactgggccacacgcttacagggtgaccagcagcagagggaccccagagacacacctgggtggacacaccccttctagtctgacccttccatagagggcactttgcgggtatcccctgagcccccagcagggaggactcccatggcagccgtgcccactgatgctggctctcctttcaatatgggagctgcctctgtggccagaggctggggctgcattgttgggatggtggggtggagaacagaaaaaccctccctcctgttccagcacccctgaaagatgcatgtgtgctcaatttacgttcttcctggggaccccttctgggggccccagactctgagagccccaggcaggtgcactggtgggggaggggctgagtcctggcctcacggctgtggggtggtgagaatgaagtaaggcggtgcggggaggctgcttggatagggctggcctcccaggaagtcctccatgcctgtcccacctcctgcctgccccggtgggtgcctctggagggttgcaggcgtggcttgtttctgggccctttgaaaacacaagtagcagatgccccatgtgcaggaggcccggagctgctccagcctgggcttcctgcccacacccagtcctcccggcctgctgggagctccccagaggcagrcatagtgctgggggcaggggctgcccagtggggcaccaggacttgaggagccctcaagacctgggagggggtaccagtgggtggagtgtggggtcagtcccttcagactttcgaggctccacccacatatcaccaccttcacggcctggatcttggtgtgctcggtagccctgtgacctcgggccagtgcccccacccgcgcctctgccctgtgtctccagcctccttgcctcgtctcattggcaaggcctcttgggaggagccaggctgcccctggggtggccgtggttttcttgttgagaaccctctgggctgggcaggggctgtggcggggccgggcctgcccctcccagggtctgtttcactgccccaggccagctgtttgcagctgagagccctgtgggccgggcgggccgtctacctgtgtggctgtga

SEQ ID NO: 715656 - DNA, 1227 bp, Homo sapiens
tgtaaaggcctgtgaggagcagcatgacctttgcagtgagccaggctctgatgaggccacgggtcatcagttctgtttcggggtgaacttggatccctagggaaggccgacagaggaccaggcgtcagggggcttagcactgggccacacgcttacagggtgaccagcagcagagggaccccagagacacacctgggtggacacaccccttctagtctgacccttccatagagggcactttgcgggtatcccctgagcccccagcagggaggactcccatggcagccgtgcccactgatgctggctctcctttcaatatgggagctgcctctgtggccagaggctggggctgcattgttgggatggtggggtggagaacagaaaaaccctccctcctgttccagcacccctgaaagatgcatgtgtgctcaatttacgttcttcctggggaccccttctgggggccccagactctgagagccccaggcaggtgcactggtgggggaggggctgagtcctggcctcacggctgtggggtggtgagaatgaagtaaggcggtgcggggaggctgcttggatagggctggcctcccaggaagtcctccatgcctgtcccacctcctgcctgccccggtgggtgcctctggagggttgcaggcgtggcttgtttctgggccctttgaaaacacaagtagcagatgccccatgtgcaggaggcccggagctgctccagcctgggcttcctgcccacacccagtcctcccggcctgctgggagctccccagaggcagacatagtgctgggggcaggggctgcccagtggggcaccaggacttgaggagccctcaagacctgggagggggtaccagtgggtggagtgtggggtcagtcccttcagactttsgaggctccacccacatatcaccaccttcacggcctggatcttggtgtgctcggtagccctgtgacctcgggccagtgcccccacccgcgcctctgccctgtgtctccagcctccttgcctcgtctcattggcaaggcctcttgggaggagccaggctgcccctggggtggccgtggttttcttgttgagaaccctctgggctgggcaggggctgtggcggggccgggcctgcccctcccagggtctgtttcactgccccaggccagctgtttgcagctgagagccctgtgggccgggcgggccgtctacctgtgtggctgtga

SEQ ID NO: 715657 - DNA, 1227 bp, Homo sapiens
tgtaaaggcctgtgaggagcagcatgacctttgcagtgagccaggctctgatgaggccacgggtcatcagttctgtttcggggtgaacttggatccctagggaaggccgacagaggaccaggcgtcagggggcttagcactgggccacacgcttacagggtgaccagcagcagagggaccccagagacacacctgggtggacacaccccttctagtctgacccttccatagagggcactttgcgggtatcccctgagcccccagcagggaggactcccatggcagccgtgcccactgatgctggctctcctttcaatatgggagctgcctctgtggccagaggctggggctgcattgttgggatggtggggtggagaacagaaaaaccctccctcctgttccagcacccctgaaagatgcatgtgtgctcaatttacgttcttcctggggaccccttctgggggccccagactctgagagccccaggcaggtgcactggtgggggaggggctgagtcctggcctcacggctgtggggtggtgagaatgaagtaaggcggtgcggggaggctgcttggatagggctggcctcccaggaagtcctccatgcctgtcccacctcctgcctgccccggtgggtgcctctggagggttgcaggcgtggcttgtttctgggccctttgaaaacacaagtagcagatgccccatgtgcaggaggcccggagctgctccagcctgggcttcctgcccacacccagtcctcccggcctgctgggagctccccagaggcagacatagtgctgggggcaggggctgcccagtggggcaccaggacttgaggagccctcaagacctgggagggggtaccagtgggtggagtgtggggtcagtcccttcagactttcgaggctccacccacatatcaccaccttcacggcctggatcttggtgtgctcggtagccctgtgacctcgggccagtgcccccacccgcgcctctgccctgtgtctccagcctccttgcctcgtctcrttggcaaggcctcttgggaggagccaggctgcccctggggtggccgtggttttcttgttgagaaccctctgggctgggcaggggctgtggcggggccgggcctgcccctcccagggtctgtttcactgccccaggccagctgtttgcagctgagagccctgtgggccgggcgggccgtctacctgtgtggctgtga

SEQ ID NO: 715658 - DNA, 427 bp, Homo sapiens
cctgttcactgcctctcccagaggctgctgtctggcagcagtagagccctgggaaagcaagggtggccttcatgtggaatagcagaaccttggcatgagaacctgtgccctcatctccttattttttgtcctaatggacttcttgggttaatgcctgcagcacagctcctgctgactaatgtttctgcaaaaatcagacattctttgtgctcttcctctcagagaccagataaggaagccactccctctcctgtctggcagcactctactaggacctggtgtctggygcacacctgcctgggctcccaatgtagaatccaggggaagacactcaagtaccaacctccactgccagtgtccaacttcccagctgaatgggaagggtgttgaagcttcctcaacagtcttagggttgaaggaatgaatg

SEQ ID NO: 715659 - DNA, 560 bp, Homo sapiens
  misc_feature 460, 461, 462, 463, 464, 465, 466, 467, 468, 469, 470, 471,472, 473, 474, 475, 476, 477, 478, 479, 480, 481, 482, 483,484, 485, 486, 487, 488, 489, 490, 491, 492, 493, 494, 495,496, 497, 498, 499, 500, 501, 502, 503, 504, 505, 506: n = A,T,C or G
  misc_feature 507, 508, 509, 510, 511, 512, 513, 514, 515, 516, 517, 518,519, 520, 521, 522, 523, 524, 525, 526, 527, 528, 529, 530,531, 532, 533, 534, 535, 536, 537, 538, 539, 540, 541, 542,543, 544, 545, 546, 547, 548, 549, 550, 551, 552, 553: n = A,T,C or G
  misc_feature 554, 555, 556, 557, 558, 559: n = A,T,C or G
gagcaaagaaagaactgtagttgatggctcttctttaatttaaactatgactatctttagcaatggacctctagaatttaaacagttgccagtcctgaaatgcctcccattccccttcacatttctgctgcacctgccagcacactgccacaccaagcaggaggaggaacagctttttgcaacacatctactggggctgaaggactccggcatgctgaggggagaagacgttcattagaaatcagagaagmcttttcctttgagtaaaggacccgtggtcactcttagaactccatcatgtttatatagggaattccacattcatatgcttatggctaaaagattattggagaaatatattcctcatcaaaagtaggaaccttcaagggtactgaaaacatgtttcacgacagtgggctacaacagaagcctctttatagagactgttttagaccctctnnnnnnnnnnnnnnnnnnnnnnnnnnnnnnnnnnnnnnnnnnnnnnnnnnnnnnnnnnnnnnnnnnnnnnnnnnnnnnnnnnnnnnnnnnnnnnnnnnnna

SEQ ID NO: 715660 - DNA, 919 bp, Homo sapiens
tgagtaaagatttttaacttatttgagttaacagtggattaagagaaattcttgtgaaaattaatgaagccttcaagtaattttgtaaacatgattgtttttatgaacctcctgtaaaagtcaaacagaatgacttttgtaaaagtgaaacgttcatttgcttgaatgttctgattatttctaataattttgtagttggttgttttgattttctaggtgtaaaataattttgtcttttcctttctaattttgtaccttttatttattaccttatttcattggccattactttaagaactgtgttgcataatagtggtgattgtcttgttccagactttaatgggaatgcttccaatattaaaccctcaagcacaatgctggttattggcttgagaccaagttaaccaaatgtcctcttttatattaaaagtttctgttgggaatagatattgaattctcctcaagtgccttttgagcctctttcaagatgctgtttttccctttggcttgttaacatgatgacatataatattgaataattcttgcattcctcatctgaccatgaccttcatttagtcatggtatgtagcatgcattaacatgtaattcagttgtgtttgctaatttattcatgatttttggatttacaataaaaagtgacattagtctgcagtttcttcttgttttcgtaacttggtaggaagaattggggagcttttctcattgccttggaatagttacaatagcgttgagagtgatcacatattctcaatgattgaagcaattgaagaactcatacttgaaacatgggctagagctttctttagttggcaactttctcaatctccrgtgattattgatttctttaaattttctttgcatgtattttgataattatattttccaggaaaataataca

SEQ ID NO: 715661 - DNA, 1342 bp, Homo sapiens
tcagaatgaaaagacagcctatgagtcatagcttcccctaggtgaggtcccacagacatggccccctgtactacttgtctgttcaatgatataacacggacgccatcagctcaacaaatcagaaatcgattccctagaagactggagttctcttataagttggcacaccacggtgtgtgttaacaggcaataacactaaartgcactaaagaccatgtaatttattcccaacatgctgttattctttccaaaacattagctttggagcagaacgtttgctaaatgttgtctttatttccaaagcttggggtaaagatcatatgcaaccaatgactgagagataattggccactttacagttttaacctcaaatgaactcccccgtctgagtaaatttcctggtaaaagatcccattttaatagaatgtgaaagctgcaagaaagatggagcttacagatcacagtatggtctgttagataaatgaccaggagtaatatttcttaaaaccacattttgtagacagagttaacagaaaacccaggaaaaaaatacccagtggttcagcattctcgcttaaatgaaaatagcatgtgtgttttcagctcaagttgtgccagggcttggagggaaattggcaaggattaaaaccaagagtcttttgggggttgttgggtattgtcatcctggacctgacctcacagctttctctcttggaggagaaggcaaaaagtagctgtgctaaaactttgctctaagagttgccacagagtccagaaagttcctcttcttgcagttggcttattttcactgagctggcattgagccagaagtcaagttattattttgtttaatagctgaagaaatgaccatcttgtgctttttaacctaaaggtggccttgactgcagatccctggatgtggggaagcacctaagaaggtcagttcttccggtagaatgggagggtgctcctgctgtgcatttaaagtgaggtccttggtttcctcctttggattatcatctttggtgaggtttgccttatggagaactgatgactgtgagttgtcatgtacaaagtggaaaagtagctttattgtctgaagctcaaatttcacaggcttgcactccttggtttagaattcagattcctcagtttgaaagagaacaagaaaatgtcgcaccttttaatctatttgggcagaaagaaaatttaaatctagtcagagagggtatctgtctacaagagctcatcccaaagatttcaattagttattcaagaaaccatggctaagaacacactatgagccaggaactctcctgggtcctaggggttacagaggaaa

SEQ ID NO: 715662 - DNA, 1342 bp, Homo sapiens
tcagaatgaaaagacagcctatgagtcatagcttcccctaggtgaggtcccacagacatggccccctgtactacttgtctgttcaatgatataacacggacgccatcagctcaacaaatcagaaatcgattccctagaagactggagttctcttataagttggcacaccacggtgtgtgttaacaggcaataacactaaaatgcactaaagaccatgtaatttattcccaacatgctgttattctttccaaaacattagctttggagcagaacgtttgctaaatgttgtctttatttccaaagcttggggtaaagatcatatgcaaccaatgactgagagataattggccactttacagttttaacctcaaatgaactcccccgtctgagtaaatttcctggtaaaagatcccattttaatagaatgtgaaagctgcaagaaagatggagcttacagatcacagtatggtctgttagataaatgaccaggagtaatatttcttaaaaccacattttgtagacagagttaacagaaaacccaggaaaaaaatacccagtggttcagcattctcgcttaaatgaaaatagcatgtgtgttttcagctcaagttgtgccagggcttggagggaaattggcaaggattaaaaccaagagtcttttgggggttgttgggtattgtcatcctggacctgacctcacagctttctctcttggaggagaaggcaaaaagtagctgtgctaaaactttgctctaagagttgccacagagtccagaaagttcctcttcttgcagttggcttattttcactgagctggcattgagccagaagtcaagttattattttgtttaatagctgaagaaatgaccatcttgtgctttttaacctaaaggtggccttgactgcagatccctggatgtggggaagcacctaagaaggtcagttcttccggtagaatgggagggtgctcctgctgtgcatttaaagtgaggtccttggtttcctcctttggattatcatctttggtgaggtttgccttatggagaactgatgactgtgagttgtcatgtacaaagtggaaaagtagctttattgtctgaagctcaaatttcacaggcttgcactccttggtttagaattcagattcctcastttgaaagagaacaagaaaatgtcgcaccttttaatctatttgggcagaaagaaaatttaaatctagtcagagagggtatctgtctacaagagctcatcccaaagatttcaattagttattcaagaaaccatggctaagaacacactatgagccaggaactctcctgggtcctaggggttacagaggaaa

SEQ ID NO: 715663 - DNA, 1342 bp, Homo sapiens
tcagaatgaaaagacagcctatgagtcatagcttcccctaggtgaggtcccacagacatggccccctgtactacttgtctgttcaatgatataacacggacgccatcagctcaacaaatcagaaatcgattccctagaagactggagttctcttataagttggcacaccacggtgtgtgttaacaggcaataacactaaaatgcactaaagaccatgtaatttattcccaacatgctgttattctttccaaaacattagctttggagcagaacgtttgctaaatgttgtctttatttccaaagcttggggtaaagatcatatgcaaccaatgactgagagataattggccactttacagttttaacctcaaatgaactcccccgtctgagtaaatttcctggtaaaagatcccattttaatagaatgtgaaagctgcaagaaagatggagcttacagatcacagtatggtctgttagataaatgaccaggagtaatatttcttaaaaccacattttgtagacagagttaacagaaaacccaggaaaaaaatacccagtggttcagcattctcgcttaaatgaaaatagcatgtgtgttttcagctcaagttgtgccagggcttggagggaaattggcaaggattaaaaccaagagtcttttgggggttgttgggtattgtcatcctggacctgacctcacagctttctctcttggaggagaaggcaaaaagtagctgtgctaaaactttgctctaagagttgccacagagtccagaaagttcctcttcttgcagttggcttattttcactgagctggcattgagccagaagtcaagttattattttgtttaatagctgaagaaatgaccatcttgtgctttttaacctaaaggtggccttgactgcagatccctggatgtggggaagcacctaagaaggtcagttcttccggtagaatgggagggtgctcctgctgtgcatttaaagtgaggtccttggtttcctcctttggattatcatctttggtgaggtttgccttatggagaactgatgactgtgagttgtcatgtacaaagtggaaaagtagctttattgtctgaagctcaaatttcacaggcttgcactccttggtttagaattcagattcctcagtttgaaagagaacaagaaartgtcgcaccttttaatctatttgggcagaaagaaaatttaaatctagtcagagagggtatctgtctacaagagctcatcccaaagatttcaattagttattcaagaaaccatggctaagaacacactatgagccaggaactctcctgggtcctaggggttacagaggaaa

SEQ ID NO: 715664 - DNA, 2007 bp, Homo sapiens
ctgattcccagcgagcggctggtgcaggtgtgcacggctgtcttcctagcattgcaggctctccctcctgagccagtgtctcctgtggccgctgtgtgtagacagtggaactggaagcttgggccaggatccagacacctggttccagccctggcttgcattcctcccacactcatcttcaacctgtcccctctccctgagcctctggatcgcctcctccacaaagcacaggggtcggatatatgacctcttgcggcttcctctgctgctagatcatatgagtcgataattatagacttactaatgcattaaggacagttatcctgtttattttagggggaactctctccaacttggtttgaatatagcctcaggatttatcaagtgttggatttgtcaaggtgacattttaaagaatgttctaatataattattgcttttcctgtttgcagcctgtgtgtgtctttgaatcgatgttttgggttttgtacttgcttcctgaattggtgacctacagcaaggcactacgctaccctgaactacattatgctgaacaagtaaccagatcccactgagctacccagggtgaggatggcttggaggttgtgttacaaaagctacatgttattttgcccccccacatcacagagatgaaaagtagcatgaaaaattcatcacactccaactcagtcttccctggctataggcagcctgtttctctgacttgctctcagatttgcatttccatgtggattttctgtgcttctgcatgtgtccctttcttttgtttctctttagttttttttttttttttgaagagacagggtcttgctatgttgcccaggctggagtgcagtggtgcagtcacagctcacagcagctttgaactcatgggctcaagcagtcctcctgcctcagcctccccagtataggtgtgcacagccatgcccagctaatttttatatttttagtagatatggggactttctatgttggctaggtgggtttcaaacacctgggctcaagcaatcctcctgccacagcctcccaaagcactggggttacaggcgtgaggcaccgtgcccgcccactgtatccttttttatgcccatttgccctctctctcggccagagacatggccataggggactttttggaatgggagggacctccagtttcacctcctcattgtataaaagaggagatgggagccagggccgggagtcaccacgggtaccagaagcagagtgggtcccctacctggggctctctgcctacggctggctgcctggaggcagaggtgttttatttgtagcacctccttttctttactgttaggagatcttgagactgactggccgttgccaaggtctgcactatccatgagctctgaggcactcacatggagacgtgtgacatctcccttggtgggacacctggtcccagctcaagttggaaatagcttctcaagggtcttttccccactttttctcccatctgtctcatgacaagccctttgcctctttgatcctaaatgaacatagggtgagatgatgcataggtgagctgtgccgtgcagctctcaaacatggtcatttttattttttttwaattttgcagcagagccccagtttgccgaggtttagaatgacctctttggttggcagcgttcctttctccctggaacttctctggtgggtagagtggccagggatcggcatccacaggccggggctcggccctgagcgtctgtggggcctggagcagtcgccatggctgtggagctgtcacctaggtaaccgacattccgccagcgaaacagtctgtccacagcaggaggaaataaaaaatgaaactgcagcgtcaattctttatgcactacggttttttgagtgctactttgattttggaaaaaaggctgtttcacttctccattggattttggcctccgtgcccctgtgtgaccctcacatttcctgaaccccatgtatctgtttttacagtgt

SEQ ID NO: 715665 - DNA, 2007 bp, Homo sapiens
ctgattcccagcgagcggctggtgcaggtgtgcacggctgtcttcctagcattgcaggctctccctcctgagccagtgtctcctgtggccgctgtgtgtagacagtggaactggaagcttgggccaggatccagacacctggttccagccctggcttgcattcctcccacactcatcttcaacctgtcccctctccctgagcctctggatcgcctcctccacaaagcacaggggtcggatatatgacctcttgcggcttcctctgctgctagatcatatgagtcgataattatagacttactaatgcattaaggacagttatcctgtttattttagggggaactctctccaacttggtttgaatatagcctcaggatttatcaagtgttggatttgtcaaggtgacattttaaagaatgttctaatataattattgcttttcctgtttgcagcctgtgtgtgtctttgaatcgatgttttgggttttgtacttgcttcctgaattggtgacctacagcaaggcactacgctaccctgaactacattatgctgaacaagtaaccagatcccactgagctacccagggtgaggatggcttggaggttgtgttacaaaagctacatgttattttgcccccccacatcacagagatgaaaagtagcatgaaaaattcatcacactccaactcagtcttccctggctataggcagcctgtttctctgacttgctctcagatttgcatttccatgtggattttctgtgcttctgcatgtgtccctttcttttgtttctctttagttttttttttttttttgaagagacagggtcttgctatgttgcccaggctggagtgcagtggtgcagtcacagctcacagcagctttgaactcatgggctcaagcagtcctcctgcctcagcctccccagtataggtgtgcacagccatgcccagctaatttttatatttttagtagatatggggactttctatgttggctaggtgggtttcaaacacctgggctcaagcaatcctcctgccacagcctcccaaagcactggggttacaggcgtgaggcaccgtgcccgcccactgtatccttttttatgcccatttgccctctctctcggccagagacatggccataggggactttttggaatgggagggacctccagtttcacctcctcattgtataaaagaggagatgggagccagggccgggagtcaccacgggtaccagaagcagagtgggtcccctacctggggctctctgcctacggctggctgcctggaggcagaggtgttttatttgtagcacctccttttctttactgttaggagatcttgagactgactggccgttgccaaggtctgcactatccatgagctctgaggcactcacatggagacgtgtgacatctcccttggtgggacacctggtcccagctcaagttggaaatagcttctcaagggtcttttccccactttttctcccatctgtctcatgacaagccctttgcctctttgatcctaaatgaacatagggtgagatgatgcataggtgagctgtgccgtgcagctctcaaacatggtcatttttattttttttaaattttgcagcagagccccagtttgccgaggtttagaatgacctctttggttggcagcgttcctttctccctggaacttctctggtgggtagagtggccagggatcggcatccacaggccggggctcggccctgagcgtctgtggggcctggagcagtcgccatggctgtggagctgtcacctaggtaaccgacattccgccagcgaaacagtctgtccacagcaggaggaaataaaaaatgaaactgcagcgtcaattctttatgcactacggttttttgagtgctactttgattttggaaaaaaggctgtttcacttctccattggattttggccwccgtgcccctgtgtgaccctcacatttcctgaaccccatgtatctgtttttacagtgt

SEQ ID NO: 715666 - DNA, 750 bp, Homo sapiens
taattaggttyggcctattagaatagaaatctcattatgcattacattctgtaagtttttggtgtacttttaaatttttctctctcacaccataaagaaaaactccacgagctgggactgtatgttttctatttattattttattctcagtatcttgtatagcagttcacataaatgtatgtccaattatttcttccacaaagaattatcaagtgtttttaattggcataaaaaagaaaggaaacaaaaacaaacgaaaataccagaaaaccctcaggttaatagttgatatactgcattacaattctagaatcatacctttttatactgttgaatattttcacatataaacatgatctgtctttttataaacatggtctttctatttactcaatgcatttttcatccctccataaagttaattttcttcatctaagtcctacacatttctacttacgtatttcgtctcttgttgctacttgctatggtctgaatgcttgtgtccctccaaaattcatgttgaaatctaatctccaatgttggtattaagaggtgggggggtctttgggagggtactaggtcatgagggcagaaccttcatgaatgggattagtgttcttacaaaagaggactgagggagcttgtttttctcttctgatatgtgagaaaacatggtgtaacttttcctctaggactttatgtttttaattattcttttccttgaagtacttttgacaccttagacagaaa

SEQ ID NO: 715667 - DNA, 750 bp, Homo sapiens
taattaggtttggcctattagaatagaaatctcattatgcattacattctgtaagtttttggtgtacttttaaatttttctctctcacaccataaagaaaaactccacgagctgggactgtatgttttctatttattattttattctcagtatcttgtatagcagttcacataaatgtatgtccaattatttcttccacaaagaattatcaagtgtttttaattggcataaaaaagaaaggaaacaaaaacaaacgaaaataccagaaaaccctcaggttaatagttgatatactgcattacaattctagaatcatacctttttatactgttgaatattttcacatataaacatgatctgtctttttataaacatggtctttctatttactcaatgcatttttcatccctccataaagttaattttcttcatctaagtcctacacatttctacttacgtatttcgtctcttgttgctacttgctatggtctgaatgcttgtgtccctccaaaattcatgttgaaatctaatctccaatgttggtattaagaggtgggggggtctttgggagggtactaggtcatgagggcagaaccttcatgaatgggattmgtgttcttacaaaagaggactgagggagcttgtttttctcttctgatatgtgagaaaacatggtgtaacttttcctctaggactttatgtttttaattattcttttccttgaagtacttttgacaccttagacagaaa

SEQ ID NO: 715668 - DNA, 2749 bp, Homo sapiens
ttcaactgcttctcacccagagtggactctagcagccaaagaaagccctcgggcaaggaaatgcagatactggcagttggtaggtcaggcctgggtgcacctccctgggaaggcctgaggggatataggcaaattagcaacactgtctgctacataccaaatcagagtttcttgtggtctagatggtgctttacaaatgctcatctctttgtctagcttattgtctttaccatacagaattcggcttgtttcacgtggtttttattattaaaaataagggctgttagtggccatccatccaaatcactcattgttatagaaaacaagctctcccaaagtttaaactgctagttaacggttcagtaagccttagaacccaggtctcttaattcatagacagaatgctactactttagccaccatcatcctcatccacaaccctttgaaggactccagcaaagaattcttaatggactggctgatgtcagtatttgaaatgcttgaaaaaagataatcagactcaccaagtttcatatctattattgtttatcatccactgactagtacaaaaggatatgttgaaccaactttaaattctattttaaaagtatagataactgaatctcagttgatacaataaacataatcagattttagcaaaaacaaatatttttaaaatgcatcaagaaagcatattatttaaggaggccagtggtaaaatcattttctgaaattattactagttatctaatttatatactataaataatttattattattattatgggctttgtttttatttatggatacgaatttttttccttcttcttttttggagatggagtcttactctgtcgcacaggctagagtgcagtggcacgatcttggctcactgcactctccgcctcccgggttcaagcgattctcccacctcaacttcccaagtagctgggattacaggtgcctgccaccacacccggctattttttgtatttttagtagagacaagggttcaccatgttggccaggctggtcttgaactcccgacctcaggtgatctgcccaccccggccttccaaactgctggggttacaggtgtgagccaccacggccggctgatactaattttcttaaagtaaagcacagctattttaaaaatataccattgatacatcacagttataatatttacattgattattaagcctaaacagaaaaataaaatatatttcatctcttgtaaagaaagtaattgtgttaaccttgtattttattcctataatctttgtgaactgttattaaatattaaattgcattctaaattgtgatctttggtcacatttttataccaccttggtttagaggtttatgattcccctgaccgctagaaattctagcatgtctttaaattctctcttactctagggaaagtcgttaattgtaagttggattgtcatttctgaaaatagggttaaggaaaataytgtagtactgtaactctacttgagttgttgcatttttctctattttcacaagtctgagagtctgagatgtaagaacgtatgaatcataaggatgtcttatagttagtgtctcttagtaatttatatattggtgttaattggttaataaagtctcactcctccttgtcttgataagattagccacatgggagcagaatttggattgaggaggtggatgactttggaactagaacatgctggaatttaaggaaggcctgggtagattgttaaatggggatggtaaaattatacttacagtaacagcaagataatgtgtccctaaaagataaagaatgatgatactaatgatagaaagagctacatttgtttaatgcttacactgtgactgacatttcctttctctttttttatggagacagggtctcactatgttgcccaggctagtctcactggaattcctggcttcaagggatcctctcacctcccaaagtgtcagtattacaggtatgagccactgcactcaacctgacacatttgtaagcactttatatgtattaactcatttaatcctcctaacaacctgtgaggtaggtactatcagtatcaccattttacagatgaggaaactgagcattatgacctgacaaaagtccatttgttcataccaaactttaagttctttaaggtagatatttgttgtcgccattagttaaagatgaaggcaatagacttttccctcacagcctatcaggaactttaccttaaaaacaaatttgatgcttgtacatcaatgttcataacagaattatttacaacagccaaaaggtggaaataacccaagtgtctgtcaccagatgaatggataaacaaaatgtggtatagagaatattattcagctctaaaaagaattctggggctggaggtggtggctcatgcctgtaatcctagcactttggaaggctaaggcaggaggatttcttgagaccagcagttcgagaccagcatgggcaacacagtgagaccccgtgtatataattttttttttaattagttggacatggtatgtgcctgttgttccagctacttgggatgctgaactgggaggatcatttgagcctgggaggtggaggcgagagtgaaatatgatcatgtcactgcactctagcctggaagacagagtgagaccccatcctggaaaaaacaaaaagaattgtgatacatgctacaatagataaaccttgaaaacatcatgcaaagtgaaata

SEQ ID NO: 715669 - DNA, 1773 bp, Homo sapiens
taatcctttccttttggcagagtaaatcttcctttcaccatactaaattaaattttggtattttcatacagtggaatattatatagctattaagtgatgtctttgggcaaattacttaaygtctctggcctttgacatctccttccataaaaggagaaactccagccacttggaggtgccatgggctggatcccctgtatacacatggcatttccatctcccttttctgagcactggccatattttggcttgcacctggcaacccctgttggaggagcagcctgcacccctagcagggacataaatgggtcttcttgtccattggagggagcattccatcccagacagggggcccttggtttctgggggcagcacaagtcatcgtggcattggcttgagatattcccaactttttttttgagacagaatctcactcttgttacccaggctggagtgtaatggcatgatctcggctcactgcaacctccacctcccgggttcaagcagttctcctgcctcagcctcccgagtagctgggattacaggtgtgcgcccccatgcccagctaattttttgtatttttagtagagatggggtttcaccatgttgagcaggctggtctcgagctcctggcttcaggtgatccacccgccttggcctcccaaagtgctgggattataggcgtgagccaccgtgcccagccttgtattaaaacttgagtgctgtacacatatgcagcgtgtggcactgcccccccaaccttggtaacgattgtgccattgttgaattttgcttggtgcatcatgtacctcatgcttcactgtctctgcacctgggaggcactcttgttatcccatttttaaaaatttacaagtccccattatgcctcagaaaatcttgttttcccattttacaggtgaggaaacaggtgcagagaggccaggtgcttgccagggtggcactaggcagggataaagcgggccagcggctccagagtctatgctctctccacctaaagttaagaaaacagttacagagaagtaagaggcagtgttaatatcagatgaactggaatgaatgggccaaaatcgtatttaaaatgcatgctaatacagtctgtaaagactgtcacagttatgaagccttgctttcccaagtaacatgctcactatgcgtaaaccagaagcagctgggcagagtaccaggagcacagtgacaagctcctgtctgtgacagatcattgactaaagatcatgtgattaaaaggtgacatggaatagaggcatcgcatctcagaatcaatgagctggattttgagaattgatgagcagattttgcccgtaaacgtgcagtatgagggcatgcaagcagttgataccttacctacagaaaggatgttattttatctttttaaatttttttcttttttaaaagaattccctgcaagtaagcgcaggacttaggagtttagtaaggaaatgccacgctccagtttagtacattttgaaacatgctgaaatgactattctgcaagcagtacaaattggtgacgttgactcaaggtagaaaacctgaaaaggcctctggtccagggaccaaagtgagaggttgtcagggagccacccttgtgactccaaagagcttgcagctcagagactccacaaaggaagccaccccatctgctccccagaacccacgtggcccaggtgtgggaatgagctgcaaggggcaccagccactgtgccatgtacttggcaggagcgagcgaaactt

SEQ ID NO: 715670 - DNA, 1773 bp, Homo sapiens
taatcctttccttttggcagagtaaatcttcctttcaccatactaaattaaattttggtattttcatacagtggaatattatatagctattaagtgatgtctttgggcaaattacttaatgtctctggcctttgacatctccttccataaaaggagaaactccagccacttggaggtgccatgggctggatcccctgtatacacatggcatttccatctcccttttctgagcactggccatattttggcttgcacctggcaacccctkttggaggagcagcctgcacccctagcagggacataaatgggtcttcttgtccattggagggagcattccatcccagacagggggcccttggtttctgggggcagcacaagtcatcgtggcattggcttgagatattcccaactttttttttgagacagaatctcactcttgttacccaggctggagtgtaatggcatgatctcggctcactgcaacctccacctcccgggttcaagcagttctcctgcctcagcctcccgagtagctgggattacaggtgtgcgcccccatgcccagctaattttttgtatttttagtagagatggggtttcaccatgttgagcaggctggtctcgagctcctggcttcaggtgatccacccgccttggcctcccaaagtgctgggattataggcgtgagccaccgtgcccagccttgtattaaaacttgagtgctgtacacatatgcagcgtgtggcactgcccccccaaccttggtaacgattgtgccattgttgaattttgcttggtgcatcatgtacctcatgcttcactgtctctgcacctgggaggcactcttgttatcccatttttaaaaatttacaagtccccattatgcctcagaaaatcttgttttcccattttacaggtgaggaaacaggtgcagagaggccaggtgcttgccagggtggcactaggcagggataaagcgggccagcggctccagagtctatgctctctccacctaaagttaagaaaacagttacagagaagtaagaggcagtgttaatatcagatgaactggaatgaatgggccaaaatcgtatttaaaatgcatgctaatacagtctgtaaagactgtcacagttatgaagccttgctttcccaagtaacatgctcactatgcgtaaaccagaagcagctgggcagagtaccaggagcacagtgacaagctcctgtctgtgacagatcattgactaaagatcatgtgattaaaaggtgacatggaatagaggcatcgcatctcagaatcaatgagctggattttgagaattgatgagcagattttgcccgtaaacgtgcagtatgagggcatgcaagcagttgataccttacctacagaaaggatgttattttatctttttaaatttttttcttttttaaaagaattccctgcaagtaagcgcaggacttaggagtttagtaaggaaatgccacgctccagtttagtacattttgaaacatgctgaaatgactattctgcaagcagtacaaattggtgacgttgactcaaggtagaaaacctgaaaaggcctctggtccagggaccaaagtgagaggttgtcagggagccacccttgtgactccaaagagcttgcagctcagagactccacaaaggaagccaccccatctgctccccagaacccacgtggcccaggtgtgggaatgagctgcaaggggcaccagccactgtgccatgtacttggcaggagcgagcgaaactt

SEQ ID NO: 715671 - DNA, 1773 bp, Homo sapiens
taatcctttccttttggcagagtaaatcttcctttcaccatactaaattaaattttggtattttcatacagtggaatattatatagctattaagtgatgtctttgggcaaattacttaatgtctctggcctttgacatctccttccataaaaggagaaactccagccacttggaggtgccatgggctggatcccctgtatacacatggcatttccatctcccttttctgagcactggccatattttggcttgcacctggcaacccctgttggaggagcagcctgcacccctagcagggacataaatgggtcttcttgtccattggagggagcattccatcccagacagggggcccttggtttctgggggcarcacaagtcatcgtggcattggcttgagatattcccaactttttttttgagacagaatctcactcttgttacccaggctggagtgtaatggcatgatctcggctcactgcaacctccacctcccgggttcaagcagttctcctgcctcagcctcccgagtagctgggattacaggtgtgcgcccccatgcccagctaattttttgtatttttagtagagatggggtttcaccatgttgagcaggctggtctcgagctcctggcttcaggtgatccacccgccttggcctcccaaagtgctgggattataggcgtgagccaccgtgcccagccttgtattaaaacttgagtgctgtacacatatgcagcgtgtggcactgcccccccaaccttggtaacgattgtgccattgttgaattttgcttggtgcatcatgtacctcatgcttcactgtctctgcacctgggaggcactcttgttatcccatttttaaaaatttacaagtccccattatgcctcagaaaatcttgttttcccattttacaggtgaggaaacaggtgcagagaggccaggtgcttgccagggtggcactaggcagggataaagcgggccagcggctccagagtctatgctctctccacctaaagttaagaaaacagttacagagaagtaagaggcagtgttaatatcagatgaactggaatgaatgggccaaaatcgtatttaaaatgcatgctaatacagtctgtaaagactgtcacagttatgaagccttgctttcccaagtaacatgctcactatgcgtaaaccagaagcagctgggcagagtaccaggagcacagtgacaagctcctgtctgtgacagatcattgactaaagatcatgtgattaaaaggtgacatggaatagaggcatcgcatctcagaatcaatgagctggattttgagaattgatgagcagattttgcccgtaaacgtgcagtatgagggcatgcaagcagttgataccttacctacagaaaggatgttattttatctttttaaatttttttcttttttaaaagaattccctgcaagtaagcgcaggacttaggagtttagtaaggaaatgccacgctccagtttagtacattttgaaacatgctgaaatgactattctgcaagcagtacaaattggtgacgttgactcaaggtagaaaacctgaaaaggcctctggtccagggaccaaagtgagaggttgtcagggagccacccttgtgactccaaagagcttgcagctcagagactccacaaaggaagccaccccatctgctccccagaacccacgtggcccaggtgtgggaatgagctgcaaggggcaccagccactgtgccatgtacttggcaggagcgagcgaaactt

SEQ ID NO: 715672 - DNA, 609 bp, Homo sapiens
taaatattcttaactaaaaaatatgaccatactatcattgtcccacctaaaatagatgaacaattgttacagaaaatggtaaaccctgttgcctgccaagagcacagctgagtccccactcgatctcgccagcctcatttcttgctggcagctcccagcagattctgatccagaagtgtgtacracttttttggaactcagctctggtatccccataggaaacagtgttgaaatctcagtgtggtgtgcttccctctcctctccgaagcctgtagtccctctgaccttgcaccttgggcctctaggtgttgagtaaatatggtcagttccactttgctgagcctgcatcaccagggtttcatgaggacagaacagggtgatgcagacgaaagcacctgcacgcagcaagaggacgtgcacggaaaggactcagagcaacaagtgcactgttttcttaacggaacacgtctgctctgaacacgggatcagaacacattcttttgttgttgtttgtttgagatagagtctctcttcgtcacccagtctggagtgcaatggcgtgatctcggctcactgcaacgtctgcctcccaggttcaagcgattctcc

SEQ ID NO: 715673 - DNA, 1162 bp, Homo sapiens
caaacctgtaatccgacccggctaagtattttccccaggagtcctacagggagtcgctctgagatctggagataagaaaacccctcaggtgcccagcgccctggtaggtgctggcccagctcccccatcgtgttctccgcgtgcagcagggggcgccagcccagtgggctgagcgctcctggtcccgcccatcccgggcatcctgaatttggagacgtgagaacccagagagtcaggcytccagggctccacatgggttggagcgaagctgggggtggtgggagggacctggggctgtggtgtgcttgcgtctttaatgcagccacatctggaagtaataaatttctaaatgcggtagctcatgctatctccatctgaaagtgatgtctctagaatcatgaggcctcgcatcctttccccttacccaccccctctctaggttctctcccagccagcccagcagcgtctcgtgtggtctctgttctatgtggaggttataggatgtttaagacgggaatcgttggcctattccatattctttgacataagcacatctccatttcttactatgcttgaaataaaaaacaggttctggagactcctgctgcagtcaggcagttcagcttggtggtggggtggggtgtaagcatgggttctgcagctagagagctgagtgtgaatcccagacccaccgcagtgagctgggtgtgatcttgagcaagttacccagcccctgtctcatctgtcaaatgggggtcatcctagcaccaaacctaatgcgttgctgtgaggaatccagcagttagcaagccacccacagcaagtgctcagtcagtgttcactatttgtattacctacagccactgccgtctggggaactgtttggtgacatgcctataaaatattaccaatattggctgggtgtggtggctcacgcctataatcccagcactttgggaggctgaggcgggcagatcacttgaagtcaggagtttgagaccagcctggccaacatggtgaaaccctgtctctactaaaaatacaaaaattagccaggtatggtggcgtgcacctgaaatcccagctactggggaggctgaggcaagagaatcgcttgagccccagaggcaaaggctgcagtgagcagagataacgccactgc

SEQ ID NO: 715674 - DNA, 1722 bp, Homo sapiens
agagacccatgcacacgaagaacaggaaggacgcccgagggacgcgggtgccaggaggttgtggcctcacccgtgctcagcattactgccatctcgttaattgaagagaccacgattcatgtggctttggcggtctgggacttggctgtcttcagcaaaatcgtccaccactgagcattgtaaaggaagtgttgtatagctgaaaattcagattttaagtatgaattttatcagacacaccttcactatctcttggctgtgcagccttctagaggtcactacactctcggccccctcttttcctcatctctaaacaggcaaaagaatccccgttggtctcccagggctcctgagtaagagagtaagatccaaattcatgccttggttttctttctcactgctcgtgtgcatggaaccaagtttgttgccttcttggagcctcagtgttctcatctgtaaaatgggcgcatgtgtcacggggatgtgttgctcctggcagtagcataagcaaagtccttagcataggcccctgttcccattgcacaccccgtataatagtgatcaccatccatgattattgttatcatcatcaacaacagtaataatcactgtttgctcagcaagcgtataggcgtctcaaaggccagattcatctctctgttttagcttgaattggagcttcttgaaagaaggaaattcgggtgggaggagtgaaggattgattttttttctcttccctaaaggggatacttgataaaggcctgttgaagacggacgccttgtaatcttgtttttcatccttctctgggctctcagatggatcaggtccttttgcttcagtagaactttggcaattaagtctttgatagtcttaaaatgggtgattggcctcaccaggctgaaagaaaggcaactttgttagcctaggatgcatgaggttragagcaatattttttttttcctctcctccttttctctttctagaggcagtgaaggttttggggccctacagcctgggttcacatcctggctctgccactcactagctctgtgcccttggccaagatacttcctttctctttgtctttctcttcatctttcaaatgaggactaacagtcgccacctggaagtgttgctgtgacgatcaacccagaggttgtatggaaagtgcccagcagagagcatggcacctagaggtgctcagcaatgtctgtttcttccctcagcccctggtgctctttctgtccctcccctggtcccatcatctgtccctgcatccaatgtcttaccctcccctgacagagcttcagtttcctttgggaatagagcccttggctggcaggtcattcctggattaaacttggagcctccaagctttatgaagtccaagtgtgctattttaaaccaattgtggacttttgtgtggcgcttccgctgaatggaaagataattgtaccagagcttgtcgagaagagtacatggacgagtcatggagcttacattctgtcccattgattttttttttccttcttttggaggacttactagctgccatctgctccttgaacatcgtgttcataaatatataaataatcgaagttgatgaggaggtttgcttaaagaagtgttgctgagagtgatttttataaatatttaagataatctgaaatcattaaaggaattgcggggtttattaaaaaactgaagacgtgttttggaaa

SEQ ID NO: 715675 - DNA, 1722 bp, Homo sapiens
agagacccatgcacacgaagaacaggaaggacgcccgagggacgcgggtgccaggaggttgtggcctcacccgtgctcagcattactgccatctcgttaattgaagagaccacgattcatgtggctttggcggtctgggacttggctgtcttcagcaaaatcgtccaccactgagcattgtaaaggaagtgttgtatagctgaaaattcagattttaagtatgaattttatcagacacaccttcactatctcttggctgtgcagccttctagaggtcactacactctcggccccctcttttcctcatctctaaacaggcaaaagaatccccgttggtctcccagggctcctgagtaagagagtaagatccaaattcatgccttggttttctttctcactgctcgtgtgcatggaaccaagtttgttgccttcttggagcctcagtgttctcatctgtaaaatgggcgcatgtgtcacggggatgtgttgctcctggcagtagcataagcaaagtccttagcataggcccctgttcccattgcacaccccgtataatagtgatcaccatccatgattattgttatcatcatcaacaacagtaataatcactgtttgctcagcaagcgtataggcgtctcaaaggccagattcatctctctgttttagcttgaattggagcttcttgaaagaaggaaattcgggtgggaggagtgaaggattgattttttttctcttccctaaaggggatacttgataaaggcctgttgaagacggacgccttgtaatcttgtttttcatccttctctgggctctcagatggatcaggtccttttgcttcagtagaactttggcaattaagtctttgatagtcttaaaatgggtgattggcctcaccaggctgaaagaaaggcaactttgttagcctaggatgcatgaggttgagagcaatattttttttttcctctcctccttttctctttctagaggcagtgaaggttttggggccctacagcctgggttcacatcctggctctgccactcactagctctgtgcccttggccaagatacttcctttctctttgtctttctcttcrtctttcaaatgaggactaacagtcgccacctggaagtgttgctgtgacgatcaacccagaggttgtatggaaagtgcccagcagagagcatggcacctagaggtgctcagcaatgtctgtttcttccctcagcccctggtgctctttctgtccctcccctggtcccatcatctgtccctgcatccaatgtcttaccctcccctgacagagcttcagtttcctttgggaatagagcccttggctggcaggtcattcctggattaaacttggagcctccaagctttatgaagtccaagtgtgctattttaaaccaattgtggacttttgtgtggcgcttccgctgaatggaaagataattgtaccagagcttgtcgagaagagtacatggacgagtcatggagcttacattctgtcccattgattttttttttccttcttttggaggacttactagctgccatctgctccttgaacatcgtgttcataaatatataaataatcgaagttgatgaggaggtttgcttaaagaagtgttgctgagagtgatttttataaatatttaagataatctgaaatcattaaaggaattgcggggtttattaaaaaactgaagacgtgttttggaaa

SEQ ID NO: 715676 - DNA, 1722 bp, Homo sapiens
agagacccatgcacacgaagaacaggaaggacgcccgagggacgcgggtgccaggaggttgtggcctcacccgtgctcagcattactgccatctcgttaattgaagagaccacgattcatgtggctttggcggtctgggacttggctgtcttcagcaaaatcgtccaccactgagcattgtaaaggaagtgttgtatagctgaaaattcagattttaagtatgaattttatcagacacaccttcactatctcttggctgtgcagccttctagaggtcactacactctcggccccctcttttcctcatctctaaacaggcaaaagaatccccgttggtctcccagggctcctgagtaagagagtaagatccaaattcatgccttggttttctttctcactgctcgtgtgcatggaaccaagtttgttgccttcttggagcctcagtgttctcatctgtaaaatgggcgcatgtgtcacggggatgtgttgctcctggcagtagcataagcaaagtccttagcataggcccctgttcccattgcacaccccgtataatagtgatcaccatccatgattattgttatcatcatcaacaacagtaataatcactgtttgctcagcaagcgtataggcgtctcaaaggccagattcatctctctgttttagcttgaattggagcttcttgaaagaaggaaattcgggtgggaggagtgaaggattgattttttttctcttccctaaaggggatacttgataaaggcctgttgaagacggacgccttgtaatcttgtttttcatccttctctgggctctcagatggatcaggtccttttgcttcagtagaactttggcaattaagtctttgatagtcttaaaatgggtgattggcctcaccaggctgaaagaaaggcaactttgttagcctaggatgcatgaggttgagagcaatattttttttttcctctcctccttttctctttctagaggcagtgaaggttttggggccctacagcctgggttcacatcctggctctgccactcactagctctgtgcccttggccaagatacttcctttctctttgtctttctcttcatctttcaaatgaggactaacagtcgccacctggaagtgttgctgtgacgatcaacccagaggttgtatggaaagtgcccagcagagagcatggcacctagaggtgctcagcaatgtctgtttcttccctcagcccctggtgctctttctgtccctcccctggtcccatcatctgtcccygcatccaatgtcttaccctcccctgacagagcttcagtttcctttgggaatagagcccttggctggcaggtcattcctggattaaacttggagcctccaagctttatgaagtccaagtgtgctattttaaaccaattgtggacttttgtgtggcgcttccgctgaatggaaagataattgtaccagagcttgtcgagaagagtacatggacgagtcatggagcttacattctgtcccattgattttttttttccttcttttggaggacttactagctgccatctgctccttgaacatcgtgttcataaatatataaataatcgaagttgatgaggaggtttgcttaaagaagtgttgctgagagtgatttttataaatatttaagataatctgaaatcattaaaggaattgcggggtttattaaaaaactgaagacgtgttttggaaa

SEQ ID NO: 715677 - DNA, 641 bp, Homo sapiens
cacccgccttggcctcccaaagtgctgggattacaggcgtgacgaccgtgcccggtggggaagatgttgagttctgtaatgaacaagatgaatgagagggtgcttgcaaccacggttaccctgctgaccccagccttgcccatccacagtaggccccacctttgttttgtagaatttaaaggcagccaggaaacactatgctaccagagaggaaaggttgctcttccttcttgccgtgtattcctttcttccctggctgccaggaagctcggagccaaatttgcgcttagtcacagcagctgtcgccagcccacaggttcaggccatttgctttgtcatggttcccactatcatattttcttctgtttgtaattctcacgggttcttttcttgttgttagygatctcaactgtctcttggaaagaggcaaggtataataaacacatacatgacaaagaaaggtagagatacgaacaatgggtgatcagggctctgcagctctgccctcttccaaaagtattggtctgagttaaatgcttctctggaaagactggctgatcttggagattagggattttaggctcttggaaaacaaggtctgtgcgtccttcatctcagggtctccagcatttatcacagtg

SEQ ID NO: 715678 - DNA, 497 bp, Homo sapiens
cagaatgagatgcgctacagagagagggaaatagggtagggaggaagagggagggacagagctgcacacacttgaaggatgggagagagggctgtgagcagatcctaagaacagacagaggtaggtgcagaggccctgggtttggagaaagcctgccatgctcacacagcacgagtccagtgtggctacagcagaggggagtggggaggtcagagagcttgcaggctgtgggaagcgattgcgggatgctcaacggaggaacgaggggacctaacaactccagctgctgtgctgtgcatagatgcagggcacaggggcagcctgcaggaggccatggcaacaatcaatccaggctggaggcgacgggggctgggacagggagtagccatgagggcagagataagttktcagattctggataggagtgggggccacagcattgatgtggggcgtgatgtagggggtgaggagaggggaggagtggaaggtgtcaccaa

SEQ ID NO: 715679 - DNA, 605 bp, Homo sapiens
cagtatctatattctctcgatatctcaaaatatgatggataatcccaggatacatagcaaaggactttttacattctgtccactactacattagagagtgacattttcaaagtcaacagagtggattggctttcactttcattatgttattaaaaactaattttccagtaagtagctgagcatttggcagggatttagtaatgaacatgattttgcctctccattacattatcttcactgttattctaagtatcatatttcatctcacttatctcaaagagccaaaagatataatgtattagagtagtgttatgcttttctcaaacttcaaataaaaaggcttatgattagccctagcaaaagacagcactgttcatcttcaattaggcagggttttcattttaactgaaagtaaaggctactatcaactactccatactaatttgtgtaatacccacagttaatcagcattttagagctgagagaattctgaaagaacagtgatcccaacccctttgtgtgtaaaaaygatgtgaaaaaagatgcattctcagaaaagaagtcccatgattcaaacacaaactgatatgacttttaaattagta

SEQ ID NO: 715680 - DNA, 1078 bp, Homo sapiens
ggcatatatacaatgatacttacattagctgaaaacaattttgaattggagacaaagggctctctaaaaacttttataattagatttagttcccttatatattgtcgaatttctgccataaatgcttttaccaaatcatagtaagtttgttctcctgaggtggaaggctcttcgtcagttaaagataatatattaatatcttctacatcttgatgaaacatatccatcaatacctatacagtcagagatataaaaaagtataataaaatatgaagctttcgtagaatttgatgtgaaatgctctaagttctctgaataaagttcttaaatgataaaaaagcagacaarcaaatttctcttcttggatatattgccagcatccctccacagcttctctaaaacagaattcaacatgtgatataacttactacactcctccaagttctctatcactactagtatttatctgtctgtctctcttgttaacctattacttccaatttgtttccagatcctgtctttaatttccctgacttggttttctctgttttataccctgccatcatcactttattccatggcctcagtatctcatatttaaatgtttatagctgtctattcggccgattttcctacatttgttgggaataggtcaaaataagctattattttctgcaagaagtctactgttactactcttgctacaacacatctttccccttcttgagaacttctacagcatcatatctctataacacaataaaatattattttatcttgtgtgctttctgattgtttcatgaatataagtataccttcatcaactctggagccttgttttatatatacttatcttgcatctcctctctgtgtaaacatgtagtaggtactcaaaaatattttatttatctgattcattaaaaagcatcaagtatttcgtattcgtgtcttcagttaaaaatacccaaacatttgaaattcttcttcaaatcaggtgggttttttcactctatatggccacattctcaaagaacaaataaatactaaaacataatttagtggaatcagcaatcagaaa

SEQ ID NO: 715681 - DNA, 1078 bp, Homo sapiens
ggcatatatacaatgatacttacattagctgaaaacaattttgaattggagacaaagggctctctaaaaacttttataattagatttagttcccttatatattgtcgaatttctgccataaatgcttttaccaaatcatagtaagtttgttctcctgaggtggaaggctcttcgtcagttaaagataatatattaatatcttctacatcttgatgaaacatatccatcaatacctatacagtcagagatataaaaaagtataataaaatatgaagctttcgtagaatttgatgtgaaatgctctaagttctctgaataaagttcttaaatgataaaaaagcagacaaacaaatttctcttcttggatatattgccagcatccctccacagcttctctaaaacagaattcaacatgtgatataacttactacactcctccaagttctctatcactactagtatttatctgtctgtctctcttgttaacctattacttccaatttgtttccagatcctgtctttaatttccctgacttggttttctctgttttataccctgccatcatcactttattccatggcctcagtatctcatatttaaatgtttatagctgtctattcggccgattttcctacatttgttgggaataggtcaaaataagctattattttctgcaagaagtctactgttactactcttgctacaacacatctttccccttcttgagaacttctacagcatcatatctctataacacaataaaatattattttatcttgtgtgctttctgattgtttcatgaatataagtataccttcatcaactctggagccttgttttatatatacttatcttgcatctcctctctgtgtaaacatgtagtaggtactcaaaaatattttatttatctgattcattaaaaagcatcaagtatttcgtattcgtgtcttcmgttaaaaatacccaaacatttgaaattcttcttcaaatcaggtgggttttttcactctatatggccacattctcaaagaacaaataaatactaaaacataatttagtggaatcagcaatcagaaa

SEQ ID NO: 715682 - DNA, 529 bp, Homo sapiens
tcctacccaatcacacataaaacccaatgttttatgtgtgccataaaaacattactttctatgtgtgttgtgtcctgaaaaggttgcaaagcactgccattaccagtttttacaattcccttgccctgctgttctcctgctatacatccatgaggaaacaccattcagtccaactatctttttttgtgctcacacttgagtgctgcaaaagcaaagtcacagaaacccaaagatttgaagtactgtacacttgaartcattaaagtcaaacggtccttcatcattgccagggaactctttctatttctagctgtatctcccattttctacaattggtacttcaaaaaccttattcttctctccaactttcgactccttccgaactcagtttagatgtatctttttcttggaagctatcccaaaccccaaagcatctatcagttgcccctttcatggtttcccatatactctttactcatagaatatcacattatgttactgactacatatctctctgtatctccattaa

SEQ ID NO: 715683 - DNA, 575 bp, Homo sapiens
ccgtctcaaataaaacaaacaaacaaaaagggaaaatttggagacagacacacagggagaccactgcatgaacatgaaggcagcgacccataagccaaggaatgccacaggttttcagcaaacctccagaagcgaagagagagaaatagaatgagcctccctcacaccctcagaaggaaccagccctgctgacacctggatctcagacttccagcctccaaaaccatgaggacatacatatccactgcctaagccccccagtttgtggttttggagataggagatwtgtgtatatacatgaaaggagatttattagaggggattggctcacagttttttatagaagccctagcaaactaatatagtaactcttatgttcagctgtcccctagtcacctccacaggctctcccacactaggcatatcaaaaaataaactccttgctctcagctccagccggctcctgctcccatgctgccagggttggtgggtgactgtgttgttctagatgttgtccaagccaggaaccctggtggaacccctcattgattctctctctatgccagctcccacat

SEQ ID NO: 715684 - DNA, 827 bp, Homo sapiens
ctatggtgggcattcctttgtttgcagatcaacctgataacattgctcacatgaaggccctcaatgtggacatcaggaccatgtcaagtacagatttgctcaatgcactgaagacagtcattaatgaccctgtgtgagtatgacaattttttttactatgtggtatttacagattcttttgacaacactgaatacatgtcttaccccttttaggagaccaattttgaaagaatttaaataatttaaccaacttgaaacctgcttttatttttcaccaattattttagttacatttgatcccatatatttaatgggtcaccaattactgtaacaaccttctacacacaaatatttttaaacatatatagataattgtttaaaatataagttttttgaatgatggattataatacaatgaaataatgaacttggagaaataaaataaagtatttcaattcaatacataaaatttctgaaagtataactgtattcatgctcaataatgtatttttagtattatcattattttaagatacaatttgcatagcataatatttacctatttaaaagtgagatctaaaagtagttagtacatttacatagttayaaagccatcaccataatataatttttgaacatttttatcaccctaaaataaacctcaaaatgcataaaatcactgttgataaacctccagtcctagggaaatatcaacttactttctcaatagattattctctctggatatttcatgtaaattaaatcatacaatttacagtgttctataaatgatttctttgacttagtacaatgtcttttattagttt

SEQ ID NO: 715685 - DNA, 952 bp, Homo sapiens
taaagtatgcttcagtcccagcacagtggcttatgcctgtaatcccaacactttgggaggccaaggaaggcagatcttttgaggtcagaagttcgagaccagcctgacgaacatggtgaaaccctgtctctgctaaaaatagaaaaaattagccgggtgtggtggcgcatgcctgtaatctcagctactcaggaggctgaggcacaaaaatcacttgaacccaggaggcaggggttgcagtgagccgagatcgagccactgcactccagcctgggaacagaccaagactccgtctcaaaaagcaaaaaaaaagtgtgctacagaaaaatctgttattaatatgcagatactccaaatttaaagacttgcctgtatgcaaattctaccaaaaaaatctttgttttaaatatttttttaaactatccagaaatgatccaccttgctttgtaaattgagattatacttgcgtggatagtagaggaagataaccaggttacagagtactctttctcgttactggaaagaaacttcaacaaggtcccaattaaattagaatcaagttattagcttctatggttacggtgccttgaacatccaagtataatctagtaacagaggaagatattaaactaacaggtcatggttgagtcaagtaattaaaaccctaggcagagtaggaggaaacttcagaagggctgttacatcccagaataacagttctgaagtaccctggagacctttctaataacatagcaactaacagttcatctagcaatgaggtacctgataaccgcagggtgaacatctttataattagctttcttggcataccctatcctctttaatcacytacaatatatcctaagatgagattttaataacagaaataggcacttactcaacaatacatcactatgactatttttgtaacttactggtacagaatagagcc

SEQ ID NO: 715686 - DNA, 952 bp, Homo sapiens
taaagtatgcttcagtcccagcacagtggcttatgcctgtaatcccaacactttgggaggccaaggaaggcagatcttttgaggtcagaagttcgagaccagcctgacgaacatggtgaaaccctgtctctgctaaaaatagaaaaaattagccgggtgtggtggcgcatgcctgtaatctcagctactcaggaggctgaggcacaaaaatcacttgaacccaggaggcaggggttgcagtgagccgagatcgagccactgcactccagcctgggaacagaccaagactccgtctcaaaaagcaaaaaaaaagtgtgctacagaaaaatctgttattaatatgcagatactccaaatttaaagacttgcctgtatgcaaattctaccaaaaaaatctttgttttaaatatttttttaaactatccagaaatgatccaccttgctttgtaaattgagattatacttgcgtggatagtagaggaagataaccaggttacagagtactctttctcgttactggaaagaaacttcaacaaggtcccaattaaattagaatcaagttattagcttctatggttacggtgccttgaacatccaagtataatctagtaacagaggaagatattaaactaacaggtcatggttgagtcaagtaattaaaaccctaggcagagtaggaggaaacttcagaagggctgttacatcccagaataacagttctgaagtaccctggagacctttctaataacatagcaactaacagttcatctagcaatgaggtacctgataaccgcagggtgaacatctttataattagctttcttggcataccctatcctctttaatcacttacaatatatcctaagatgagattttaataacagaaataggcacttactcaacaatacatcacyatgactatttttgtaacttactggtacagaatagagcc

SEQ ID NO: 715687 - DNA, 474 bp, Homo sapiens
atgaagtatattttaaatgaaagaaggatctcaacacaaacaggatgttaacagaaaattatggatacacatataarttagaaatttctgttacatcactttacaatggaaactgcaatactcaaactgtgtgatgaaacttacacacacggaaactcaagctgtaatatgaaactcagccaggagggggagcagagcactaaatggctttcttttcaccacatctaacaccttggcgttcactaaatttgggaaaaagataaaatatcttgttgccggggcacagctctggaaaatgtaataatataattcctgttcatcaaaatttgaaaagaaaatgagagttctaaaatgggaaaaaaacataattgatactaattagcaagaaaactgtttatacttgagtatgcttaatttgttggtcattacgcaaagtccaaaacaaacaatgctaaaacagaggaagttgaccat

SEQ ID NO: 715688 - DNA, 893 bp, Homo sapiens
gataaagcagtggcaggaaatgagataattgactctagtttttattaaatttctactgtgggtaaaatggtaacaaacagaatctcatgctacagagaaatctctcctgaaaggaagagtctatcggtgcaacaaagtttgctgttgtcgtatcttaagaaattgcaacagcctccccagccttcagccaccaccaccctcgtcggtcagcagtcatcaacaatgaggacagactctccaccagcaaaatactacgtcttgtgaagcctcagatgatcattagcattttttaactctaaagtatttttaattaagataggtacattgtttttgtagacataatgctgttggacacctaatagactatactgtagtgtaaacacaacttttatatgcactcagaagmcaaaaaatttatgtgatgctttattgtgatattcgcttaactcctgttatctgcaacttaatctgccatatctctaaggtatgcctgtattttcataattccaaaacggataaattattttaagattgtgaaatctctttgatcatacattaaatattaatttaatgtttgctccattattttcagaactaatcaaactattctgaaagttaatagaaaaaaatttagagaaagtatttttaaatgacaatattgcttttatcttatcggcctgctagcttctgtacttctcatgaaaaaaaaaaaataaaaaagcatgttcatcaaaatcctaatggttgttgaaacacagatttggcaaaatagaaaaaaaaacaattctgttgagaaatttctctatgtttcttagattttatcaaaagttggactaacttaattctgtttttctaaactcatacagtgaaacttggccaatttcctagattga

SEQ ID NO: 715689 - DNA, 595 bp, Homo sapiens
aatgagtaaacacagtagaatgtccttctgaaaggcctcttgcatcttgtctaagttagagggagtgttggttctttgcagtagccatttcctgaagcactaaagggtgcgatgtgtttctcagtttcctgttttccagtagctccggaccaggtgaagttcagcaacctcgctccaaagccttgctcttcacatgttgcttcacttcactgactccttttccctttagtctgcaccgaggaaaggctctgttctaatggtagaaatggaagatggcaaagggaatagaaaacacaacttaatcacaaaataacagaacaaatgaggaatggattgcaaccagtgtgacagagccagtgagcatgggatggacatcaaagcccattatgggccgggcttggtgkctcacgcctgtaatcccagcgatttgggaggcggaggcgggcggatcacctgaggtcatgagttcgagaccagcctggccaacatggggaaaacccgtctctactaaaaatacaaaaattagctgggtgtggaggtgcttgcctgtaatcccagttactcgggaggctgaggcacgataattgtttgaacc

SEQ ID NO: 715690 - DNA, 598 bp, Homo sapiens
catttccatttcccctcaaaatgtttattgacttttaactttttcatttatagccaacattaaaattaatttgtatgcattatttttttcaagatgcccaataacaacttggatttgactttttgtttagattctctcacttttatatgattttttttttctgggcaatatttgcttttttctgttcagctgtaatgagtgtgtgtgaaaacaggttagtwtcaacaatctggaagggacagaatgcaatggatgcccatattgacaatactctagaaagccagaaagattggctttttcaagtataatgaaatttactagtaatcacttagccgaattccaaattttctaaatgttgtatggaaccacctttccaattgagaactcttgcctttgtgggatggatgtggtatttggttgccaggacttctgtaagaaggtgagcctttccatcaggaatctctccccgtactttcaccagccaatccccacttcaccccagctcccatgacttcctagtcagccctctgccaccccactgatttcaaatttccagatacaaaaggtaggtcttcttcataaacagttggtaatcttt

SEQ ID NO: 715691 - DNA, 872 bp, Homo sapiens
gtggtgggcgcctgtagtcccagctactcgggaggctgaggcaggagaatggtgtgaacctgggaggtgaagcttgcagtgagtggagatcgcggccactgcactccagcctgggcaacagagtgagactccatctcaaaaaaaaaaaagagaagtgaagcccgaagatgtgattgaattgctgcaatctcatgagaaaacttgaacaggtgagacttgcttcttatggatgagcaaaaaagtgggtacttgaaatggaatctacttctggtgaagatgctatgaacattgctaaaatgacaacaaaggatttagaatagtccataaacttagttgataaagtagtaacagggcttgagaagattgactccaattttgaaagaagttttactacaggtaaaatgctatcaaacagcatccaaaataatgtaaaatgtgatttcttctatattgtattatatatacatataaatgtaatatatatgtattataatgggtcccagttataaaaaatatccaatacacaaagtgaagcatcttacatagtgctttgctaaaattttaaaaataaatgttatgtaaagagttaacctagtttagtttttaatattacaaatacawcctcatggtaaaagttcaaacaatatcaaaatacagtgattaaaaagtaattgtcagcctttatcccccaacccaacatctctcttctctgcccagaggtaaccactgttaatagtgtaaggtatatatttatcttagatttggtcagatctaaaagtttttcaattgattattttttgtttaggagaactcacgttatctgttagtaatagttcttgttttttcttttccaatattttttacatttcttc

SEQ ID NO: 715692 - DNA, 608 bp, Homo sapiens
ttttgtttaactctagttctcacttccccctttccatcactacagtctgcaattttcaagtcctaaatgagtgtaactgaaagtaacttatttacaaagaagattcatgatcattatagttatataagaaccaattcattaaatagccaaaataaaaaggaaacaccctcagactatacattcaaagttatcgaagatgtgatcaaaaaataagtagaagttcttaaaaggatacgtcacatgtaattctcctacagttgcacacagtaagtgcagtagaagtatcctgtttcaaaatgatcataaaagcaactgtaacagaatatttttagatattgaaacgttgatctttttactccccattgttaactttcttttaccatttctcctaatttataaatattgytctcatataggagaacagataaaacctaaaataaaagagctaaattcttgcttagaattccaaaataagatcttcataatatgacttctatttctaagatctaggtactcattcaaggagaaaaaaaaaatgatatgattttgtttcagttccaaaaaggtctggtttggaagactggaagctcaagctgtgtgaagtacca

SEQ ID NO: 715693 - DNA, 718 bp, Homo sapiens
tcagttgtaagcctgatattcctgacttttctgagattttttccacctcaagtttaagaagaaaaaaattaccatgcctcaaggcactaaattacttttagtattacaattcctagtcctttgtctctccttgatcctctgacattttttcatgtctcctcttgtagtgtacttaagcagagctattttgattaaataactctccagagaacggagattataatacaatagtcttccaaacaggttattcttgagtacatattgctatcatgcagtgtagatataaaatcagtatttcataaatgcatgtttctatgaaatctgccaagtagatgaatatctctttcattgttcctgacatcattgaattataaataataatatgaagctcaaattgtttatttgtaattgaagatctctgagaaagttttcagttatcaatgatgcagtcacctctaaaaaagacagtaactttaaaattacagtgaacagtatctgaaataatttcccttaaattgggcaattgctcagaattgctgtaaatcaattctcaattccaatagagttaaaacgagtggcgagccgattcttattcaattcatttttttagattcaatctgcttcagtgttttggacttraggtggcattagataggcacagtatagctaattagcacagttgcacccaggtgaagtattactaattagcatggtttca

SEQ ID NO: 715694 - DNA, 577 bp, Homo sapiens
tgaatttgctgttttcaggcttattatttaactttaatatattactcttttttactttttactgattttagcaagaatttaagagattctacagtaaccactggtagaagttgcatttttttctaattcataagaaaatatgttattttttctggaatttttattacattttgaaaatactaaaacagtttagtctttgactgacagaataaattctctggaaatcagaaaartagcataaagtagtgtgtactgcagggtccaaatttgatcttctggtttgaataatgtttttcacccacatttgaataacccaagaaattcatttaaaaaaattcttgactattaggaaacaaagcatatttttgtcactgttttgtttgttttttacagtttaaagcattactatcagtaagttacaagtgctaataaacattgagtgatcagaatgaagaatctgggaatgaggaaatcatgtcatacaaagtcttgtgagggttcttgaaacaattattcctatctcgaagtctaaataactcagaagttacaagacatgagacatgtaggagaatattca

SEQ ID NO: 715695 - DNA, 1119 bp, Homo sapiens
ggtctggataataaagcaaatgtggtacatatacaccatggaatactatgcaaccataaaagaatgaaatcatgttctttgcagccacctggatagtcctggagaccattgtcctaagtgaattaatacaggaacagaaaagcaaatactgcatgttctcacttataagtgggagctaaatactgagtaaacaaggatgcaaaggagggaacaacacacactggggcctacttgagggtagagggggaggaccaaaaacctaccaaatcagtacgatgctcattacctgggtaatgaaatagtctgtacaccaaattcctatgacacacaatttatccatataatgaacctgtacaagtaccctcgaacctaaaataaaagttggaaagataaaaaaaactataatcttaaaacaaaataataaggataataacaacaaaaaattaagtggactatgccaagtcttgcttattttaaaatcctttccctggtagcatcaatrtatagcctttactgtaaggaacatggcattagcgttttgtactttagtaaacagactatatttttagatctcaggttcactgatctgagttactaagttagttgtgattggtgtagagtgatgacgttatttattctctaagtgacttgtacaccaaatgtatgtcttatgaaaaataatgtgttatgtatgtttatgtacctatttttgtatctgtgattctgtgtagtttatcaaaccaatcttcaaatttgagatttctaaataccagaggcttgagggttttgtgtaaccctcctcatccactcaaaaatccctatatatatttgctcagaaaatatctatccatgtccctagagaaacatagttatttacaccaaagatatattgtatgtaatagttatacagcatgaataagtctagaggtcaaatgtagaccatgaggactgtagttagtaatattgtatactggaaatttgcaaataataatttcaggtattttcatcacacacaaacacaaacacaaaaggtaatcgtgagaggggatggatatgttaatttgcttgaccgtagtaatcataatcactttactatgtatatgtaattctgttgtacac

SEQ ID NO: 715696 - DNA, 1119 bp, Homo sapiens
ggtctggataataaagcaaatgtggtacatatacaccatggaatactatgcaaccataaaagaatgaaatcatgttctttgcagccacctggatagtcctggagaccattgtcctaagtgaattaatacaggaacagaaaagcaaatactgcatgttctcacttataagtgggagctaaatactgagtaaacaaggatgcaaaggagggaacaacacacactggggcctacttgagggtagagggggaggaccaaaaacctaccaaatcagtacgatgctcattacctgggtaatgaaatagtctgtacaccaaattcctatgacacacaatttatccatataatgaacctgtacaagtaccctcgaacctaaaataaaagttggaaagataaaaaaaactataatcttaaaacaaaataataaggataataacaacaaaaaattaagtggactatgccaagtcttgcttattttaaaatcctttccctggtagcatcaatgtatagcctttactgtaaggaacatggcattagcgttttgtactttagtaaacagactatatttttagatctcaggttcactgatctgagttactaagttagttgtgattggtgtagagtgatgacgttatttattctctaagtgacttgtacaccaaatgtatgtcttatgaaaaataatgtgttatgtatgtttatgtacctatttttgtatctgtgattctgtgtagtttatcaarccaatcttcaaatttgagatttctaaataccagaggcttgagggttttgtgtaaccctcctcatccactcaaaaatccctatatatatttgctcagaaaatatctatccatgtccctagagaaacatagttatttacaccaaagatatattgtatgtaatagttatacagcatgaataagtctagaggtcaaatgtagaccatgaggactgtagttagtaatattgtatactggaaatttgcaaataataatttcaggtattttcatcacacacaaacacaaacacaaaaggtaatcgtgagaggggatggatatgttaatttgcttgaccgtagtaatcataatcactttactatgtatatgtaattctgttgtacac

SEQ ID NO: 715697 - DNA, 1119 bp, Homo sapiens
ggtctggataataaagcaaatgtggtacatatacaccatggaatactatgcaaccataaaagaatgaaatcatgttctttgcagccacctggatagtcctggagaccattgtcctaagtgaattaatacaggaacagaaaagcaaatactgcatgttctcacttataagtgggagctaaatactgagtaaacaaggatgcaaaggagggaacaacacacactggggcctacttgagggtagagggggaggaccaaaaacctaccaaatcagtacgatgctcattacctgggtaatgaaatagtctgtacaccaaattcctatgacacacaatttatccatataatgaacctgtacaagtaccctcgaacctaaaataaaagttggaaagataaaaaaaactataatcttaaaacaaaataataaggataataacaacaaaaaattaagtggactatgccaagtcttgcttattttaaaatcctttccctggtagcatcaatgtatagcctttactgtaaggaacatggcattagcgttttgtactttagtaaacagactatatttttagatctcaggttcactgatctgagttactaagttagttgtgattggtgtagagtgatgacgttatttattctctaagtgacttgtacaccaaatgtatgtcttatgaaaaataatgtgttatgtatgtttatgtacctatttttgtatctgtgattctgtgtagtttatcaaaccaatcttcaaatttgagatttctaaataccagaggcttgagggttttgtgtaaccctcctcatccactcaaaaatccctatatatatttgctcagaaaatatctatccatgtccctagagaaacatagttatttacaccaaagatatattgtatgtaatagttatacagcatgaataagtctagaggtcaaatgtagaycatgaggactgtagttagtaatattgtatactggaaatttgcaaataataatttcaggtattttcatcacacacaaacacaaacacaaaaggtaatcgtgagaggggatggatatgttaatttgcttgaccgtagtaatcataatcactttactatgtatatgtaattctgttgtacac

SEQ ID NO: 715698 - DNA, 2463 bp, Homo sapiens
atcatatcctaaatatggttatttttaaatatgtccacgaattctttgatatttctccatttaagcagtgcagcatacttctaccccctctgagtgaggactagacttagcaactcactactaatcagtacaataaggtaagcgtgagggtgtggcatccttaagaccaagaccataaaggcactgtggccttctcctcgctctccctaatctaggatcactcactctgggagaagcttatggccacattgtgaggacactcaggctgctctacagagaggtccacatagagaggaagtgaagctttctgccaacagccagtgccagggctaaggcctcctgccaacagccatgaaagtgagccatcttggcagtggattccccagccccagtcgagccttcagatgactgccacccctgctgactgcttggctgcagcccctggattcctgacacagactgtcagtcaataaatgcatgttattttaggttgctaagttttggggtgatttgttacacagccaaagaaaactaatatgccaggctacctagcctcacatcattgcctcccctggatacacccttctcctccagttgtatgtatctgaatccaaccatcttttcacagacaccttctctaaggagccatccctggactccactgcactaacactccaaaatctggaaacaactgctctttcctttgatttcctaaggaactttatttgtatttggttctaaatcaagttgcctaaaaccaattcagccaaaggtaaaaccaattcatctaatccccacctgcctaaaatatgtgcttttaacactacaattttaccaaactggctgttcctcaaacctctcaggcacactcctgcctcaaagcctctgcctcacccctacatatctgcagggttcatgcacttatcgcaggcctttgcttaaatgcctctcagtagggtcttccctggcagcctatttaaaactgccacacccctcactcttccccaccacacaccaacccagcatgtcctatctgctaatgcagttttattttctccacagcacttatgaatatctaatgtgtattttaattatgtcatttatcaactgtctctccctctctaaactgtaagttccaagaaagcagacattttatgtagttgcctagtgttatctatccttagctccctgaactgtgccctcatacataaaatatgctccataaaaacttgttgaataagtgatcaagatgatagcacttcatgtgacacacaatgaacgtaacactaaacattttggcatgttagacatatttatgtatatagttgaatactttaaggaggcttaatcaatctcctcctttactggttaaacacaaaacctgaaatatcctaaaataggcaatctgaaagataacttaaggattgtaacatttctcaaaagtagccaaagtgggcctatcacatgtgattccttggccatttgattaaacatgactcactgtgattatgtcataacctaaattaatcaaagggctaattctatagctttgtatagtttcctttgtatagctcatttgtcatttcaaaatctccttaagagcaggactggatcttgtacatcttaatcttctctgcagggactagataatggggcaaactatatagtttattaatatcaggattgatggcacccaaggccatctcttctcatctcttctctttacttaaaagtgcaccagtaggcacacccatatatacatgcctataacaatgctaccataaaaaagcatcttcattcagcagatgaagtctccaaagcaaactgcctaatgactttattttaccaaagctgagtcagagctgaaaccttagcctcctctttgactcacaacattcttgtctaaagtacaccgcggctaccaaaaggaaggaaaaaaaatagactgttcctttatctgacatccgacatacggttcttactaacaatccatatatatacatcatagagggtcaaattctaacagtggatggtgatattcaagatgaataatgttgcttgtaaattactttacagtttatgtaagtcataatgctagaaaaaactaattgcaattcacagtaatctgactcttgatcgccaaagcatagttcaacacagaattgttttttgtttttaatatccaaaacaatgttggaagggagatgtctagctatgatataatcaaagctttataccgttccaaggacacacagttatattcatgttctggcacacacaaaaaaagcactactatcctttagagaaaaagttagcaaactacagttcatgggccaaatccagcccacagyctgctttcctatggcccacaagttaaggataacttttatgttttttaatggttgagaaaaaaatttaaaaaagaataatacttcatgacctgtgaaatttatatgaaattca

SEQ ID NO: 715699 - DNA, 777 bp, Homo sapiens
cggggaagcatctgacaagtgtctgttacagtgattgatatttttattcaatataaagagcttcccacattttcaaattctaagtttatttcaggtttggttgtagaaatttagaaaaccaagtcataaaagaaggcactatgaaatcaacaatggaataattttgcagggtttacgtttttcagaagctcctatgggagcagggaagctattattatagtaaatacaagttgggatgttatgagccatataagctggaagaccaaggatgcaaagtaattgaggttgcaggtgaaagtgtagccctggtgtttcttcaagtactcaatgatggatggcatataaatgaggttagggtatttatttgagggctcaaggtcacaggcaagggatgcaggagtggaaaggtataagaagctatattcagaggatggatacttattttttcccccagccttactgaggtatagttgccaaaaaaarttgtatatatttaagatatagaatatgttttgatatatgtttacattgtaaaatgattaccactgttaattaacatattcatcatctcatatagttaccattttctgtgtctgtgatgaggacatttaagttctactctattagtaaatttcagttgtatcagtcaccatgccatgcattagatctgcataacttgtatttgatacattataatcattacatttgatatgtttgacttttctgatgtggagatgtttcaggtaatgacaagttcctagtggtaatggagtgcaa

SEQ ID NO: 715700 - DNA, 1301 bp, Homo sapiens
cttgggatatcttaatagtgtgattagggatgtcttgagtgtcacagctgctgctgacccattgtttcacaaaactgtttaacaacaaaaagaaatgttcaaatagaaaattatgtactactactgaaaaatgttaactacctaatgggaagactcataatgacaaaaataaaatttcttcatggctttgttactaccatataaaaggaatatgaaaaatctcaacagaataatacaagaatttggtggaggtaattttaagtgtgtgagagtttcttagataaatagagttctatatgtaactctgaaaagacttcartgcagttttttgagaccatgctttctgaatttgtctgaatatttcttgtatatttattttgatagtgtagtactatttcttatgcctttattgtgaagaatactatcaatgtttgacggaagtacagatttcagaaacttatatgcctcagttcacttttcagaaataagtttcccactcaaaatgtgttcttggggaatatttttggaaagtccccccatagatctcatgcacaggtgggctcaggatgttctattttggggaatgtgagtgcacagtggtatcttcagaagaacgcacttgtttgtacattgattttcaccaaagagcttgttcagattaggaaacacagtggggttggcggtggtcacagactttatgctcagggagaaacttattatcctgaattaggttggtagccatctgccagctcaactatttttggtaccagaacttagtgatgccatctctttaatgaccaaaagtcaccatgtctctactatcttgcctttgtgaggctctgcttacattgggcgggggttgccatgctaacctgaaaactcttgggcatttctgcatatcctaatatcatggatggttggactgaaagaaggaggaattaaaatatttaatttatatataagatacagtgtagtatagatgtatgtgtgtgtatgtctatgtgtatgtatgtatatatgtttgcacacatatataaatgtgtgcgtctgtgtatagactgtgtataccaaatccaaaatctcaaatgcttcaaattccaaaactttttgagtgtgaatatgatgctcaaaggaaatgtttattggagcatttcaaattttggatttccagattagagatgctcaactcgtgtaatgcaaatacttcaaaatctgaaaaaaaatgtgaaatgtaaaacacttcatgccttaagaatgttggatgagggatactcaacctgtttctgtgtgtctgtgtatca

SEQ ID NO: 715701 - DNA, 1743 bp, Homo sapiens
tattttttcttttgatctggacatctggatagttctttgatgtattgttcagtaggacccagacttatttgtctttccctagagaagctgaagaaccattttttatttattcattgcaaaaattcttagtgataaagctgtagtgcacacaaaaattcataccttcctaggcatctctgcaactaacttcttgatatatttgatgtggttaattacccccttggtcttgatttgtctttttcttccttggtcttgaacctcttcttatatctcagccctcttctattttttttttcttgtcactgtttcttttattcattttctaaatttggaggtactaaatccatggtcttggtctatatttctgcacttattcagagaagacatctcttcttttttgagtttgtgggctgatggttctcaactgtagtggtttgaatatgttccttgcaaaaggtatgtctgagctctaacccttccaaaacctgtgattctgaccttatttagaaatagaatttttgcagatgtacttaaggatctagaaatgaactcatattggatttgaggtgggctcaaatccagtggcaggtatccttataagaagaggagacacacaggcagagagacacagagaaggtcgtgtgaagacaggcagaaattggcattatgctgccacagcgaaccattaccaggagtcagtggaagctggaagaggcaagggagggttctccctaatgccttcaaagggagcatgactccgccaacascttgatttcagatttctgtatttcagaactgtggaagaatacatttgtgttgtttttagccacccagtcacagtaatttgttagggcagccctaggaaactgtacatcaacttcgtaattccagtctcggtattcttccagttgcaatttgaattcacagttgctattgactcatgactacctggaagacgtatttaagatccgaatcattgtttttcaccagactgaaaagctcaagttcatctttgtttttttttctttttacatctaattagagacaaatccttcattcagtctcccttcatgatgtcttttattccctctgctgacatcttttgtagagaaatccaggacagagtataaagagaaaaccagtacttaatgtgtctttgaaattctcaacgtggcaagctgctgcatttgtatttcttaattatcacttctcagttcagaaattttgcatagcttgttgtcatttttctgggcatccaagatcctctacagaatgattacaattttacttttaaactttttaatgcctcctcattgataggataggatacttctatctctaaccagaagatttgacttattgttgctgatgcaaaaatcctgtgttctgtatcttttcagaatggaatggccccacttccatcttcttcatttctacttacccatccaaaggatgtccattcttttatcagattcatggagagttttctgaagatgccagcgcagaataatctttaccttctctgaatttgttcctcttgtccctttttattttctcttaatttgcattatgtataggttttatatgttattctaaagataaaaagaggaatacagtaaaaattctccttccctatcccccaccaagttctcctgcccagaggcaaccactgttaacagtttcttgtgtgtctttccagagataatgtatgcatattaaaaccaatattcatgctaaatattt

SEQ ID NO: 715702 - DNA, 1378 bp, Homo sapiens
ggacttaagtgttaaaagtttggagttcatctctgatgcttttggaaagttttcaaacattagtttgagggaggggttaccctttgacttacatttctccctgcttcttaaatcttcgtgtttgattatgagaggagtttgtcatgaactttgttacttgataaaactcacagcattattcctttttcctgacagttaagtacagtaactgtaagtcacttttatttaataagtttacatgccccacagtgtttctgggaaagaaaatgccgagggcatatctgtcaactttattacaggtaaactggattttgagtgtgtctgcagagctggctaaggctgtgtgtttggtgaatgctaacatctggcagccactgagttctggcatgagggggaaggcaggcagatgggggcactattgcctcaaaagtgaaaggtggaaaaggctgcaacattcctttcagtgccatggtggtttcgcccaaagcgatttgttgcagtcacactttaaacagtttaagaaagatctgtttttcaaaactgatcttaaattgttcaaacctgtaaatctttaggaatatctgattactaaactatatattgaggttgagtgaaagccaaaaaaacaaaatttcagcctaaactaactttgtgtacagctgcagttttccagtcttcatcagattcgtcagtgaagtgggcttgaatcatcacccagaaagattaagagccactttttggaaagttatttttaaggagctccgcatattttatgatgtttatcttcgtgccttcctaggttgcagatatcaagaaagtcaacaacttcatcagagaacaagacttatatgctttgaaatctgttaagattccagtgagaaaccatgggatcctgatggagacccacaaagaactgaaaccccttctgagcccgtcttccgagaccacagtgaccgtggaactgccagaggcagacagagcaggcgcgggcaccggtgcccaggccggccaactgatgggcttctttaaggggattgaccaggatattgagcgtgsagtgcagtcagaaatctttctacatgaaagttactgcatggacacctcccatcagccactgctcccggcacctccgaagacgcctatggatggtgcagattgtggcattcagtggtggaatgctgttttcatcatgctgctgattggtattgtcttgcctgtcttttatttggtctactttaaaatacaagctagtggtgagacccctaatagcttgaacacaactgtcatccccaatggctcgatggcaatgggtacagttccagggcaagcccccagactagcagttgcagtgccagccgtcacttctgcagacagccag

SEQ ID NO: 715703 - DNA, 1539 bp, Homo sapiens
atacattattcttttatttgtaaagtggggtaggtggtaaaaatgaaatcatagcatataaacaacttactaaaaattattgagttaatcagaaaaagcatgttgataattaatatacatatgaaaaaagtccaacctcaatcataactttttaaaaaatgtcaattgaaacaataagaatatcagattaacaaaaattttagctgtaaaacattcaattttggcaaagataaaggaaagaaacatgctaatgcactacctgcgagactgtaatagttccaaattttcgaagagccattacaaatatctggcaaattaaaacactcacttcctttcatccagcaatggcaccactaataatttacactaagaatcaatctagatgaatatatatgaagatgcttattacagtattatttataatagtaaaaaaatccattaatataaacttattagctacactacaaagtgaccgttccatggaatattatgcagatgttataaaggatatgttaatataaatgtggtcaataagtattgcattacaaaaagaagagtagaaattgagtttgtagagaataatttcatcaccatataatgagaatatatatacactgaaaatttctgaaaggatccacccaaaactgctaacattatttaccactggggcttgaaaatgatagagatttgctcttgtcatttatttttttccccaggaacaacagtaatttggccataaaattagtgaaaagaaagaggcattaacaagataattgagggacggtgtcgagtttttatatgtttgtggaaggaggagatgagaaattaaaacttaaaataaaaataaaatccttatagtcacaactctaagaaaggaaagrtacttacagacaggagaatagaggctaatcccacatcctataagtgtcaaaccaaggactaggattcagctctcctgacccttgccccagtgctctttctatgatcctaagcaacagtatatctatgcctagaaaatcaagccaactgaggtggaaaagatctcagccattatttctgtcttctctgaatatacaggattgattatgagttcataaataaataagaaatattgaagggttgtccatgggacactaaagttccactgtattctgaaccagaatttcttaattcaataccattgctctaaaaggatgctttctcaagcactgaaaaatatggttccatttatgtccctaatttaagggaagagacattttgaattggaggcaaataatctatgttgtaacacttcgaagcttggtcaggaagcttatgccaaatgccttatgtgtacttgtgatttttgtattctgaccctgaatgtatttcacacataagctgacatgtctccaataattttcctcctaattacggtataaatgaaatattagcacatattatctcagcaccccaccaactgatcagtttgttgctataaagtgcaaatgcccaatcatataaaattccaagcagtgctctactgaaaatgagaaggca

SEQ ID NO: 715704 - DNA, 1539 bp, Homo sapiens
atacattattcttttatttgtaaagtggggtaggtggtaaaaatgaaatcatagcatataaacaacttactaaaaattattgagttaatcagaaaaagcatgttgataattaatatacatatgaaaaaagtccaacctcaatcataactttttaaaaaatgtcaattgaaacaataagaatatcagattaacaaaaattttagctgtaaaacattcaattttggcaaagataaaggaaagaaacatgctaatgcactacctgcgagactgtaatagttccaaattttcgaagagccattacaaatatctggcaaattaaaacactcacttcctttcatccagcaatggcaccactaataatttacactaagaatcaatctagatgaatatatatgaagatgcttattacagtattatttataatagtaaaaaaatccattaatataaacttattagctacactacaaagtgaccgttccatggaatattatgcagatgttataaaggatatgttaatataaatgtggtcaataagtattgcattacaaaaagaagagtagaaattgagtttgtagagaataatttcatcaccatataatgagaatatatatacactgaaaatttctgaaaggatccacccaaaactgctaacattatttaccactggggcttgaaaatgatagagatttgctcttgtcatttatttttttccccaggaacaacagtaatttggccataaaattagtgaaaagaaagaggcattaacaagataattgagggacggtgtcgagtttttatatgtttgtggaaggaggagatgagaaattaaaacttaaaataaaaataaaatccttatagtcacaactctaagaaaggaaaggtacttacagacaggagaatagaggctaatcccacatcctataagtgtcaaaccaaggactaggattcagctctcctgacccttgccccagtgctctttctatgatcctaagcaacagtatatctatgcctagaaaatcaagccaactgaggtggaaaagatctcagccattatttctgtcttctctgaatatacaggattgattatgagttcataaataaataagaaatattgaagggttgtccatgggacactaaagttccactgtattctgaaccagaatttcttaattcaataccatkgctctaaaaggatgctttctcaagcactgaaaaatatggttccatttatgtccctaatttaagggaagagacattttgaattggaggcaaataatctatgttgtaacacttcgaagcttggtcaggaagcttatgccaaatgccttatgtgtacttgtgatttttgtattctgaccctgaatgtatttcacacataagctgacatgtctccaataattttcctcctaattacggtataaatgaaatattagcacatattatctcagcaccccaccaactgatcagtttgttgctataaagtgcaaatgcccaatcatataaaattccaagcagtgctctactgaaaatgagaaggca

SEQ ID NO: 715705 - DNA, 1539 bp, Homo sapiens
atacattattcttttatttgtaaagtggggtaggtggtaaaaatgaaatcatagcatataaacaacttactaaaaattattgagttaatcagaaaaagcatgttgataattaatatacatatgaaaaaagtccaacctcaatcataactttttaaaaaatgtcaattgaaacaataagaatatcagattaacaaaaattttagctgtaaaacattcaattttggcaaagataaaggaaagaaacatgctaatgcactacctgcgagactgtaatagttccaaattttcgaagagccattacaaatatctggcaaattaaaacactcacttcctttcatccagcaatggcaccactaataatttacactaagaatcaatctagatgaatatatatgaagatgcttattacagtattatttataatagtaaaaaaatccattaatataaacttattagctacactacaaagtgaccgttccatggaatattatgcagatgttataaaggatatgttaatataaatgtggtcaataagtattgcattacaaaaagaagagtagaaattgagtttgtagagaataatttcatcaccatataatgagaatatatatacactgaaaatttctgaaaggatccacccaaaactgctaacattatttaccactggggcttgaaaatgatagagatttgctcttgtcatttatttttttccccaggaacaacagtaatttggccataaaattagtgaaaagaaagaggcattaacaagataattgagggacggtgtcgagtttttatatgtttgtggaaggaggagatgagaaattaaaacttaaaataaaaataaaatccttatagtcacaactctaagaaaggaaaggtacttacagacaggagaatagaggctaatcccacatcctataagtgtcaaaccaaggactaggattcagctctcctgacccttgccccagtgctctttctatgatcctaagcaacagtatatctatgcctagaaaatcaagccaactgaggtggaaaagatctcagccattatttctgtcttctctgaatatacaggattgattatgagttcataaataaataagaaatattgaagggttgtccatgggacactaaagttccactgtattctgaaccagaatttcttaattcaataccattgctctaaaaggatgctttctcaagcactgaaaaatatggttccatttatgtccctaatttaagggaagagacattttgaattggaggcaaataatctatgttgtaacacttcgaagcttggtcaggaagcttatgccaaatgccttatgtgtacttgtgatttttgtattctgaccctgaatgtatttcacacataagctgacatgtctccaataattttcctcctaattacggtataaatgaaatattagcacatattatctcagcaccccaccaactgatcagtttgttgcyataaagtgcaaatgcccaatcatataaaattccaagcagtgctctactgaaaatgagaaggca

SEQ ID NO: 715706 - DNA, 1166 bp, Homo sapiens
aattatttttttaaaaagataaacaacattgacaaacaaaaggaaacatgacaactgataccacaaaaactcaaaggatcactagtggctattatcagcaactatatgcaaacaaataggaaaacctactaaaaatggatgaatttccagacacatccagactaccaagactgaaccaggatgaaatccaaaaccagaacagaccaataacaaataatgggatcgaagtggtaatgaaaagtctctcagcaaagaaaagcctgggacctgatgattcactgctgaattctagcaaacatttaaagaagaactaataccaaccttacccaaacgattccaaaaatagagaaggagagaatacttccaaactcattctacaaggctaatattaccctgataccaaaactaaagatacatccaaaaaagaaaactacaggccagtatcactgatgaatattgatgcaaaaatcctcaacaaaatattagctaattgaattcaacaacacattaaagttggggtgcagtgtcccaggttcactcaacccttcccgttttcttgtctgtgtgtgtctactttgctctgttccctggtggcagcggcrgtggcagtgttggtgcatgggcctcccaggacaaggggaaagtgagtatgccctttttttgcctcctgccaggcatctgcagcctggcgcaagctctggccaggtcttcaagcaaggtacctggagatgttcttttccaatttctggattggtaacttgaggcaaattctgggcactagaatcagaactaagacgagacatgaatcaggggagtctggggtcctgagaggcagaggcctgaaaccatctagagcatgtggggagctgggtgtgtgttcaggccagttgcctttctctgtgcttcaatgttccaggtacccttggagggactgagatcctagggattgctggagcctggctgcatggcctggccaccctgatgcccttgcgttctccgtgacaggacagcaaggctgaggagaatggctcccacagcttcatgcactccatggacccacagctggagcggcaaatggaaaccacccagaacctggtggactcctacatggccattgtcaacaagaccgtgtgggacctcatggttggtgcgaagcccaagaccac

SEQ ID NO: 715707 - DNA, 658 bp, Homo sapiens
tgaagcagttttacttatcaatatttccttcaagaacctcatctcactatgcccaccaatcctaaactatcacagcacaaattttgttcaattcatttcagttctccatcttaacagataccttaaattacttaagcctagactctaaatcctataaatattctcccttttcttccccctctgacatatgattaagactattaaggtaacattatctctaactgcgacaaatttaatgaatacaactttgatttatttataggttatctgatggtatcttggagaattaaacaatatatttagggggcttaaaaattaatgtttgcaaattccaaaatatgttcagttatacttaacttgaaggagctttgtatatatatgttttcatagttttgattcttgtatgatttctttaaacttatcatccaattcaccaatgctctcttcatctactgctactttattgttcaacctatctctctctcacatatatatgcaagaggtatctatctatstatatattcaagaatatatctagatatatttttaatttctagaatatatatttgtatttccttcaaatatagcagttcttttttcccaggtcataaaattttgttaattttgttttgtagattctttgtcttttaatgataaa

SEQ ID NO: 715708 - DNA, 647 bp, Homo sapiens
tttcaaaaatgtatcaataggaaggggagcaagaaggcgggcattaaaagccaggctgagaaacaaaatgagccccaaagggatgaaaatgacactatggggcagaggaatgacgtggagcagtcgaagcaatggaacctgagtacttcaggggaataaaatgaacggctttcttttgtaatgtggtttctagggttgaggtacaaggctggkcagtcagcagaaagtaaatctctggaggttcttggaccaaaaggatttttctgccagctcctggatgacatgtgttttgctagagcgagggtagcatttctgagacaggggtttgtaatagaccctgattaataagcgtcctttttgggtttgtagacggaagaagacacaactgcagctgatgaaatttcccactagttggaaatctataaatgccctacttataagaagtagcacatccttgtgtttaacatatgaaattactgtggttaggtgacatagtttggatatttatacccttcaaatctcacgttaaaatttcctccccaatattgtaggcctaaagaggagtgtttaggtcatggggacagatctctcatgaatgtcttgatgccatccttatggtaatgagtgagttctcacgctattagttc

SEQ ID NO: 715709 - DNA, 1567 bp, Homo sapiens
tactttacatcaattattttatatttgatcctctcttgtgcagactttccatgagcaaattgatttcttaaagactagaaattctaagcaactatcttgaaaaagaccttttctatttgttgtcaactaaacagatttgagcatgagacctccttcttttgtggaagtcccgctacttagatgatcattgcactgtctttcccactttctagatctgctacataatgtaggccaccagcctgagtatcaaaagagctgtgatttagccccagaccagtctgtacatttttggacttgtcacaaagtgactctatacattaatgtgtaaaatgagagaaatttataataattttaagacacccatcagctgaaaattgtacactgagagttagcaaagagagggtaaatgctaattcactgaactttatttgataatgcttattctggtattcactagagctattcagtgatacrcctatctcctccttctggtcaactggaactgagaaaagagcatcaaattcttgagcagtatggcaaacaagagggagaagtccaaatagaaaaatccagaacataaaaatcagtaaatgccacctattaatgttgtagaacatgaaatgtttctttatttttctttattatttgtttaagaagcatcaaacatggtaaaattgtgtatttaatttttatttataaatctactctttagaacccagagaaaacactttcttaaacagtggttttaaatggtctcctaagaccatttaaaggccaacaaatttatttaaacaatcccatcaatagtagcccatttgtaaaattcttttccagtatatgaaatagttcctttacagaatatctatataaaagacagcataaacctagaacattaatacctacaacttatgagataatagagccaacttagctatgatccaaagtaataaaggaaaaagcaacaacagagaaaggtatctgtacagatttatgacatgaatttgccaaattatatggtaataaatcttgagaataagaataaaccaggttattttaagaaaactatgtaaataaaactaatatacaaagagctagaaattgtaaacctatcattaaagaaggaagaaactgaaaatgttatatattaatcctcctctgtccctggagcttaaaaaaaatctagtcaggcagagattcacttgcaaatataagttcctccatcaatacaacaagtagaaattttttgaatctccatattattaatccatatgttctctaccttgttatgatatatatgaaacaaaataccagtaaaatgtttaatcatgaaacaatagaatcattacaaataaggcaataaagatatgatgtaatatactgttggctttttttgcttactttgtttcatctattgagatgattatgttgtttttgtcctatattctattaatattatacaatacattaactgattttcagatttttaaacaactttgcattcttgtgataatacccgcctaatcatggtatataaacctttgtgtacattcaggacttgtttacaaat

SEQ ID NO: 715710 - DNA, 683 bp, Homo sapiens
taactaatgcctttattattgttaaagatttgaaagcattttaaatgttaacaaataaaaggtgttataaccaagggcagaaggatttcagcatattcagaagccaaggtaaagtaggtctataaacyaaagaaaatcttgtaacagaaaatcattcagtcagagtcaagtagcactcatactatgaaaataaaaaatattatccaccatattgctgtagacatgccatcaactgatgatattgcaaaggctaaactctaaacctatatctgtaatcacagcaaatggtggcaagaaaaaaaatatatagacttagaacaaaacaaagaaacaaaataatacccaattcaaagccatgaaaaagcaaataaaattattattgaaatgctgactattgcagaaatattgggtgaatatttcaaaatgtagccagctatccagatatttatcatgtttctttagaaaaaaattaggatttgtttttaagtatattcagatctttggtcacaaaatcacagattcctagaaaatatttaatatacattgcttttaattttacacattaaatctatggtacatataggtattttttagggccactgaaacaaattgtcactgcagccttacatacgctgtttgccactgaaatcttagaaaggaatggacatggaggaagtaccatc

SEQ ID NO: 715711 - DNA, 1409 bp, Homo sapiens
aaggaagagggtcaattgtttgagattattagagtgtaaataattcacagagaaagggagatatttgcaataattatgaaagaagaagccagatttggcaatttcttggataaaaagtataacctcacccactccaggaaaacctcccagaaaatagtatgcttgagggtgctagctatctattgctgcaaaaggaatgaccacaaacctagcggcttaaaacaactcccttgctatttcccagtttctgtaggtcaggaatctgggtatggatcccctgcttcaggatctcttaccaggctgcaattgatttgtcagctggggctgtggtcttatcctaaggttggactggggaagaatctacttctaagttcatgtgattgttggtaggattcagttacttgctggctgttgtccagatgccacctttccttgctacatgggcctctcagtatagcagctcacaacatggtggcttgcttcatcraaccaagcaagagagccagtctgctagtgagatgaaagttacagccttatgcaatgtaatctcagaagtgggatgctgtcatctttgccataatctactggttagacacaagtcccaggtcttgcctacacttagagggaaaggataaaacaggggcaaaaatagcaggaggggggatcatggaagcccacttagaataaccatcatattggaaagcctggaattcttccaaatacttaagaaaacttgtagaaagaggcagttaaggagaatgatgaaactatatcaaactacttagtttgccaaaaagacagacaaaatagacctaaaggcaccttgagacagagtatttggcagagaatattcagagaagtcaagatgaactgaccacatatggctcatagaaaaatataaaatgtctcccaaaataagcatcatcagtgaaaaatggagatacaaatgtaagaagaaacaagggagtaattgattttaaaatgaacaaaataagctaaactacttctatgaaagtaaaggcagttaatctggatagaagtaacacttctttaagtctcaaatatagaagttaaaggaaacttaggacagaaaaaaggcattttacaactttatgtaaatagactcctttaagcaagaggagtggaaataagactggagagatttaggggctagcaattacagggagtgagaataaactacctggtttagtatgtaagtgacagaaagaggagggaagggaaaaaactagcagaagcagtgggatccaaagagatagagaaaggtcagcccaagcctgggcaacatggcgagaccccgtctctacaaaaaaattaaaaaaatattcaggcatggtggcaagcacctgtagtcacagctacttgggatgctgagacaggaggattgcttg

SEQ ID NO: 715712 - DNA, 631 bp, Homo sapiens
ttccttcctcttctgtgccatagcagaggccatttccacccttcctgtttacgaaggtgccattgtgcatatgtaattcacctgattcaattctatattgttaattccccagggtacctccctgttaggagagaaccatcatgagctgagtcagagattaagttctattgctaattttatgcaaggctttataaaatcacttaccttcccgtatagttcaatttttccatctttaaaatgaatacaatatatgtctagctcagagcgatgttctgtgttaaggcaaaataacatgttraaagcactttgtaatataaaatttccatacaaatacttggtttaggttcttgttttaagttaaatctcattttacccctttatattacaaaagctctcattagtcactgcagtattacagaattactagaatagatatattctgataatatagaaaatacagagttcttacttttcaagccaactccaaattctaacgctacaccactattccttttcttctattttcttgctgcctttgaagacagaatatttctttacattaacaagtataacaaagccctcagagttaccaagatttttcttaaagcttatttatttgttaattcaacaa

SEQ ID NO: 715713 - DNA, 1333 bp, Homo sapiens
tgattatctgccacgggtgcttattaacatgtaatggagtcacatcttatccagtggtaatgttctaagggcatcacttttgaaaatttattcatgctttcattcaacaaatatgactaagtcccctctagcagccagctccattctaggtccttggaatatatcctttaaccaaacaaaaaatattcctgcatggagcttgcaactggtgagggcatacttaaaaatcaataagctaagtaaataagcaaattatataatgcatttgaaggtgctgaaagcaatgtgaaaaataaaaatagcacagagaaagaataattctaagtgtatagtgggagggtcaagactatgatcagaaattttaaatagggtgatctagggaggtctgagtttgagatttgagacttaaagaaggtgaggtgaaaatcgtgtttaatcaaaaattcctttgtgatgtgcttcttgaaaattccttgacrtcccttcagtcagtaagaactaagcactttgtcattgctggagccctagataagaatagcttcatttacacatcatgtagtataaaaattatattctagattataaaatctagattcaggctcagtacatcaagagactcacactagaggaatacggtctacctgagggaacagccgacgcaacttctatatcatattcatctagcataagcactgagaagaaatctgcgtaaaatcaaccacacagtattaattacatttgcttctcctctttctgtttgttgcttgcattcaccctaccctcttttttccctgaacactattcttcttccagagcagagttggatttatatgctttaaatgtataattagacctcattgtatatcagcgtatccgatttatcagaggtgtgctggtgaaactaaacaaatttagaaagcactcaatgattacttggtgaaaaaaaattaactaaaagccactaattttttataattctaaaaatttataacaaattaatatgcattgtttcattcacaaaacatacaggtatggatattgctatatactatattattttctatagtacttttttatatccaacaagtatttaaaaattactgcgttatgccttttagaatgaagtattaaactcaaatcagcatagacaactagtaatgtctaaacataagtgccaacatgcagttgtttttatagtgtggcactgaatgattctttttaaaatcttgaatctttgcttaggagccagatccccctggactgccaccaggtctttaattctgcagtgactacatagaattagtatcagtgaaccaaaagcccttttgttaag

SEQ ID NO: 715714 - DNA, 1333 bp, Homo sapiens
tgattatctgccacgggtgcttattaacatgtaatggagtcacatcttatccagtggtaatgttctaagggcatcacttttgaaaatttattcatgctttcattcaacaaatatgactaagtcccctctagcagccagctccattctaggtccttggaatatatcctttaaccaaacaaaaaatattcctgcatggagcttgcaactggtgagggcatacttaaaaatcaataagctaagtaaataagcaaattatataatgcatttgaaggtgctgaaagcaatgtgaaaaataaaaatagcacagagaaagaataattctaagtgtatagtgggagggtcaagactatgatcagaaattttaaatagggtgatctagggaggtctgagtttgagatttgagacttaaagaaggtgaggtgaaaatcgtgtttaatcaaaaattcctttgtgatgtgcttcttgaaaattccttgacgtcccttcagtcagtaagaactaagcactttgtcrttgctggagccctagataagaatagcttcatttacacatcatgtagtataaaaattatattctagattataaaatctagattcaggctcagtacatcaagagactcacactagaggaatacggtctacctgagggaacagccgacgcaacttctatatcatattcatctagcataagcactgagaagaaatctgcgtaaaatcaaccacacagtattaattacatttgcttctcctctttctgtttgttgcttgcattcaccctaccctcttttttccctgaacactattcttcttccagagcagagttggatttatatgctttaaatgtataattagacctcattgtatatcagcgtatccgatttatcagaggtgtgctggtgaaactaaacaaatttagaaagcactcaatgattacttggtgaaaaaaaattaactaaaagccactaattttttataattctaaaaatttataacaaattaatatgcattgtttcattcacaaaacatacaggtatggatattgctatatactatattattttctatagtacttttttatatccaacaagtatttaaaaattactgcgttatgccttttagaatgaagtattaaactcaaatcagcatagacaactagtaatgtctaaacataagtgccaacatgcagttgtttttatagtgtggcactgaatgattctttttaaaatcttgaatctttgcttaggagccagatccccctggactgccaccaggtctttaattctgcagtgactacatagaattagtatcagtgaaccaaaagcccttttgttaag

SEQ ID NO: 715715 - DNA, 761 bp, Homo sapiens
gcatacttcccatcaatttgagtaatgtattatattctagatggtgataatattctagatagtcactcctttcccccctcctccatctcctgacaaccactaatgaactttctacctgtatggatttacctattctggacgtttcatataaacaaaatcatacagtatgtagccttttccatctttttcagatagttwgttgcatgagctttatatattcaatgtaggcccttaattagaaatttctggtcacatcctatgcataaatagatttatattttatattatattcacattcaaaccagcagatgtgattttcaagtcaatgatttcatgcaaagtggtttctgattgtgctacatatggtatgggtgcattaatataatgagtaacttctggaataatgatgcaaatttcccacaaaatatacatcttatagacatataaatcaagatgttcacatatgaaaagcatgacatttcaaggcatttttagattctaacaaagaaatttaataaaattgtgtatgttcagagaaaacacattagaagaatcttttaatatatttttaattccagtggtgattgtatcataatgtctgggatttcaaatagtagctgactcaaggcatttgcatttaatgtttcctccagacttttagataagtacatcatcataagcacacttatacatcatacctgtaggtacaggttagtccatcaaaaataattgtaaccactacgcataatttgaaaaaaatc

SEQ ID NO: 715716 - DNA, 761 bp, Homo sapiens
gcatacttcccatcaatttgagtaatgtattatattctagatggtgataatattctagatagtcactcctttcccccctcctccatctcctgacaaccactaatgaactttctacctgtatggatttacctattctggacgtttcatataaacaaaatcatacagtatgtagccttttccatctttttcagatagtttgttgcatgagctttatatattcaatgtaggcccttaattagaaatttctggtcacatcctatgcataaatagatttatattttatattatattcacattcaaaccagcagatgtgattttcaagtcratgatttcatgcaaagtggtttctgattgtgctacatatggtatgggtgcattaatataatgagtaacttctggaataatgatgcaaatttcccacaaaatatacatcttatagacatataaatcaagatgttcacatatgaaaagcatgacatttcaaggcatttttagattctaacaaagaaatttaataaaattgtgtatgttcagagaaaacacattagaagaatcttttaatatatttttaattccagtggtgattgtatcataatgtctgggatttcaaatagtagctgactcaaggcatttgcatttaatgtttcctccagacttttagataagtacatcatcataagcacacttatacatcatacctgtaggtacaggttagtccatcaaaaataattgtaaccactacgcataatttgaaaaaaatc

SEQ ID NO: 715717 - DNA, 2420 bp, Homo sapiens
gagtttatatagataagtaagtaatttacagaaagacattaatatcactaactacatttaaacataagtaatatttttaaaaattaaaatagaattaacagttctttacagaatcattctttaaaaatatttatgaaaaatgtgttaaarttattatattggaaacgttttcacaaatataaagtgattgaatgatttccatacgtgtttacttgactgtgtagagcagggttctattgagtgcatgtaaacatttactcctaagacacccactaacctaaggaaaatatccaaatcttccacacttgccaagtacagcagagcctgctatttgaatctacaaatccattctcccatattccttgtagcaataatatctccaagttgtatatggatagatgatcatccagcaagagtatgtcactcttaagtctctacttacctcatcaggactgacaacaaagaacttaaagataagcatcaatctgtagaccacattttgagtaacttcattctgtaatgcgaagtgactttctcaaagacgcttccaaccagctatcggcagaatctgaatattctgttccttggaaatctccttccctccctgcgcttcagaggtgcttcatcagtttatggataccaaaattgaaaaggagctcataagactgtgaagacaacttatttctagctttatgataaagattagaaaatcaagccttgaaagcgaagtgcttttcctgtgttcacactactagttaatggtggagagggtgacaaagaccatagcacaaggcttccataatggagatccccagtacctttcatgtctgactcttcagttgtcaataactcctgactctttaacctccagtttctttggtatctgaataagatgtgaagctctggaaatataattttttaaacctttcttgaaagaaaggcatgtctctttgaagagagaacactgggagcagtcttttcttcactgcacttcacacgcaagaagattcagatgcaaaatgtttatttagatgctagacctgtatcatcgtgatgtatgtgatctctagatgatcctttatctgataaataaggcaaaacaatactagctctttggaagagtcaacttttagaattaaaatgatattttttcactgaataattgcacaattttacttgacttgttttagggcttcatttctattttttaaacacgtattattccaacctcatcctcttttactcattctcattccctgagctctaactaaactagatgttagagcttgtccctatctccatatgtcttgtccaacctgttatttttcattttgtctttttgtggatatatatataaaaatatttatatatatataaacttataaatacatatttaatataaatgttaactatatatttcatataagtattaaatatatatacttaatttaaatattaaatatatatatttaatttctaactctgtaattaataacttttcccttcagcctttctctcagttttttcctaatttgtttgtaagacaatcactaagaaagaaattgcagttaaacacatagccccatatgactgctcctactttaaatgttgattactaactttaggtagtgttttaatgatgcaaccatagtatatttagaccattaaattttcttttcctttctcagatgactattatattgttcattatctttccttaaatttctaacatgtgcttttttttccatattcttacagtgtccttgagtaagttagtagaaggacaaaatcaaaacacaaaaagatggaccttaacagaccagtgctcctcaaagctctgatgtctctcttgcaaccactactgtcactaatgcatatttctggatcttgctgtcatcactgtggtaccaaatgtacaagaaaagaaatatttttctatcaataaaatgtttagttagcaatatcactaatgcatatttctggatcttgctctcatcactgtggtaccacatgtacaagaaaagaaatatttttctataaataaaatgtttcattagcaatattccacagctatatcacaaataccctgattgttaatattgttaattggttcagttcctgcagcccttttacaataacacacatatatagtaatagagtttctgagtcaggcaaaagtcagtgtgtctggaatcgtccacactcttgttgccttatatattttaggtaatcaatacaaattcctcctctttttaggatgagttaattcactctggctacaattattgttcttaaatttgaacttaacctgtgccacctggtttagcaaatatattttaataactttaatccttgaaggagtttgtaaaatgcatttcagttatttttcctttttcatttcctaagatatttgatattaa

SEQ ID NO: 715718 - DNA, 2420 bp, Homo sapiens
gagtttatatagataagtaagtaatttacagaaagacattaatatcactaactacatttaaacataagtaatatttttaaaaattaaaatagaattaacagttctttacagaatcattctttaaaaatatttatgaaaaatgtgttaaaattattatattggaaacgttttcacaaatataaagtgattgaatgatttccatacgtgtttacttgactgtgtagagcagggttctattgagtgcatgtaaacwtttactcctaagacacccactaacctaaggaaaatatccaaatcttccacacttgccaagtacagcagagcctgctatttgaatctacaaatccattctcccatattccttgtagcaataatatctccaagttgtatatggatagatgatcatccagcaagagtatgtcactcttaagtctctacttacctcatcaggactgacaacaaagaacttaaagataagcatcaatctgtagaccacattttgagtaacttcattctgtaatgcgaagtgactttctcaaagacgcttccaaccagctatcggcagaatctgaatattctgttccttggaaatctccttccctccctgcgcttcagaggtgcttcatcagtttatggataccaaaattgaaaaggagctcataagactgtgaagacaacttatttctagctttatgataaagattagaaaatcaagccttgaaagcgaagtgcttttcctgtgttcacactactagttaatggtggagagggtgacaaagaccatagcacaaggcttccataatggagatccccagtacctttcatgtctgactcttcagttgtcaataactcctgactctttaacctccagtttctttggtatctgaataagatgtgaagctctggaaatataattttttaaacctttcttgaaagaaaggcatgtctctttgaagagagaacactgggagcagtcttttcttcactgcacttcacacgcaagaagattcagatgcaaaatgtttatttagatgctagacctgtatcatcgtgatgtatgtgatctctagatgatcctttatctgataaataaggcaaaacaatactagctctttggaagagtcaacttttagaattaaaatgatattttttcactgaataattgcacaattttacttgacttgttttagggcttcatttctattttttaaacacgtattattccaacctcatcctcttttactcattctcattccctgagctctaactaaactagatgttagagcttgtccctatctccatatgtcttgtccaacctgttatttttcattttgtctttttgtggatatatatataaaaatatttatatatatataaacttataaatacatatttaatataaatgttaactatatatttcatataagtattaaatatatatacttaatttaaatattaaatatatatatttaatttctaactctgtaattaataacttttcccttcagcctttctctcagttttttcctaatttgtttgtaagacaatcactaagaaagaaattgcagttaaacacatagccccatatgactgctcctactttaaatgttgattactaactttaggtagtgttttaatgatgcaaccatagtatatttagaccattaaattttcttttcctttctcagatgactattatattgttcattatctttccttaaatttctaacatgtgcttttttttccatattcttacagtgtccttgagtaagttagtagaaggacaaaatcaaaacacaaaaagatggaccttaacagaccagtgctcctcaaagctctgatgtctctcttgcaaccactactgtcactaatgcatatttctggatcttgctgtcatcactgtggtaccaaatgtacaagaaaagaaatatttttctatcaataaaatgtttagttagcaatatcactaatgcatatttctggatcttgctctcatcactgtggtaccacatgtacaagaaaagaaatatttttctataaataaaatgtttcattagcaatattccacagctatatcacaaataccctgattgttaatattgttaattggttcagttcctgcagcccttttacaataacacacatatatagtaatagagtttctgagtcaggcaaaagtcagtgtgtctggaatcgtccacactcttgttgccttatatattttaggtaatcaatacaaattcctcctctttttaggatgagttaattcactctggctacaattattgttcttaaatttgaacttaacctgtgccacctggtttagcaaatatattttaataactttaatccttgaaggagtttgtaaaatgcatttcagttatttttcctttttcatttcctaagatatttgatattaa

SEQ ID NO: 715719 - DNA, 2420 bp, Homo sapiens
gagtttatatagataagtaagtaatttacagaaagacattaatatcactaactacatttaaacataagtaatatttttaaaaattaaaatagaattaacagttctttacagaatcattctttaaaaatatttatgaaaaatgtgttaaaattattatattggaaacgttttcacaaatataaagtgattgaatgatttccatacgtgtttacttgactgtgtagagcagggttctattgagtgcatgtaaacatttactcctaagacacccactaacctaaggaaaatatccaaatcttccacacttgccaagtacagcagagcctgctatttgaatctacaaatccattctcccatattccttgtagcaataatatctccaagttgtatatggatagatgatcatccagcaagagtatgtcactcttaagtctctacttacctcatcaggactgacaacaaagaacttaaagataagcatcaatctgtagaccacattttgagtaacttcattctgtaatgcgaagtgactttctcaaagacgcttccaaccagctatcggcagaatctgaatattctgttccttggaaatctccttccctccctgcgcttcagaggtgcttcatcagtttatggataccaaaattgaaaaggagctcataagactgtgaagacaacttatttctagctttatgataaagattagaaaatcaagccttgaaagcgaagtgcttttcctgtgttcacactactagttaatggtggagagggtgacaaagaccatagcacaaggcttccataatggagatccccagtacctttcatgtctgactcttcagttgtcaataactcctgactctttaacctccagtttctttggtatctgaataagatgtgaagctctggaaatataattttttaaacctttcttgaaagaaaggcatgtctctttgaagagagaacactgggagcagtcttttcttcactgcacttcacacgcaagaagattcagatgcaaaatgtttatttagatgctagacctgtatcatcgtgatgtatgtgatctctagatgatcctttatctgataaataaggcaaaacaatactagctctttggaagagtcaacttttagaattaaaatgatattttttcactgaataattgcacaattttacttgacttgttttagggcttcatttctattttttaaacacgtattattccaacctcatcctcttttactcattctcattccctgagctctaactaaactagatgttagagcttgtccctatctccatatgtcttgtccaacctgttatttttcattttgtctttttgtggatatatatataaaaatatttatatatatataaacttataaatacatatttaatataaatgttaactatatatttcatataagtattaaatatatatacttaatttaaatattaaatatatatatttaatttctaactctgtaattaataacttttcccttcagcctttctctcagttttttcctaatttgtttgtaagacaatcactaagaaagaaattgcagttaaacacatagccccatatgactgctcctactttaaatgttgattactaactttaggtagtgttttaatgatgcaaccatagtatatttagacyattaaattttcttttcctttctcagatgactattatattgttcattatctttccttaaatttctaacatgtgcttttttttccatattcttacagtgtccttgagtaagttagtagaaggacaaaatcaaaacacaaaaagatggaccttaacagaccagtgctcctcaaagctctgatgtctctcttgcaaccactactgtcactaatgcatatttctggatcttgctgtcatcactgtggtaccaaatgtacaagaaaagaaatatttttctatcaataaaatgtttagttagcaatatcactaatgcatatttctggatcttgctctcatcactgtggtaccacatgtacaagaaaagaaatatttttctataaataaaatgtttcattagcaatattccacagctatatcacaaataccctgattgttaatattgttaattggttcagttcctgcagcccttttacaataacacacatatatagtaatagagtttctgagtcaggcaaaagtcagtgtgtctggaatcgtccacactcttgttgccttatatattttaggtaatcaatacaaattcctcctctttttaggatgagttaattcactctggctacaattattgttcttaaatttgaacttaacctgtgccacctggtttagcaaatatattttaataactttaatccttgaaggagtttgtaaaatgcatttcagttatttttcctttttcatttcctaagatatttgatattaa

SEQ ID NO: 715720 - DNA, 2420 bp, Homo sapiens
gagtttatatagataagtaagtaatttacagaaagacattaatatcactaactacatttaaacataagtaatatttttaaaaattaaaatagaattaacagttctttacagaatcattctttaaaaatatttatgaaaaatgtgttaaaattattatattggaaacgttttcacaaatataaagtgattgaatgatttccatacgtgtttacttgactgtgtagagcagggttctattgagtgcatgtaaacatttactcctaagacacccactaacctaaggaaaatatccaaatcttccacacttgccaagtacagcagagcctgctatttgaatctacaaatccattctcccatattccttgtagcaataatatctccaagttgtatatggatagatgatcatccagcaagagtatgtcactcttaagtctctacttacctcatcaggactgacaacaaagaacttaaagataagcatcaatctgtagaccacattttgagtaacttcattctgtaatgcgaagtgactttctcaaagacgcttccaaccagctatcggcagaatctgaatattctgttccttggaaatctccttccctccctgcgcttcagaggtgcttcatcagtttatggataccaaaattgaaaaggagctcataagactgtgaagacaacttatttctagctttatgataaagattagaaaatcaagccttgaaagcgaagtgcttttcctgtgttcacactactagttaatggtggagagggtgacaaagaccatagcacaaggcttccataatggagatccccagtacctttcatgtctgactcttcagttgtcaataactcctgactctttaacctccagtttctttggtatctgaataagatgtgaagctctggaaatataattttttaaacctttcttgaaagaaaggcatgtctctttgaagagagaacactgggagcagtcttttcttcactgcacttcacacgcaagaagattcagatgcaaaatgtttatttagatgctagacctgtatcatcgtgatgtatgtgatctctagatgatcctttatctgataaataaggcaaaacaatactagctctttggaagagtcaacttttagaattaaaatgatattttttcactgaataattgcacaattttacttgacttgttttagggcttcatttctattttttaaacacgtattattccaacctcatcctcttttactcattctcattccctgagctctaactaaactagatgttagagcttgtccctatctccatatgtcttgtccaacctgttatttttcattttgtctttttgtggatatatatataaaaatatttatatatatataaacttataaatacatatttaatataaatgttaactatatatttcatataagtattaaatatatatacttaatttaaatattaaatatatatatttaatttctaactctgtaattaataacttttcccttcagcctttctctcagttttttcctaatttgtttgtaagacaatcactaagaaagaaattgcagttaaacacatagccccatatgactgctcctactttaaatgttgattactaactttaggtagtgttttaatgatgcaaccatagtatatttagaccattaaattttcttttcctttctcagatgactattatattgttcattatctttccttaaatttctaacatgtgcttttttttccatattcttacagtgtccttgagtaagttagtagaaggacaaaatcaaaacacaaaaagatggaccttaacagaccagtgctcctcaaagctctgatgtctctcttgcaaccactactgtcactaatgcatatttctggatcttgctgtcatcactgtggtaccaaatgtacaagaaaagaaatatttttctatcaataaaatgtttagttagcaatatcactaatgcatatttctggatcttgctctcatcactgtggtaccacatgtacaagaaaagaaatatttttctataaataaaatgtttcattagcaatattccacagctatatcacaaakaccctgattgttaatattgttaattggttcagttcctgcagcccttttacaataacacacatatatagtaatagagtttctgagtcaggcaaaagtcagtgtgtctggaatcgtccacactcttgttgccttatatattttaggtaatcaatacaaattcctcctctttttaggatgagttaattcactctggctacaattattgttcttaaatttgaacttaacctgtgccacctggtttagcaaatatattttaataactttaatccttgaaggagtttgtaaaatgcatttcagttatttttcctttttcatttcctaagatatttgatattaa

SEQ ID NO: 715721 - DNA, 2420 bp, Homo sapiens
gagtttatatagataagtaagtaatttacagaaagacattaatatcactaactacatttaaacataagtaatatttttaaaaattaaaatagaattaacagttctttacagaatcattctttaaaaatatttatgaaaaatgtgttaaaattattatattggaaacgttttcacaaatataaagtgattgaatgatttccatacgtgtttacttgactgtgtagagcagggttctattgagtgcatgtaaacatttactcctaagacacccactaacctaaggaaaatatccaaatcttccacacttgccaagtacagcagagcctgctatttgaatctacaaatccattctcccatattccttgtagcaataatatctccaagttgtatatggatagatgatcatccagcaagagtatgtcactcttaagtctctacttacctcatcaggactgacaacaaagaacttaaagataagcatcaatctgtagaccacattttgagtaacttcattctgtaatgcgaagtgactttctcaaagacgcttccaaccagctatcggcagaatctgaatattctgttccttggaaatctccttccctccctgcgcttcagaggtgcttcatcagtttatggataccaaaattgaaaaggagctcataagactgtgaagacaacttatttctagctttatgataaagattagaaaatcaagccttgaaagcgaagtgcttttcctgtgttcacactactagttaatggtggagagggtgacaaagaccatagcacaaggcttccataatggagatccccagtacctttcatgtctgactcttcagttgtcaataactcctgactctttaacctccagtttctttggtatctgaataagatgtgaagctctggaaatataattttttaaacctttcttgaaagaaaggcatgtctctttgaagagagaacactgggagcagtcttttcttcactgcacttcacacgcaagaagattcagatgcaaaatgtttatttagatgctagacctgtatcatcgtgatgtatgtgatctctagatgatcctttatctgataaataaggcaaaacaatactagctctttggaagagtcaacttttagaattaaaatgatattttttcactgaataattgcacaattttacttgacttgttttagggcttcatttctattttttaaacacgtattattccaacctcatcctcttttactcattctcattccctgagctctaactaaactagatgttagagcttgtccctatctccatatgtcttgtccaacctgttatttttcattttgtctttttgtggatatatatataaaaatatttatatatatataaacttataaatacatatttaatataaatgttaactatatatttcatataagtattaaatatatatacttaatttaaatattaaatatatatatttaatttctaactctgtaattaataacttttcccttcagcctttctctcagttttttcctaatttgtttgtaagacaatcactaagaaagaaattgcagttaaacacatagccccatatgactgctcctactttaaatgttgattactaactttaggtagtgttttaatgatgcaaccatagtatatttagaccattaaattttcttttcctttctcagatgactattatattgttcattatctttccttaaatttctaacatgtgcttttttttccatattcttacagtgtccttgagtaagttagtagaaggacaaaatcaaaacacaaaaagatggaccttaacagaccagtgctcctcaaagctctgatgtctctcttgcaaccactactgtcactaatgcatatttctggatcttgctgtcatcactgtggtaccaaatgtacaagaaaagaaatatttttctatcaataaaatgtttagttagcaatatcactaatgcatatttctggatcttgctctcatcactgtggtaccacatgtacaagaaaagaaatatttttctataaataaaatgtttcattagcaatattccacagctatatcacaaataccctgattgttaatattgttaattggttcagttcctgcagcccttttacaataacacacatatatagtaatagagtttctgagtcaggcaaaagtcagtgtgtctggaatcgtccacactcttgttgccttatatattttaggtaatcaatacaaattcctcctctttttaggatgagttaattcactctggctacaattattgttcttaaatttgaacttaacctgtgccacctggtttagcaaatatattttaataactttaatccttgaaggagtttgtaaaatgcatttcagttatttttyctttttcatttcctaagatatttgatattaa

SEQ ID NO: 715722 - DNA, 1832 bp, Homo sapiens
  misc_feature 1678, 1679: n = A,T,C or G
catattgttaatgcctcgtagagcaatagaagtatagcagtagggtcatgtgataggtgtattttttaaataaatagaaatactgctgaactagtatttatttcaaagtagctactgtacaatgtaatattcccaccagcagtttatgaaagttacagatgtaccacattcttgccaacaattggcatggccagtcttttaaatttcagccagtctagtgggtatgcagtggtacactgtgtgtagggggagggatagttatataatatttttatcatagagcctattaacaatttgttgtattagtttagctgtttagttgtttcacttaggtgtgaatgttattgtatttgaatttctttaatggctaatggggttcggcagcacaatttttgtaaaatgactgttcaaacttttttgccaagtttaattgcatttaaaatgagttgtaagagttatttacatattataggtacaaatattttatgcagtattagacttgcaagtactttctgcaagtctgtggtttacgtttttgttttcataggagtgcctccacaacattttaaaaagatttttttaaattctgattaaattcaatgtattaataatttccttccagttttcatgtcagtttttaaaatattttctaaatctaagtttaccagtatcttctcctatgttttcttatagaacttttatatatttagtacttgcattaaggcctatgatatagagttatttttagaatatatgtgcggtaaatgctaatgttgatctctgtgtctctccagttgttcccatttcttttgttgaaatgattgttatttcccaatgaaagtggtatatttattaaaaattagttggtcataatatgcatgaatatatttattcatcctctattctttttttatattttgtctttttgtcaacacatacatttttagaattgtagctgtatgatgcattataacatattcatatgtattataaaatatataattataatgaattaaatataaatatatatatttattcagcctcttttttcatatattgtctttatgtcaacacatacattttcgtaattgtagctttataaaaaatgtttgtcaggcactttaagttcattaattgtgtttttttttttcaaaattattttaactgcctagatcatttgccttccaaataaattttaagttatcactatttattgatggaattttaagttgattctaaaaatgggtttggggaaaattgagtcttccaatacacgaacctggtagagttttataagtatgtaggtttctttaattttagtgatttttgtagttttagtgtgttgtccatatgtttgtcaatttttcaacattatttgatatactaygttttctaaaattgtattgtgttttaaaatattttctagtcattgctagttgtaaaaatgcaatggatatttgtatgtttctcttattttctgaaaatttttcaaactctattagctctaggagctcttttacataatttatcatgccacctataaataatgacagtattttttattctgattcagaagtattttatttactgtcttgtccaacactattggacaaaatttccagtaaaatgtcaaatatatatggctagaggatcaattcttaatttgcgcctgagcagnngagaaatacctgcatgtttttaaatttaggtatcattttaactttaatagatgcctgttatgaagttgaaaaagttcatttcaatcccttgtttattaagattttttctttttataataatgaatagatgatgtagtttgttgaatttttttg

SEQ ID NO: 715723 - DNA, 947 bp, Homo sapiens
tcataaagaagaggggatcgggcatgtaggctgcttaggggagaataagtgctttttggggaagacgaacaggcgatagcctatggcgatgtctgtgagtggcccggacccccagtctcttctcctatgatacagtgaatcttgtctctggaggagaaactgagttcctttttagatctatctttaaggagacaaggaaagttcagggacagcccctccctgtgcttaggggagaaagaggagcgagacacaagggcaagagaaggtcagagagatcttagtgctgaggccattgctgaagscttccaatctcctccagttcaaagtactctgcaggccagagcgccatatgttcaggtagctttttctgagccccagcaatggtcggctgtgacatccaggaaggctctgaagaggacgtggcattcacctggctcttgaaggacagggaatacttgaaaagaaaaagatagacaaaggactcagacaaaagaaatagttctctttctctcacgtaacacttggataactttgccagtcatccatccctgccttgagggaattgaacagagagcaggccaattcggaagaagagatgaaagtctgttgtggagagccccttaagggtccttgaacatgtaggaccagccagaggataacggggtgtgcaggtgtccatctaagcaccacagcttagttgggagcaatcttggaattccaagcctcagatccccacagccctttcttctcatcccgcctctggcaatgcctaaacaggaaacaatccaggggaggcaccggcccagcccctcccacccagggacaggcgagagctggtgtgtcagcctgtatctccacactggtgcccctgctcagaggaattgatttattcatgtaaaactatctccatagcccaaagcaagctcatttatttatcaataatttga

SEQ ID NO: 715724 - DNA, 631 bp, Homo sapiens
tatagctcctctaggggaggagggctttagcatggcatgaagaaacttcactggggttcatctataagttgctggggtctgtcagttgctggttccaaccagcaaggcgactgcattccacacaggctgcagggcaagaggctgtaaaacaggctgcttcctcaggttgattattcatttcctaaaatccctggaaaccctgtctgtctgcttacaaaagtacagtgaatccttcatttatgtgatcagagttcatagtatctccartctgcatgcttcggatgaccactctgaacagtgatgttgcttatagagccaaggtacggagttctcccaatctgtgctgcttggtcaatgattggcagtaacttcccccgccaggttgatagagaactgcaatgggaaacttgccttgaagaacagatttccctaagggaatcagtgctaaagaactggtacattatgaacgtgttctttagcaaagcttgtaaagtatttcagaggccaaggtgtatcagggtgtcgacaggtatgaaacatgttaaaggtcttgagtggctgatggtccagatcttgttagcatctctccttagaaaggcaaactcagggcccaccctacacctcgatttcc

SEQ ID NO: 715725 - DNA, 631 bp, Homo sapiens
tatagctcctctaggggaggagggctttagcatggcatgaagaaacttcactggggttcatctataagttgctggggtctgtcagttgctggttccaaccagcaaggcgactgcattccacacaggctgcagggcaagaggctgtaaaacaggctgcttcctcaggttgattattcatttcctaaaatccctggaaaccctgtctgtctgcttacaaaagtacagtgaatccttcatttatgtgatcagagttcatagtatctccagtctgcatgcttcggatgaccactctgaacagtgatgttgcttatagagccaaggtacggagttctcccaatctgtgctgcttggtcaatgattggcagtaayttcccccgccaggttgatagagaactgcaatgggaaacttgccttgaagaacagatttccctaagggaatcagtgctaaagaactggtacattatgaacgtgttctttagcaaagcttgtaaagtatttcagaggccaaggtgtatcagggtgtcgacaggtatgaaacatgttaaaggtcttgagtggctgatggtccagatcttgttagcatctctccttagaaaggcaaactcagggcccaccctacacctcgatttcc

SEQ ID NO: 715726 - DNA, 1964 bp, Homo sapiens
cccggctaattttttgtatttttagtagagacagggtttcgccgtgttagccaggatggtctcgatctcctgatcttgtgatctgcccgcctcggcctcccaaagtgctgggattacaggcgtgagccaccgcgcccagccgccatcccagcattctttaatacagatttccctcgtattgtctaacttgttatgcaaatggattatttttcccccaaggggacctccacaaccagctttgaaaacaattatgcttactttactgcccaggacaaaaacagtaaaacttttgaagttcccagacaccaaaagccctgcattctaacaggttttgagcaaacctgatcccaaagcactttgtaggtgtgttggcccaccatcaccatcctgtaactggaatgctcaactccaattagaagtcttcctggtttgggtcatttggggctttggggaacctttgacccttttttctcccttccctttgggcagctgccctgggacattggccccattcacaattctccagtttcccagacaatgtggcttcttgtgctctttgctcgggcccctctattaaccctacagagaggtttcaggttactgaaacagacgccttgctttctgctgtgcataatgtcctttttccagcgagaaactgcagcccatcaggatctggttttcattaaaggcactttgggtcacttttttagcagattggtcaaaaggactgaaaggactgggcagggcgatgatgatttggaggtcgatagctttctctatgggccataccccttccccactgaaagattcccccactgcagactggaggaaatcagtcaggcaaggatccctgtggtgaaaactactcgaaaacagcaacaataaccacaaacctgaaatgaagacaatttcctgagaaactatgaatgtttggatgtgcaaggtgatcaactttcccagttgcccgggaccaaaaggtttcccaggactcaaaactttccattttgaaaccagaaagtcacaggcaaacccggaggagttggtcaacccatggatcagagtcacttcatcttctgtgaaatttgcaaagatgctaggaggttcccctcctgctgggacaccccagcccagacacaaaccattaattcacaattacatggagtttcactgtctgcaaggctgctccatttaagctctgggtcatgaacacataactctaggcatactgacactagctgggagattttccaccaaaaaaaaaaaaaaaaaatgccatttcatgactattaatccaaaataggtaaatgtgtctggcttatagaataccagcctgattacaaatgcttggtgttggaatggcccagctcacagtggttgtagaagtccagtaggcccaggctttgtggctcackcctgtaaccccagcactttgggaggccaaggtgggaggatcacttgagtccagaagttcaaaaccagcctgggcaacatagggagactccatttctacaaataatttaaaaattagctgggtgcatgcttgtagccctagctactcaggaggttgaggcaggagaattgcctgagcctgggaggtcgaggccacagtgagccgcgatcacatgtcactacattccagcctgggtgacagagcaaaaccctggctggaaaaaaaaaaaattcaagcagtcaaggggatgggagcttggtggactagagatgcccagacttgagttcctgtcccagccctgccactaatagtgagattttaggcacagctattccccttcttctctcctaagtctccggagaacaaatggctttggattcaatgaggaaaagaaggaaagaaaggaagaaactggtctcactgagcatcctctatgagccgggcatcacaccaaaccctcctccctgccatttactctttccaccagccttgaagggttaccgtactcagtttc

SEQ ID NO: 715727 - DNA, 1400 bp, Homo sapiens
atggtaatacctggctccttccaagttccttatccttcaggactgtagagttgaatccaggttgcctccttaaatcaaagagagacacttccttaaagaaagccccttgtatctccacgatgcctggggcagtgtcttccgcttggaccatctgccagaagcgagaagcaacaaaacaacattgtaaaaaatgcattgagctttgaggaagggccaggcactacatcacaggcaataaaatccatcagamccgctcagcaaccctaggaagtggagagtagcatcatccccatttcacaggtgaggaaacagagacttaaagtgtgatgagttgaaagtcagtaagtgacattcaagcccaagtctgtctgattccaaaacccgtgctccttatttctttattttaactgtatgggctacttgctatctgcaaggtattggtgttttaggccaaaccccttaggttttagggtttttttctttttttgagatgggaatctccctctgtcgccaggctggaattcagtggcatgatattggctcgctgcagtctccgcctcctgggttcaagcaatttccctgcctcagcctcccgagtagctgggactacagaagtgcactaccacacccggctaatttttcgtatttttagtagagacggggtttcaccatgttggccaggctggtctcaatctcctaacctcatgatccgcccaccttggcctaccaaagtgctgcgattacaggcgtgagccacctcacctggccaagttttggtttcttaacagattttgccattggacagaacggacctgatagagcaagatgtcaaaagactccctgacaagtaaaaaaggggccaggcatggtggctcacacctgtaatcccagcactgtaggaggccggggcaggtagatcacttgagcccaggagtttgagaccagcctgggcaacatggcaagaccccatctctagaaaaacaaaaattagtgagcagcacaggcctgtagtcccagctacttgggaggctgaggtgggaggatcccttgagccccagaggtggaggctgcagtgaaccaagatcacgccactgcatgctggctggggtaatagagcaagaccctatctaaacaaacaaacaaaaaaacagaatacggacatggctgtggaccatgaaaagggctttcagatgcaccctaggactttgggtttatttttagatttgaaaaacaaattttaggccaggcacagtggctcacacctataatcccagcactttgggaggccgaagcagaaggattatttgaggccaggagttggagaccagcctgggcaacatagcaatactccatctctacaaaaaattaataaattagccagacatggtggcttgaggcca

SEQ ID NO: 715728 - DNA, 664 bp, Homo sapiens
tgagggtttgtcctcgtgcattgtaggatgtttgtagcatctttggtctttacctattagattcaagtagcaaccccccatctcaccaccaccaagaagtctctggggacaaaaccacccctgattgagaagcattggtctaaaaacttttctcctttgcctgttttcctttcccactgcacttctggtgtttcaactttgcttatggtgtttttgctatttacttgtttatttctttttaggccatacaaaaattttatattattttatgtagtcatatttgtaaatatgctgcttctcagttcatacaattgatagagaaattgatttttgataacgttttgttaatcaaataaaggtaccaaattcttcttcctttaatcagctgtgatacttcccttcagtgctagacagcaaaccaagggaaaccagagtaagccctgaattttattgatgactgctagcacatagatgtattggagaggatcagaaatcttaaattaataacaactaccactaycgagtctcttccgtatgcccagcactgtttaggtaccttgcacatattatatcttagccttgagacagagccctgcgtgatcaggatgtataatcattttaaaggtgaggaaactaaggcccgaagaggttaagtcacttggcc

SEQ ID NO: 715729 - DNA, 3085 bp, Homo sapiens
taattttcaaagtgtgtggtagagataatttgggaccctcgagaggaatggccccctgtttagcttgtgagtaagccatcaaatgtgttccttggtaaacaaatagcccagtagatatctatcatttagtcagacatgcttctccacatacagataggtgttatttatagaaatggtcaaatgcctccatttacttgctctttgaaagacaacaaatgtggggataaataaaacctaactgtgttccaaaattaagggacagaaaatttgagtcatgtgaagcatatgtaacccactgtggttataaagagcctatgcaaattaggcagattgcatgcgtagtagagatggaagacaggtaagtgtgttgattgctctgctccttattctgtttacagagagcagtgaagtcagtcttcttgtcagttgcacatctgcacatccgggtcctccagccacatggccatggtgtggaatttaaagctgtgctgctgcgaagactggcatagaatctttgagggaggtagctatttttcatttctgaaaaaatgtatcttttaaatggctttcccccttgggagacagactcttagagtaacatcttgaactgtgatgcccttcactctctctagttcccaaaaacccagggcaaactcattgaaccctcaacaagtatggctcccatgattgtcaggattctagattgtggctgtggattacattctcaattcagaattaggagattgggtacattgagctcttgctccccctttcttttttcctcctttttatgaacggattcaagacctttcttcttggaggatgtgtttcttcaactctcagtcacagcatttcaaatactactatcccttctggatggggcaatgctggtaggttctcttaacattcagaattaggaacagagaagggattgccagatgtgttctagatgagggatttccagatgtgttctagacaggtgagttttaaaagtcattttgaaagagacacctggaacagcctggaacagagacacctggaaggagacacctggaacagcctggtatggttctggagccaatgatggggaaaaraaagtacagttggtaataaaagtggagaacgagcaaaaacaaatccatggctttttgacatgttcatggtctgtccttttttgtaaaatatttttctttaacattatagatcctgaaggggttcaactgtccaggcatacttcttcagtttagggatgcggaacacccagaaaagttcaggacaggctccggactgcagtccagggcagaggcgacagcacttgctgtcggcattccagtaaccagaggcagcaacagggcacacacctcagttctagtggacccagaaccacaccagactgtcccacggtgtctctttcaaaaattaaatatcttacacagattttatctataaagttagaagtttccatcatgtgtcaagatgattcttgcataatatgttgtgaaattttagtagcaagtaattttctgtttttcttttcaaaagtacttgagaaattgctatttcctattgcttattcagttattctctttaacatatttaattaaaaatggttttacttttaaaaaatattattggctattttttcgggtaaatttttaggggaaaaatgtcttttgtaaagatggcaaggtttccaacccgtaatgacttatgctttttcttgatctgagacttagatttctatcactgttgtagcaattgtttctctctgcctctttctttagttactcctgcctcagtaactcaagagatggagctgaaagattactctggattcttacctgtggaactgcccacatcagtactagtgatctcatctgagtttccttcttggagggttttccaggactggggctgcctggtgaagtaatagatttgatattaatttttatttacatagcacctttcttgaggaacacagagcagtctatgggcattattttaatagtccaggaggagttaagcaagcctggagagctgaacaataaactcctgttattctaagcattatttaatatttttatgatttgtccttcaaagaattcttggccttcgggtaagcgatggactgcaagtgggagaatgaactgttagctcagtctctctcacaccctgaagagtgtacacgtgacttgtgtattgaatcagcctgtaggtctctttaaaccgggtggtggctttaaaccacagagaggttgcttcttcccagaggatattgcctgtgctggttggtccccattgtttaagttggatgcacgctaatgtgctgttgcggcattctggacgaatgctgaggagactgtatttgttcatgacatctgatgtgagtcttgaacttgttacatttatttctctgcttttggtcacatcttggtctgatgaccaaacaaggcaactgtgcccttttctagactgatgtctgtttgtcaagcacagttttcacatttttatatttttctctattgttaacaaccccgaagcagaaatgaaagctttttatcacgggaggaggggtatcggcttcacttccatcccattcaccattcactctgaatatctgtggtttgttttaaaccgagtgccagtgcctcttcttggaggtataaatttgcacagggtctggcagacgctgcagacaggatgttgactcttgagtgtcttgactgactaggaggcccaatggcggtgctgcatggctccaggcaatctgtgcctctagccaaggcctccaaaacccaaagttttaaagtgcttgcttaagattttgggggctgattcacctaaagggatctaaaaattgcattttttttcctccaaaggaccaagcacagaagttgtgccagtggtttccctgttaactcctgactggcctgatttttgcttctcagacttataattcctaatcacctggtaggtgccactcgggatggtcttctgcctctggttagtcctgagcttgttttctcactggtgcagcaggaccttagaccaaaatgacctccagcatcctgtgagtcttggatct

SEQ ID NO: 715730 - DNA, 3085 bp, Homo sapiens
taattttcaaagtgtgtggtagagataatttgggaccctcgagaggaatggccccctgtttagcttgtgagtaagccatcaaatgtgttccttggtaaacaaatagcccagtagatatctatcatttagtcagacatgcttctccacatacagataggtgttatttatagaaatggtcaaatgcctccatttacttgctctttgaaagacaacaaatgtggggataaataaaacctaactgtgttccaaaattaagggacagaaaatttgagtcatgtgaagcatatgtaacccactgtggttataaagagcctatgcaaattaggcagattgcatgcgtagtagagatggaagacaggtaagtgtgttgattgctctgctccttattctgtttacagagagcagtgaagtcagtcttcttgtcagttgcacatctgcacatccgggtcctccagccacatggccatggtgtggaatttaaagctgtgctgctgcgaagactggcatagaatctttgagggaggtagctatttttcatttctgaaaaaatgtatcttttaaatggctttcccccttgggagacagactcttagagtaacatcttgaactgtgatgcccttcactctctctagttcccaaaaacccagggcaaactcattgaaccctcaacaagtatggctcccatgattgtcaggattctagattgtggctgtggattacattctcaattcagaattaggagattgggtacattgagctcttgctccccctttcttttttcctcctttttatgaacggattcaagacctttcttcttggaggatgtgtttcttcaactctcagtcacagcatttcaaatactactatcccttctggatggggcaatgctggtaggttctcttaacattcagaattaggaacagagaagggattgccagatgtgttctagatgagggatttccagatgtgttctagacaggtgagttttaaaagtcattttgaaagagacacctggaacagcctggaacagagacacctggaaggagacacctggaacagcctggtatggttctggagccaatgatggggaaaagaaagtacagttggtaataaaagtggagaacgagcaaaaacaaatccatggctttttgacatgttcatggtctgtccttttttgtaaaatatttttctttaacattatagatcctgaaggggttcaactgtccaggcatacttcttcagtttagggatgcggaacacccagaaaagttcaggacaggctccggactgcagtccagggcagaggcgacagcacttgctgtcggcattccagtaaccagaggcagcaacagggcacacacctcagttctagtggacccagaaccacaccagactgtcccacggtgtctctttcaaaaattaaatatcttacacagattttatctataaagttagaagtttccatcatgtgtcaagatgattcttgcataatatgttgtgaaattttagtagcaagtaattttctgtttttcttttcaaaagtacttgagaaattgctatttcctattgcttattcagttattctctttaacatatttaattaaaaatggttttacttttaaaaaatattattggctattttttcgggtaaatttttaggggaaaaatgtcttttgtaaagatggcaaggtttccaacccgtaatgacttatgctttttcttgatctgagacttagatttctatcactgttgtagcaattgtttctctctgcctctttctttagttactcctgcctcagtaactcaagagatggagctgaaagattactctggattcttacctgtggaactgcccacatcagtactagtgatctcatctgagtttccttcttggagggttttccaggactggggctgcctggtgaagtaatagatttgatattaatttttatttacatagcacctttcttgaggaacacagagcagtctatgggcattattttaatagtccaggaggagttaagcaagcctggagagctgaacaataaactcctgttattctaagcattatttaatatttttatgatttgtccttcaaagaattcttggccttcgggtaagcgatggactgcaagtgggagaatgaactgttagctcagtctctctcacaccctgaagagtgtacacgtgacttgtgtattgaatcagcctgtaggtctctttaaaccgggtggtggctttaaaccacagagaggttgcttcttcccagaggatattgcctgtgctggttggtccccattgtttaagttggatgcacgctaatgtgctgttgcggcattctggacgaatgctgaggagactgtatttgttcatgacatctgatgtgagtcttgaacttgttacatttatttctctgcttttggtcacatcttggtctgatgaccaaacaaggcaactgtgcccttttctagactgatgtctgtttgtcaagcacagttttcacatttttatatttttctctattgttaacaaccccgaagcagaaatgaaagctttttatcacgggaggaggggtatcggcttcacttccatcccattcaccattcactctgaatatctgtggtttgttttaaaccgagtgccagtgyctcttcttggaggtataaatttgcacagggtctggcagacgctgcagacaggatgttgactcttgagtgtcttgactgactaggaggcccaatggcggtgctgcatggctccaggcaatctgtgcctctagccaaggcctccaaaacccaaagttttaaagtgcttgcttaagattttgggggctgattcacctaaagggatctaaaaattgcattttttttcctccaaaggaccaagcacagaagttgtgccagtggtttccctgttaactcctgactggcctgatttttgcttctcagacttataattcctaatcacctggtaggtgccactcgggatggtcttctgcctctggttagtcctgagcttgttttctcactggtgcagcaggaccttagaccaaaatgacctccagcatcctgtgagtcttggatct

SEQ ID NO: 715731 - DNA, 1310 bp, Homo sapiens
ggtaagtacagaaagactgatgaggatgaagaggaggaaaaggagaaagagataatgtttttataaaggtaaagtgttctatatctagtacttcccctgaaatgtaaaaaagaattaccaggacaaagtatatcattcacagggaggaaaaggaagaaactatactggagataaacataatcaggaataacaagaggacaaaaatttgaaattagatgattggaggcccaytgactgtactttttctcaaacaaacagcagaaaggagttaagttcagcacgaataatatcttatctcaacaaatgctgtccagccacagcaaaaagacttctgaacacaaagcaaactcccagatatctacttgccttgcagcattagcacattatgaacaggaaacagacttttctgcacaaccacattccccttgaactcagtgaaaagcaatgtaaggatgacccacaactgggtaaatggcaagagggcagcttttgaaaatagaaaaacattcacatcttcactttaccaattaccacctccatgactataggcaaaactctcaacgtctctctgcctattttgtcttctataaaatggcactagagacatccgtttttcatggagctcttgagtggactgagacaacacatgtgagacggactgtatgtgagacagccatatggccaagccccactgggcttgtattagatctcttcccccaggctcctcctttaaaaacctgggcttatttaacaaaagagcaattaatctagtagttattcgatatacaatatcccagattcagcctacagataagagatgtataaaataaacacgtaagttagatatagaaataaaagaaaaagatattcttaagaccttgctaaaaatattcaggttttctcaaaagtgctctggctagtaaagaaatactcagtgaattaatgctgtggagggcatgtcattgtatagatttcattttaactctgcttaagaagcacaacatggtatcatggaattccaataattcaacttgtaaatattgacgttcaagcggcagatgatttcactttggggacatcacgatcgtacttgtcatggtgctatgttttggtgccagagaaccaagaccatgaagcaacagcaatggagctcactgtgctccttcccctcaaggatccatggcccaatcacaaaacaccacacagcatgcgactctctaactaagtcaggtcccagagaatatagctgtcctttcaggtttagatagcaatggtttcttgtgaatcctccatccctagaagaaatggcc

SEQ ID NO: 715732 - DNA, 1310 bp, Homo sapiens
ggtaagtacagaaagactgatgaggatgaagaggaggaaaaggagaaagagataatgtttttataaaggtaaagtgttctatatctagtacttcccctgaaatgtaaaaaagaattaccaggacaaagtatatcattcacagggaggaaaaggaagaaactatactggagataaacataatcaggaataacaagaggacaaaaatttgaaattagatgattggaggcccattgactgtactttttctcaaacaaacagcagaaaggagttaagttcagcacgaataatatcttatctcaacaaatgctgtccagccacagcaaaaagacttctgaacacaaagcaaactcccagatatctacttgccttgcagcattagcacattatgaacaggaaacagacttttctgcacaaccacattccccttgaactcagtgaaaagcaatgtaaggatgacccacaactgggtaaatggcaagagggcagcttttgaaaatagaaaaacattcacatcttcactttaccaattaccacctccatgactataggcaaaactctcaacgtctctctgcctattttgtcttctataaaatggcactagagacatccgtttttcatggagctcttgagtggactgagacaacacatgtgagacggactgtatgtgagacagccatatggccaagccccactgggcttgtattagatctcttcccccaggctcctcctttaaaaacctgggcttatttaacaaaagagcaattaatctagtagttattcgatatacaatatcccagattcagcctacagataagagatgtataaaataaacacgtaagttagatatagaaataaaagaaaaagatattcttaagaccttgctaaaaatattcaggttttctcaaaagtgctctggctagtaaagaaatactcagtgaattaatgctgtggagggcatgtcattgtatagatttcattttaactctgcttaagaagcacaacatggtatcatggaattccaataattcaacttgtaaatattgacgttcaagcggcagatgatttcactttggggacatcacgatcgtacttgtcatggtgctatgttttggtgccagagaaccaagaccatgaagcaacagcaatggagctcactgtgctccttcccctcaaggatccatggcccaatcacaaaacaccacacagcatgcgactctctaactaagtcaggtcccagagaatayagctgtcctttcaggtttagatagcaatggtttcttgtgaatcctccatccctagaagaaatggcc

SEQ ID NO: 715733 - DNA, 1239 bp, Homo sapiens
  misc_feature 120: n = A,T,C or G
attacaaggatttcaatttctccatgagattcattcattccagatgaatttttttcaggagaataaagacagaggagagaacaacaccaacacaatactataaaatataatgagtaaatntagtaaggaaagtggaatgtgttgttgagagcaatactgaactataycttcccctcctggatagcaacactatattaaaaattaaagcaatgtaccaataccctttttaataatttacaacttgacatccacctggatttggtgctatcaaaggctatttcaaattcgccataatactatcggaaaaccttagaaaatgaaccgctctgtttctttacttggaaacctctttgtgttacagttacgccttctggtccctggagtacacaatttgcattctactgattatagcctcgctattgtacttaaagcttccccctttgggtaaatgtaaatctctgtgtgttccattccttgcaggtagctgttcattttaaaagaaaatacgaaaacagccttttacctaaaatacacacacttggaatagttaacacaagatttggaggaatggagtacaagagtcttattgccttgcctgatcataagtgaaacaataccaaatcgtattttttattaccttttgttggagaggtttttcctgattcttatattcagctcacattctaaggctacagaagtgcctgaaacaaggcttcagtaacttctttctctaatatatcaatgccagtcaaggatatggcagcacacaacagcaaaaccagctctgaattgcaaactgacattatgattttgtcctgttagaagtaaagagggagttcactattttctttcaagacagggttgatatacccattcagtgagaggtgatttttaacataaagtagtaggcagaactctactaactcaccttggctaaaaatttatatatgttatggacattaatgctaactcatgagaaatggaagagacaaactgaaaacagcttccttgacttcttttcccagtaagacttaaatacggtgtaaaaactaaaagtttatctgttgtagtctttatgagtccagaggaaactgactatacaaaaatagcaaagctggctgcaactggcctcaccaaaggcatgtgtggtggatgggacttgaggtgatggatagcctcactgcaaggcctcaggctttggataaatggtgtcagagagagctatgtttgaaagttctg

SEQ ID NO: 715734 - DNA, 1778 bp, Homo sapiens
gctaggtttgtgtgyctagtcttaatttttttaaatgaaaaagcacattatggatcctttctctgataagaaaaaataaatataaaactgcttgtattttatgtgagtctcattaaccttgttttctaagttgttaatttttaactagaaagaagtttctattatgaattggcttatcttctgaggaagagagagattaaacaacctctctaaggcacacagctggaatgtggcagagagggaactcaagtacaagcagcctgactccagattagggctcctaaccactctgctttgctcatggagtgatttatttagatatctcaatatgacacttttaaggggcatttaggaaaaaatgctcaggtattaataatatgacagaatgttaatagccttccttttatgaatgcctcactctctgctcagaagataacatttatgtgtacactgaatatgtgaaatggaaaatagttcaatcattttatataattcacagaaaagcatgttttgatacactcttgtttgtttccagatgactattagggatggtcagaatactttgaaatattatgtctaccctcagctctacctggaaggatgaacttcataaatagatacacaacattaaacatcacagtgaaaagtaaaattcagccaaacgttggatttttcaaaatagaatgtaaaaatattatataaacaactctttttaaaaatatcttatcagaatgtttggcattacgtagacgtagtaccaataatattttgggtaaaatacaaatattccttgagagtaagtgcaaatgagcatctgtagtgaactgaataattatttaattgttttcattagaagagttcagtatttctctttagtaatatgaatcataaatattggcaaaattctcaaaaattgaccaatcaacacattgcaaattaaattcactggatgaaaaataagcacaatagacattgtaatttacaaataaatatattttaagacattaaagttattcattgttacttcttaattttaaattgtttaaaccacctacacaaaagatggaatacttttccaataaattagatttgctttaaatatagttctttatattttctaaatttaaaatgtgctgtctgacatcagtgtatctaccttaaaaaagaaaaaggaagaatatatttagttaatactcatcaactatttaatcatcggttctcacaaactaatgattcaaacacagttcactctagcatcaccattaagtaaaccagaagaaactaaagatgaataccgtaattaagaactttgccaagtagacagtagattatgcaggcaacaaggtacatttctatgcccatttaaaatgtaaaaattacctttccaagctttgctatatttcggtacaaggataaaggcagagtaaaggtaactgtggaaagtccaataatgaagtggcgaccaataaacacgttttcaggatcaactaaaacacaataaatattattaaatgttacaggtataagtaacacattggtgacacactaaataggccagcatttaattataaaaattacttaaacataaatactacctcaatgacataattttgagttaatactctccataaaaacatataaacataaaaataaatcacacaaatacaaacacaaaaaaatttcaggatgacttatacttgaaatgatgttataatatttcacattgatattattctactagcctccttgacagatatcatgcttctgccttctcttgt

SEQ ID NO: 715735 - DNA, 1349 bp, Homo sapiens
ttctccatttatttgtgtctttcaataaaagtttaacatgacgttaaaatcatgcacatcttttaaagtatttagtgtttttgttgtcactgccacttaaaaaaacattttaattggtcattgtttgtgtacatcagcccacttgatgttttctgtgtattgaacttgtatccagtaaccttgctgaatactcttattttccatatgcataaattttccatatgtgtaattatrttgtgtacaaataatttacacaatcttttcaatgattacacatcacttattttattgaatcagctaggaatatcaataatatattcaggatgcagtgatattgaacatcctatctggtttcatcccttaagtagagtatttctaacttttcacttttaaatatgccatttgctataggatttggtggacattccttatccagtaaaggaagttctattttattattagtttgctcaccatgtttttcaaaataaatactgagttgtatgcttttctatatattttgaaatggtcataagcttctttccttcattaatctgttaatgtggtaaattacaccaatatctattaatataacagctattaataaatattgattatattaatattttgttattaaactccccttgcatttattgaaaaaatattcgtagtcataattccttatcttataaattgcttgatggcatttgatttcatatttcagcatttacagtttaaagtcaaaaggtctataactttatgtttccatccaggttgagtatcaaagtttcagcaatctcataaaatatacccgagaactttcttctctctcttttttttttttcctgtacaactgattgtatctggaactcaatcctaggctattttataaatgattggaaagccatattcaatatctgtttccttctctttccctagatttagacatatgcattttcctatctgtaacatcttttttggcactttccatcttataaaatcatcatcattatgatgaacagagaaaatccaaaattatctctaggtattgtttcacactccgggaatatacccaaggaaccatatggacccagggaaaaaatttaaatggaagagaaaaaatgaaaatgaaacttctacattttattactaatataagatttaaaaagtaggacaccaccacaatctgtactagggttggggagtaagggtgaatattttccaagtgcaaaaaccataagagggaaagcataccatttaaagcatattgcaaagttagagaatcctcaagtttctacaactgttagtgctgcctgactgaaatcattttctaaggatcatgtacaaaatat

SEQ ID NO: 715736 - DNA, 1349 bp, Homo sapiens
ttctccatttatttgtgtctttcaataaaagtttaacatgacgttaaaatcatgcacatcttttaaagtatttagtgtttttgttgtcactgccacttaaaaaaacattttaattggtcattgtttgtgtacatcagcccacttgatgttttctgtgtattgaacttgtatccagtaaccttgctgaatactcttattttccatatgcataaattttccatatgtgtaattatgttgtgtacaaataatttacacaatcttttcaatgattacacatcacttattttattgaatcagctaggaatatcaataatatattcaggatgcagtgatattgaacatcctatctggtttcatcccttaagtagagtatttctaacttttcacttttaaatatgccatttgctataggatttggtggacattccttatccagtaaaggaagttctattttattattagtttgctcaccatgtttttcaaaataaatactgagttgtatgcttttctatatattttgaaatggtcataagcttctttccttcattaatctgttaatgtggtaaattacaccaatatctattaatataacagctattaataaatattgattatattaatattttgttattaaactccccttgcatttattgaaaaaatattcgtagtcataattccttatcttataaattgcttgatggcatttgatttcatatttcagcatttacagtttaaagtcaaaaggtctataactttatgtttccatccaggttgagtatcaaagtttcagcaatctcataaaatatacccgagaactttcttctctctcttttttttttttcctgtacaactgattgtatctggaactcaatcctaggctattttataaatgatyggaaagccatattcaatatctgtttccttctctttccctagatttagacatatgcattttcctatctgtaacatcttttttggcactttccatcttataaaatcatcatcattatgatgaacagagaaaatccaaaattatctctaggtattgtttcacactccgggaatatacccaaggaaccatatggacccagggaaaaaatttaaatggaagagaaaaaatgaaaatgaaacttctacattttattactaatataagatttaaaaagtaggacaccaccacaatctgtactagggttggggagtaagggtgaatattttccaagtgcaaaaaccataagagggaaagcataccatttaaagcatattgcaaagttagagaatcctcaagtttctacaactgttagtgctgcctgactgaaatcattttctaaggatcatgtacaaaatat

SEQ ID NO: 715737 - DNA, 2010 bp, Homo sapiens
tggtgaagaatatataggtgtccattgtactattctttttctttggttttttttkttgttttttttttttgagacaggatcttgcagtcgcccaggctaaagtgcagtggcacaatgatggctcactgcagcctcaacctcctgggctcaagcaatcctcccacctcagcctcccgagtacctgggactctaggtgtacgccaccacactcagctaatttttgtattttttgtagagacagtctccttttgttgtccaggctggtctcaaacacgtgagctcaagtgatcctcccgcctcagcctcccaaagtgctgggattacaggtgtgaacaactgcaccttgcctcgttgtactattctttaaagtttcctgtaagtttgacatttttcaaaatataaatttatagaaaaatgagtagtattgggcaaatagtactcaagaaatgttagcagttgagaagtcagttatcatatgtaggcatggacatatgtgtctatagaatcatagaattgtacgttatcttgaagaataatcattttacactttaccgtttaatcaagcctgtccatcttttcctatgtttccttggatgtgtgttttctattctttttttgaccacatactgctgcctcaggcagatggggggccctgagtccctggcctggaagtgggcctgaggctgtggtgaatggagccaagagaataattaccaggtcagtttcctatggagtttctgggtcagtaatgccaagaccaatagtccagggtcagggtgccaaattcagacagggcaataaaaaagagaaagctctaattcaaattgatcgttctgacagagaaggcaatgcaaagggagttcagtcagacaagccaggactgattcctgagaaaaaaatgcacacagtgccaatttccttttttaactggttcctgccacagctaacatcggggacatatcctaaagtgagtgatgcagctggggagtgcaccattgtattctcacagagttttctctcagcctgagattgactgaatattcacttatagtttctccttttttttattatttgagattttacgtttaattcttttttatgcattttctacttatgtattacatttaagtctttaacatctctagttagaaaactgcacttgtatatgggtaagattggtttctactgtgctagcttcctcagctttattagtaagatatgcatagtggtcaagaacatgaattctaggccgggcgccgtggctcacacttgtaatcccagcactttgggaggccgaggcgggtggatcacctgaggtcaggagttcaagattagactggccaacatggtgaaactccatctctgctaaaaatacaaaaattagctgggcgtcatggtgcgtgcgtgtgatcccagctactcaggagactgaggcaggagaatcgcttgaacccaggaggaagaggttgcagtgagccaagattgcgccactgcactccagcctgggtgacaaagtgagaccttgtctcaaaaataaataaattaattaaataaaataagataggaacaatgcagagaagattagcaaggcccttgcacaaggatgtcatgaaaatttgctaagcattccgtatattttatctgaagtgttctcatcatgtacacacacaaaaacataagtatgtcaggtgatggttagttagcttgattctggtgattattccacaatgcacatatgtatcaaaatatcaaatggtacaccttaaatatatacaattcaaatttgtcaattataccttattaaagcagcagcagaagaaggggtgttaccaaactgcccaaaactgtagttgccacagccccctctgcccttcctgttctctttttcctgcctttctatacttgggatctttggcttatgtgtgttaaattggatgttatgaaaaacaagaaatattcaagctttctatgcattaagatttagtagtatataaactttgatccacttta

SEQ ID NO: 715738 - DNA, 2010 bp, Homo sapiens
tggtgaagaatatataggtgtccattgtactattctttttctttggtttttttttttgttttttttttttgagacaggatcttgcagtcrcccaggctaaagtgcagtggcacaatgatggctcactgcagcctcaacctcctgggctcaagcaatcctcccacctcagcctcccgagtacctgggactctaggtgtacgccaccacactcagctaatttttgtattttttgtagagacagtctccttttgttgtccaggctggtctcaaacacgtgagctcaagtgatcctcccgcctcagcctcccaaagtgctgggattacaggtgtgaacaactgcaccttgcctcgttgtactattctttaaagtttcctgtaagtttgacatttttcaaaatataaatttatagaaaaatgagtagtattgggcaaatagtactcaagaaatgttagcagttgagaagtcagttatcatatgtaggcatggacatatgtgtctatagaatcatagaattgtacgttatcttgaagaataatcattttacactttaccgtttaatcaagcctgtccatcttttcctatgtttccttggatgtgtgttttctattctttttttgaccacatactgctgcctcaggcagatggggggccctgagtccctggcctggaagtgggcctgaggctgtggtgaatggagccaagagaataattaccaggtcagtttcctatggagtttctgggtcagtaatgccaagaccaatagtccagggtcagggtgccaaattcagacagggcaataaaaaagagaaagctctaattcaaattgatcgttctgacagagaaggcaatgcaaagggagttcagtcagacaagccaggactgattcctgagaaaaaaatgcacacagtgccaatttccttttttaactggttcctgccacagctaacatcggggacatatcctaaagtgagtgatgcagctggggagtgcaccattgtattctcacagagttttctctcagcctgagattgactgaatattcacttatagtttctccttttttttattatttgagattttacgtttaattcttttttatgcattttctacttatgtattacatttaagtctttaacatctctagttagaaaactgcacttgtatatgggtaagattggtttctactgtgctagcttcctcagctttattagtaagatatgcatagtggtcaagaacatgaattctaggccgggcgccgtggctcacacttgtaatcccagcactttgggaggccgaggcgggtggatcacctgaggtcaggagttcaagattagactggccaacatggtgaaactccatctctgctaaaaatacaaaaattagctgggcgtcatggtgcgtgcgtgtgatcccagctactcaggagactgaggcaggagaatcgcttgaacccaggaggaagaggttgcagtgagccaagattgcgccactgcactccagcctgggtgacaaagtgagaccttgtctcaaaaataaataaattaattaaataaaataagataggaacaatgcagagaagattagcaaggcccttgcacaaggatgtcatgaaaatttgctaagcattccgtatattttatctgaagtgttctcatcatgtacacacacaaaaacataagtatgtcaggtgatggttagttagcttgattctggtgattattccacaatgcacatatgtatcaaaatatcaaatggtacaccttaaatatatacaattcaaatttgtcaattataccttattaaagcagcagcagaagaaggggtgttaccaaactgcccaaaactgtagttgccacagccccctctgcccttcctgttctctttttcctgcctttctatacttgggatctttggcttatgtgtgttaaattggatgttatgaaaaacaagaaatattcaagctttctatgcattaagatttagtagtatataaactttgatccacttta

SEQ ID NO: 715739 - DNA, 2010 bp, Homo sapiens
tggtgaagaatatataggtgtccattgtactattctttttctttggtttttttttttgttttttttttttgagacaggatcttgcagtcgcccaggctaaagtgcagtggcacaatgatggctcactgcagcctcaacctcctgggctcaagcaatcctcccacctcagcctcccgagtacctgggactctaggtgtacgccaccacactcagctaatttttgtattttttgtagagacagtctccttttgttgtccaggctggtctcaaacacgtgagctcaagtgrtcctcccgcctcagcctcccaaagtgctgggattacaggtgtgaacaactgcaccttgcctcgttgtactattctttaaagtttcctgtaagtttgacatttttcaaaatataaatttatagaaaaatgagtagtattgggcaaatagtactcaagaaatgttagcagttgagaagtcagttatcatatgtaggcatggacatatgtgtctatagaatcatagaattgtacgttatcttgaagaataatcattttacactttaccgtttaatcaagcctgtccatcttttcctatgtttccttggatgtgtgttttctattctttttttgaccacatactgctgcctcaggcagatggggggccctgagtccctggcctggaagtgggcctgaggctgtggtgaatggagccaagagaataattaccaggtcagtttcctatggagtttctgggtcagtaatgccaagaccaatagtccagggtcagggtgccaaattcagacagggcaataaaaaagagaaagctctaattcaaattgatcgttctgacagagaaggcaatgcaaagggagttcagtcagacaagccaggactgattcctgagaaaaaaatgcacacagtgccaatttccttttttaactggttcctgccacagctaacatcggggacatatcctaaagtgagtgatgcagctggggagtgcaccattgtattctcacagagttttctctcagcctgagattgactgaatattcacttatagtttctccttttttttattatttgagattttacgtttaattcttttttatgcattttctacttatgtattacatttaagtctttaacatctctagttagaaaactgcacttgtatatgggtaagattggtttctactgtgctagcttcctcagctttattagtaagatatgcatagtggtcaagaacatgaattctaggccgggcgccgtggctcacacttgtaatcccagcactttgggaggccgaggcgggtggatcacctgaggtcaggagttcaagattagactggccaacatggtgaaactccatctctgctaaaaatacaaaaattagctgggcgtcatggtgcgtgcgtgtgatcccagctactcaggagactgaggcaggagaatcgcttgaacccaggaggaagaggttgcagtgagccaagattgcgccactgcactccagcctgggtgacaaagtgagaccttgtctcaaaaataaataaattaattaaataaaataagataggaacaatgcagagaagattagcaaggcccttgcacaaggatgtcatgaaaatttgctaagcattccgtatattttatctgaagtgttctcatcatgtacacacacaaaaacataagtatgtcaggtgatggttagttagcttgattctggtgattattccacaatgcacatatgtatcaaaatatcaaatggtacaccttaaatatatacaattcaaatttgtcaattataccttattaaagcagcagcagaagaaggggtgttaccaaactgcccaaaactgtagttgccacagccccctctgcccttcctgttctctttttcctgcctttctatacttgggatctttggcttatgtgtgttaaattggatgttatgaaaaacaagaaatattcaagctttctatgcattaagatttagtagtatataaactttgatccacttta

SEQ ID NO: 715740 - DNA, 590 bp, Homo sapiens
ttcaaagtaatgctttgcattctatagatggtttaaagatacttttacacttgtcatttcatatctttaaaataatcctgtatggtagaacacagtggaggaaagataagttgagaaggtgagctacttcaatgtacaggggaaaaaaacaaagttcataatggataaagtaagcagtatcatcttcatttttccaataagaatggcrtaaccctgaaaatgtgaagtaacttccccaaattcacagtgagcccagaaaaatgataaaagtccaggccttctagtgtaagaggactacatcaagtagaagaggttaacaacaaggccaggcctcccctccaagattttttcttagataatatttcatcagtgtccaacaatgcaaactgctcttaattatactttgtaagcattaaataaattttaattaaaatagaaacagtcataatagagcatcttaaggttataacaaaagctataaaatgaaatgactgagtggtgtttacatgggaagtactatgccttttcaacagattttccccaaaacacgttagatatcttggcccagaccttagggacggtgtgggtga

SEQ ID NO: 715741 - DNA, 1891 bp, Homo sapiens
cttaataatataaaatgacataattccatatcattagtcttctgcaagactattctttttatttaactgcatcatttttcattcatcagatagtccataattttaccaatttcttgtatttggataatcacattgtacccaatcctacgaatattttgaagaatattcctttctgttaattctagcataacatcttctgtctttacacggccaagccaacctttttatgattgatgagaaatttgatcctcatcaaatagaggaattatgaatcccacatggttaaggagaaagtattcctatggcacttcagttaagtatctttgtagcactaattgcattccactacataatacattttcttcattcaatatttaacaaatatttgagtacctgctatgtgccaggcatgaagggtgggaggggttgcaattttaaaggtgttcagcgtgatacaagaccatgtcagagcagcaatggttgacagactgcagagggctgtataagccaccaagaggagtctggcttttattccaagtgaaatgggaagccattggaaggcttagagcagagaagagacttggtcttcttagtcatcaacagaatcactcaggtgctgtgcagacaaaagtctttaaggaaaagagggccaaagcaaggattatggctaaaaagccatggcagtcatgcaagtggcatgtgtctgcttctcctctgggttgtaaacttctagagggcaggaatcatgctttgcttctcttaatatcctacagtggatatggatcaaaattaattgaacatcctaggattgaggggcacctatcagtcattagaggcaggcaagatcctataatcttatggaaaaaataaagactttggagtaagatagaacatgggtcaagtctgcactgcttctgagcaagttatttaacttttctgagattcacctgcctcatttttaaaattatgggtgatgtatctaattcatagagctatcgaaagattaatgaaatagtgttaggatagcacttggtaatagtatccagtacatgggagtatctagttaacttctctagttatgtttcctcatctataaaatagaaagctttgagaaaatggcctgtgaggtcccttttatgagtccttaagtctatgagcattcgatctgtccatctgtcaacagacataatgacttctgtgcttaaagactaaaactacaaagtgaataaaacatattttttgactctcaaagaaatgatggtccagtggaaagagaaaaatagtaaattctggaatagcagtagataaaaggtggtaaatgtataaagatagtagtccacctgtgtgtcaattgcccsattttatggataagcaagaagcaagcccgtgacaagctagatagtggaagagcaatagtagggtcttctcatttctggctttgaggggccctgagacctaatcagactcaataactcacacatgcccttgaaattcacagcactatgccatacctggtcacacctgcaggggtaaccaggtttgtagaagccaattattgaccaaaaagatttgtaccacttcatacagatggacgtgccaggaacagcactatctgtcaaaatacatttacatgaaaggagaaaaggtcattatgggaaagattaatgttgattttcccggcttcacttgggtttaaaatcagaagcttaactcttcattaccacaggtgattaagctgatcacaccattataactagtaatcgttcagattgtttgattagactaattcactgtcgttattcagacactcatttcttggcaatgttcttccatctacacagcacaaaagaaaaaggggagtttgtgtttatacattcataatcccttatca

SEQ ID NO: 715742 - DNA, 1420 bp, Homo sapiens
ccttggttctagcctaccctccacactgtcagtcattccccactccccataagaactgctggtcatatcctactttttatatcaaccactggtcatcccatactcttcaagccaacctctgagactccaactgattcatttaagaagaatcaagttctgagtttctttgttgattcaattattttatttcatttcaactaagtccaataacctccttgaggaaaaggactctgttgatctcaatgttgtattcccattgcttgtctagcaaaatacttctcacatagcagactcagtagtatttgttgaatgaatgtcaaatggaagaaggaaagcatgtcctaaaagacataattccaaatgtgatgtgaaacactgacataaagttcactcaggttaaaattcttttcaataataaaatgcatctttttttaaacatacatgaaaatttgagccttctattttatttgaattttttctgaaaattaccagttctactgctatctcttttatatgtcaaattgtaatcctagttccactttatatatatatcacccattatatcacaaagtaatacctgataacacataaaatcaaataagatatgcatctgttttccttggacgacctttgtgaggaaggcacaaacatatcactcagaaaggtttttttgtctcagtgttaagctccatgcaggcagagacctacttttttttgagacagagtctcgctctgccgcccggactggagtgcagtggtacaatgtcggctcacggcaacctctgtctcccgggttcaagcgattctcccacctcagcctcctttaaattttctacttgttatttttgcttatggcagattactgcccagctaatttttgtatttttaatagagatggggtttcaccatcttggccacgctggtcttgaactcctgaccttgtkatccacctgccttggcctcccaaagtgctgggattaccggcatgagtcaccacgcctggcctaccttttttttttttttttttaactagtagcaccagcacctaacacattgcctagcacatagcaaatagtaggtatttaataaacataaaataaatgtatgagttaaatgaaaattgtccagtcatttgcttctgcccttcctcattgtgaaagacctgaatcttttattattcccattaaattccattctctccaagaagctgcccactcaaaagtaatctctcctttctttattttcttgtaacacatggtttgtacttctcaattaggttataagcgcctagaaaacaaggacatctccattttaaaatttttatttacttcacagtaataagcacagtgctttgaatgtagaagaggcttgatcatagtaacaatagctaacttttaaaaggcccattttaagtgatggg

SEQ ID NO: 715743 - DNA, 1248 bp, Homo sapiens
tcgctcagctgcgtgtgtgcctggatatccacaaatgtttggaggtgctgtgttggcacctgtgcacatattcagggcatacgtgtggtaagtataggtagatatgtgggtgctggtatagaagtgtgcattatcacccccatccattcttcctaatctaaagaagagaaggccaaagtggacaacacaccaagtaactttggtaggccaggcacggtggctcatgcctgtaatcccagcactttgggaggccgaggggggcaaatcacttgaggccaggagttcgagaccagcctggccaacatggtgaaaccctgtctctacaaaaaatacaaaaattagctgggtgtggtggcaggcatctgtaatcccagctactcagaaggctgaggcaggagaatcacttgaacccaggaggcagaggttgcagtcagccaagatcgcaccgctatacaaaagcctgggcaacagagtgagactccatctcaaaaaaagagaaaaaaagtaactttggtgcactaaatgcgccagaatcatgaaagactgtttcagtagcctgggaagaccttgaagggaataaggggagaaggaaattgggtctcctgggggttgtctgtggacccttcatccttttatttcctagaatgtgctgtggtaaaggtgccaatccacctggtccccagctgagggtggacggtgacttctgttgaggtggagctcacccactggcccttcgctgaggccacaaagtctctgggggtgtgagcctccccagtcccaccttccagatgccagttggctatgccctctggtcaggaagggggtgatgcccttgtgatgatcacaaggggatcacaggagctagggcaggtctggggagtccaggtgtgggtacagtgaattggcggcacctctgggacatccaaggggaggtgtccagggagaggttgtgtgtgtagatctgggagctgggagaaggtctatgctgggctgtggtttctggccctctgccctgcccccttaacacctgttctgtgattttcagctttaatgtccctccccaggtatgatggtggctgtgcagccaggatcagaacagatcagggcactggagccaaggccaccayggaagcagtgggtgttacagcgccgggaccaaggtggccccagcagctggttgaaggcgcgcttgtggagctgctggctgagtttccttcatgaacaaggcttctgggcccagaacagggg

SEQ ID NO: 715744 - DNA, 786 bp, Homo sapiens
ccaaatgtcacaataaacttaaagtgttttattaccactcgggctaactgaggcagtcatgtgagcccccctctcaggcatctgcaggctggcctgggggtaagggctgggggcaccagcagaggctgtccacaaactcccaacatgggagatctcttgagaaccctggaaacccctcatggttttcagcagcaccaggtcagtaaacactgggccttcccaggggactctccaccttctgctcaccttcctggccagcccaagcaaggtctcctccttaaagcctgctctgaccagcccagaagccagccacttctccccgacagttccacagtaccctgcatcctcttcacccctcctcgtgtgccctataaccttctaccaactaycttctgtgtgcctggtatcatgcccggcacttcatgtacagcatcttcccaagtccttgttgtggtgctgtaagttgtaattattgcttccattttgtggatggggaaactgaggctcagagaggtggaacaacttatctaaagtcacacagctcaaaatggacttttgtagcatcctttgccctcctacagcatgctccgcttcagagcctacaactggccatgtctgggccctgccttgcttagagacacatctgaggcaagggttcaggccagggacttggactctggtgagcctgggttcaagttcaggctctgccatcgacccatattgtgaactccggcaagtcatttagcctctctgagcttcagcttcctcatcagcaaaactagagca

SEQ ID NO: 715745 - DNA, 786 bp, Homo sapiens
ccaaatgtcacaataaacttaaagtgttttattaccactcgggctaactgaggcagtcatgtgagcccccctctcaggcatctgcaggctggcctgggggtaagggctgggggcaccagcagaggctgtccacaaactcccaacatgggagatctcttgagaaccctggaaacccctcatggttttcagcagcaccaggtcagtaaacactgggccttcccaggggactctccaccttctgctcaccttcctggccagcccaagcaaggtctcctccttaaagcctgctctgaccagcccagaagccagccacttctccccgacagttccacagtaccctgcatcctcttcacccctcctcgtgtgccctataaccttctaccaactaccttctgtgtgcctggtatcatgcccggcacttcatgtacagcatcttcccaagtccttgttgtggtgctrtaagttgtaattattgcttccattttgtggatggggaaactgaggctcagagaggtggaacaacttatctaaagtcacacagctcaaaatggacttttgtagcatcctttgccctcctacagcatgctccgcttcagagcctacaactggccatgtctgggccctgccttgcttagagacacatctgaggcaagggttcaggccagggacttggactctggtgagcctgggttcaagttcaggctctgccatcgacccatattgtgaactccggcaagtcatttagcctctctgagcttcagcttcctcatcagcaaaactagagca

SEQ ID NO: 715746 - DNA, 786 bp, Homo sapiens
ccaaatgtcacaataaacttaaagtgttttattaccactcgggctaactgaggcagtcatgtgagcccccctctcaggcatctgcaggctggcctgggggtaagggctgggggcaccagcagaggctgtccacaaactcccaacatgggagatctcttgagaaccctggaaacccctcatggttttcagcagcaccaggtcagtaaacactgggccttcccaggggactctccaccttctgctcaccttcctggccagcccaagcaaggtctcctccttaaagcctgctctgaccagcccagaagccagccacttctccccgacagttccacagtaccctgcatcctcttcacccctcctcgtgtgccctataaccttctaccaactaccttctgtgtgcctggtatcatgcccggcacttcatgtacagcatcttcccaagtccttgttgtggtgctgtaagttgtaattattgcttccattttgtggatggggaaactgaggctcagagaggtggaacaacttatctaaagtcacacagctcaaaatggacttttgtagcatcctttgccctcctacagcatgctccgcttcagagcctacaactggccatgtctgggccctgccttgcttagagacacatctgaggcaagggttcaggccagggacttggactctggtgagcctgggttcaagttcaggctctgccatcracccatattgtgaactccggcaagtcatttagcctctctgagcttcagcttcctcatcagcaaaactagagca

SEQ ID NO: 715747 - DNA, 3215 bp, Homo sapiens
aaattggctaagaagatatcatgtgctcttgaagaatgaagttttttaagtagaaaaggtgggtgtgcgtgtgtgtgtgtgtgtctgtgtctgtctgtctgtctgtctattgaagctgggtgggggcaggcttcaagacagagggtaccaggtaagcatcacatactgttatgaaaacctatgctgtggccagagtgataaggaggatgaagatgaggctgaggctggaaaggtactttggggccaaaggaaggtgctacttaactgctaagatgtggagcttgaatttcatggggtatgtgtgttaaccaatacatttgaatgttggatcaatattatacctccatcatattctggttcatcagagaagtattttttagggaggaatgttgggttttaagtggcattatagttctctacaactttaaaaatatatgtaaatttctgagtgagaaccacaacagcctctatgttcagtccaaactagggtgggttagtgattccctgtgtaacccagggttccaggtttttgggtatgcactgtgaggaaatccccacttgtgtctgttgtatcttgagttcttatttcaaaaatctctgggaagaagctcagccctggaaaaactaaaactggctggatccagagatgcctgagttggagaggaactttggccaactctcctcattaaccatagtaagaaaccttgctcagggagaagtttatttgccattttctgtacatgcaatgtatgtagaagcatgatcagcaggcgactgcactgcctttatgccacttccacatacaatgactcagctaaccagcctagtacaagtcctgcttttactgttgttcctggaggcactgctttgggaaactatcccagatgtcctccttccttgttgcaaataataaaatctccctcttaaatactccatggttgtgctcattggactgtctcctgcctagcagtttaacccacctgttgtgtgggtaacacctcaacagactagaatccttagcttgcatctttaaaagacaacagcttgagtccctttcaattcatcaaaaagccatgcattttttaaaagcagccaccagcctctttcatccagttagtcttagacaaccatctactctaaaatatctggagtccgatgcctaaagaataatttagaaacggcatcaacccctttctatatctgacctgccattttgtcacatcaaataaaagagagatcataaaaagacccgtggataaaggctgtctgcatcaccaaacatgcttgctcatctaattaatgatttaaaaaatacagattatttatataaactatttggcaccatattactgatcttaactccccttattcactatagcaattccacaaactcgaaagagacaaagattgcacacactaaagcttgtttatggcaccttaaaagacagcactttgaattgctattccccagttcctaaagtggtaatgagatttataggtaactttaaaagtttttcttttgtgtgttcgcttagcacttagcacattataggcattctgaagaatggagcacattgcacattccattaaacaatttgggcaaaaataaagtgtaaataaacataatagctagtgtagccaagtgcttagggcccctaactgggttggcaaaagagcatggagtagtgtgagagcccataggagctcctccacctccagtgcccagcacatagtaggcattcaataaatagctgaggaataatgaaacaatgaatgcattcttttttttctagccactttgcttgcagtggttatcttaagggtgtaataaagtaataattgcttcgtgactatgtgggctcataagttaatgtttgcaaagtgctttgaacttcttgggaaaagggatggtgtttttgttggcactgtgtattgtttgcagtggcacacaaattcctcctcctcctcttcctccagctgccagcactgtgccctcccccagctctgtgcagggtcaatatctcccacagggcagcctcacggcctttactgcctctctccagccagctccagcactacaggacaggtagagacacagcagacatcggaaagatttctttaaggccaccgaggagaaatgaaacttgggtcgatactaatgattcttacagggattggtgtttagagggatgcagatgcttggccacccgtggaagtagctattggacagacacactcatccgtgaggacacatcaagctagatcctgaaggggagatagaagtgtcatataggcaaacgggggtatgtgtggaarcagctgttttttcagttttatgtggcccatatacataatacaaaaccttggctagtaacgggcaacaaaatgttacatagttctgttagtaggaacccataagacaagtcagatttcttttatgagtacaattttccactgctatgatttctttcctcattattttctttatatttgatgatggcaaataacggagttctgtctcacatatggttagccaagactgcaatagtttccaatgcatttgttactattttttaaattgccatcattgttaggaacttcataattaaacaactcacatgtgatttggaaaacaaaagctatgttttctgttaagaatggatgtcctttgtgaacaaattcaagcaaaagagtttttttcttttgtgttataccaggttaactttcaactgatcacacatgataaatatctcaaaataaaacagggagaggcagttacaggttcagaataactagaatgactatgggaggcagatcttgccttaaaggcaagaacaccttcagttttccacaagttggaagtgacttgttttctagatcacatcatgagcttttctgtgtgtgtggaaggtttttcatgttaattgctgtatgtgtggcaaattcgctctctctacaaattatttctagagattggaattaaatgtcacgtggaaaaaagccaacatggcattctgttaagaagatagacaacctaagtgacgtctatcctgcttcaaagacaaaactcaggtaagtctgactttagttgaaccacatgaagttaaccaagagcaaggcttaggttttgtttttaaaaaaatatatagaaggaaaactccttccaactaaaatacattcattatttacctgaaaacagaagtaggtggagctga

SEQ ID NO: 715748 - DNA, 636 bp, Homo sapiens
taaggggaatatgagtgactgacattgtactgcccaataattttgtcttgccttttattttgtagtccttgaaccaaacctgtgtgtctcaattcaattttgctgtagttttacccaggaggagtttcagtctcttctctaatactccctagcaggcacaccttatakccctaccaatcacaggtagttctttaggcttaaactgatatactataccccaaaatattccctaataaaatctatatcatgataacttcgaggcgtttcctttagttggggtcttagaggcctctctcatttttatagaagtacttcatatactaacagatcatagacagccttcccaaatatcacttctgcaaaaagaacctcaatttttttaaagtaagggtgttattttatagactatttcttgtctttttgattgtaggcttgaagttttcttcaacttattgaaaaactgggatacctcattctaaaatataactcctctctttcacagcattcctttgtttatcaagcctcaatgatgagatgaagcatcatttatggggtcctacataacccccattctcagtatgtccagtgttattggaatcacacaaagagtgcatgccttttaaatgacacataaga

SEQ ID NO: 715749 - DNA, 636 bp, Homo sapiens
taaggggaatatgagtgactgacattgtactgcccaataattttgtcttgccttttattttgtagtccttgaaccaaacctgtgtgtctcaattcaattttgctgtagttttacccaggaggagtttcagtctcttctctaatactccctagcaggcacaccttatagccctaccaatcacaggtagttctttaggcttaaactgatatactataccccaaaatattccctaataaaatctatatcatgataacttcgaggcgtttcctttagttggggtcttagaggcctctctcatttttatagaagtacttcatatactaacagatcatagacagccttcccaaatatcacttctgcaaaaagaacctcaatttttttaaagtaagggtgttattttatagactatttcttgtctttttgattgtaggcttgaagttttcttcaacttattgaaaaactgggatacctcattctaaaatataactcctctctttcacagcattcctttgtttatcaagcctmaatgatgagatgaagcatcatttatggggtcctacataacccccattctcagtatgtccagtgttattggaatcacacaaagagtgcatgccttttaaatgacacataaga

SEQ ID NO: 715750 - DNA, 1168 bp, Homo sapiens
ctaaaaaaaaatgaattacagatcaaatctaaacctttcaagggagctgatttatagaagaaagtgtaatttcaccgaataattacatgatgactcaatattgctcccactccctgaccatgcaaattaatgctaatgtggcacactgaattacaggtaaaaaatttaacagtctaaacagaagaaactacatcttcctatttcaatcagcctggagaaaatcttcttaaatgggaacattcaagtagtcaaaagggtaccattctgattattaataaagacatacatggaactataaaacattcccaccttcatagtatttaatggcagtggtagaggcatgggagcatggattaaggctctaaggaattctgaggtattactaatatctgaaatatcactgaaagtatttcatggagctatgattcacagctcctgtcaaatatcagagtcctttcaaaatttaaattggatttaagtcaggcattactttctattctataaatcctgggtaatgataatgaagtgctatagtgttagtattgaacatcagcgcattgaaaggagacaggcctaggttctctactgtgtttgctcttcctaaccctaacttgccctcttttggttcctcctagtctcctcattctgctgacctcccactaagcatcaaatcttccctttctcaaccaacataatggacctggcctctgcccagtttcacagcaacctgttcacaatattctactactatattgtgtggctgtttaagttttttataggtctagaagtaytttttttatgaatctgggtgccccaatgttgggtgtgtatatatttaggatagttaaatcatcctgttgaattgaaacctttatcgttgtatagtgcccttctttgtcatgtttaactgctgttggtttaaaatctattttatctgatataagaattgtgaccccttctctttttgttttctgtgtgcatgacagatcattctctaaccctttactttgagtctatgagtgtcattacatatgagattggtctcttgaagacagcagatggatgggtcttgcttttttatccagcttgccactgtgtgctttttaagtgaggcattaattggagatttctcaaagaacttaaggcagaaccaccatttgacccggca

SEQ ID NO: 715751 - DNA, 1168 bp, Homo sapiens
ctaaaaaaaaatgaattacagatcaaatctaaacctttcaagggagctgatttatagaagaaagtgtaatttcaccgaataattacatgatgactcaatattgctcccactccctgaccatgcaaattaatgctaatgtggcacactgaattacaggtaaaaaatttaacagtctaaacagaagaaactacatcttcctatttcaatcagcctggagaaaatcttcttaaatgggaacattcaagtagtcaaaagggtaccattctgattattaataaagacatacatggaactataaaacattcccaccttcatagtatttaatggcagtggtagaggcatgggagcatggattaaggctctaaggaattctgaggtattactaatatctgaaatatcactgaaagtatttcatggagctatgattcacagctcctgtcaaatatcagagtcctttcaaaatttaaattggatttaagtcaggcattactttctattctataaatcctgggtaatgataatgaagtgctatagtgttagtattgaacatcagcgcattgaaaggagacaggcctaggttctctactgtgtttgctcttcctaaccctaacttgccctcttttggttcctcctagtctcctcattctgctgacctcccactaagcatcaaatcttccctttctcaaccaacataatggacctggcctctgcccagtttcacagcaacctgttcacaatattctactactatattgtgtggctgtttaagttttttataggtctagaagtattttttttatgaatctgggtgccccaatgttgggtgtgtatatatttaggatagttaaatcatcctgttgaattgaaacctttatcgttgtatagtgcccttctttgtcatgtttaactgctgttggtttaaaatctattttatctgatataagaattgtgaccccttctctttttgttttctgtgtgcatgacagatcrttctctaaccctttactttgagtctatgagtgtcattacatatgagattggtctcttgaagacagcagatggatgggtcttgcttttttatccagcttgccactgtgtgctttttaagtgaggcattaattggagatttctcaaagaacttaaggcagaaccaccatttgacccggca

SEQ ID NO: 715752 - DNA, 634 bp, Homo sapiens
aaagaaaaaaattagccaggcatggtggtgggcgcctgcagtcccagctactcaggaggctgaggcaggagaatggcatgaaccggggagatggagcttgcagtgagccgagatcacaccactgcactccagcctgggcaacagagcgagactctgtctcacacgcacacacaaaaagtaataaattggagaagtagtttaaattacattttagctattaatttgtgctaaaatttatttcaaaatcaaaaagtaactcatgttccttaagagccaataaaattaatagaatgtaaattccatgagctcagagagcactgtctgctttttactgatatattccactgagaatagtgcctggtacrtagtaaataataaatatctgttaaatagaaaaacaaatcatgctgaaccagctaattttctttcttttaccaattctgactttatttattctaagaagtaattgctttaaggttttcaacagtttgccctgttattttgtcattttaataaacataatatataatatcaagatggtcatgtatagaaattaatgttttaaaaattctcttaccttaaacattctccctttcaatatttacaaagttttgtgaaaaagttggaaatatac

SEQ ID NO: 715753 - DNA, 599 bp, Homo sapiens
tggaaaccttgtgaggatggtggcaacctcagtttacaaatgagcaatatgaaacagaggaattaagtaaattgcttgagagtgctcagctggtgacttaaactcaatctaacagattccaaatctatacatctcatctctactacgacatactcatttccatagtacttttcatgtggaactaggaatatgtgtactagaaattttaatattgtttatttattcaagatgaaaggacaggagtagtgtctcaagcctgtaatctcagtgctttgagaagttgaggtgggaggatcacctggacaacatagcaagaccccatctctacaaaacaaaaaggtcaaagtgcacactcacaaaccaatacaggtagtcttcaaaaacattctgctctattaaaattttagaatctttgtcaccgttaaagttttcattaataaaatgaataggaaaactaacaagtgtttaacctaggtatcaytttgattcattatcacaattaaactatattgagagtaaaagttatataaaatctgaacatagactaaaattaggtgtcagtttgtaaggtataaggttgaaaaattcaatagactgat

SEQ ID NO: 715754 - DNA, 640 bp, Homo sapiens
ataataagaagctgggaaaactcaccatccaagcactgcctaataattaagtagggctagttaatgcctaattactcacctaagcagcctgaaacgttctgaactatcagggtggaagttcttgttaaaaaggtataggggggcccggcgcggtggccacgcctgtaatcccaggacttcgggaggccgagtcgggcggatcacgagatcaggagatggagaccatcctaactaacatggtgaaaccccgtctgtactaaaactacaaaaatttagctgggcgtggtggccggcgcctatagtctcagctactacggaggctgaggcaggagaatggcgtaaacccgggaggcggagcttgcagtgagccgagatcagccaccgcactccagcctgggcgacagagcgagactccgtctcaaaaaaamaaaaaaaaaaaagtgtaggggaagggaagacaacgtgagaagaggctcctccttcatctccccaccagcccagccacgaggcttgcttgcctcttctaccatcagtgctaatcagctttattacctagtcaagtcctcaggctgagggtgaagctaatcaacccaggatgacatcgaattgccttttgtttcgttttaaaatctattttaca

SEQ ID NO: 715755 - DNA, 1126 bp, Homo sapiens
attttaacaaatagtttgttctttttctctgtctctgtctctcccctcactaacacacacatttatatttcataaaaaataagatttgtgaaagtattactgtagctttccaaggcatctgaatcatcactagcacctcttatctatttgtatttgccaaatggaactggctgtgtagatataattagccttcatcctgtggttgaatgatgtggacatacttttacctcttttaaatcatgcctttcttaactcagtaggataacactgaaatatataagaaaagttatttcagccatgctctgtgttatattttgaaatgagattctatgctaaaactattttcctattttgataaacagtcacaagacatgttaaatcgtatttttgtgttcattgccatttgtcatgtattttccaattgccatttgtccaattgttcattgccatttgtcatgtattttccaactggggactcaaaacactgatccccgtaagatgtatcagggaactgttcagaaatttcaattgcttgtctagcacttttactactttttaactttatttactacgtttattgaagcaaactcttttgactagttttgtcatgttaacaatcgtcaaattatcttaatgaaatcatcttaatgaaattcactctatgttataaaatgttaaaatataagaattgagcaaatgtatgatgtgtgtgtagaaaagctaaataactatcagaatataaagtcgacaagcaaaatcttcaatttgagttatgtctctcaggacataaaaataacgttaagtcagtaagagagtaagtaaagatcaagtgtcagcctgtcagacacacataaatcacaattaagatgttttctaattataaatgcatttcttggcattaaactccagctcgagcatgtcagaaggaaatgttaatattctgacccagargtctggcggcattagatttgcctgattgttaagcttacatattaatataggaggtacctttgtttggctcaaatccctctcccttgagcaggatgccaattattttccatgccaatttttcaactgccagggcacagctttacttgttcagttctccctaaagttcatgaagcca

SEQ ID NO: 715756 - DNA, 1674 bp, Homo sapiens
ctatggtatgcacgtgggcatggaaatgagtgaatggcagaaaagtaaccttaacctttcataatacagttatattgcaaaggcaattgtttactacatctagtgttttcattttgctgyttaaaacatatcaacaaaatctctgcatgtttatatatctaattaaattggtaattaaagtagacatgttataaaatattaaatattctcaatttatatattccattgattatttgtactcactcagagttaaatcaggtctgaccagtctgctgtgactgattcggatgggcagtatcggaatattattgccaaggcttctcctggggttcctcatcctgttccaaatcagtctctttatgttaacagccgacagggacatcagctgtgcaactaggtttttcatgagcccatcttggcatcaagatagagaattggaacataaaagaacctttagaaatgtagatacttcaaaggcaatagaaaaactgtaaacaagtttatattttctgaattcaaggtatttaaataccaaggaaaatacaccaaaatagacatacaaatatttatcatttaggttgtgcatcaggttactagtttagttatgatttattattttatttttattttttccctgagctattataagttaacgtgtctgtcttaaatttgaggctgtttagtaaagtctttatactttgtcttttatttattaatgggctagtgaagtacggtggccaattgatcatgtaataaatgtgtttttttggtagtaaaatctctatactatctaaacaatataaaattaaatttatctttttaaaaatgtaaaaatatgcctggaaatgaaaatatactgattggcatgtggaattcaagataattttcctcttgtgtgatttagcttttggttatggtgttttgttcaccaaatgccagtttgtttcttaactagtcattgtatttcccaaagctacagtatatagttcacacaaacattgaaaatttgtgttgtgtgtagaacagatccacacttggaataagttagaaatgtattattataagttagcagacatcacaatgttaaaaactggtaaaatagaaaaaaataatgtgactgtttagaaatcattcaatcctataccttactttaattaccaatatattaatgtgtcttttgaaatgtatttaatatctcacttgcatgaattatttcaaatgttgacaataagttttttctgtcacaccaaaaccttattattttatttcatgttcccatgaatatcacaaaaaataaaatattaagagcatgaaaaaatgctaaacctaattttttgttagatcaggaataaaaaaattatcttacatgtatcttttatccaaatctctattttcaggaagttaaatagatgttctacgctgaatgattatatttattagaatttattaaattaagcactaggtacaaatgcatagtgatgacctagttcttccaagagtaaattaactttccataaggataatcaccctttgctaaggtatacaaattatttgtgaaaaggtttcttattgcataattgtattgattttgttgttaactgttccattatgaagttcttgcttgttaattttgtgaggtactagaagttgaggaaagcagacaagtgatttgct

SEQ ID NO: 715757 - DNA, 656 bp, Homo sapiens
tattcaagccacaaagtttatgccctgatatttactgatctctatgtattgacttttgatcactcaccctggcttgttaattaattttatccttaacatatttatattgtttgggttccagtatttcagtctctacctctagacctgacatgtgcttcattgaatgtgcgtctgatgatcctgtgcatattcttacaaatactgtagtctacggatgtgacatttttggacctttggactatgttaccacctctaggtatctatatcatgtgaataatcaaacatcacaagaaatccagtgataagaactgttgtggcagatcctggaccttattctaacagctttcaattacatattctctttaattttgtgctgttttgtttttgttttttttacagtgaatatttccttcttatccttaaatctgaaaaatgctgacacaaccctctgaggactttactagaggaggaatgtcagaactaatctgcaggtcgtaagtgtgcactttctgttcagtgcttgttacatacccattgcctcaatactgtgggtttagtggacattgaattcacctctgcatctrtatcacttatgttagaatctggaaaataagcactcagatatttgctaaataacagaagagtcataaaaccgg

SEQ ID NO: 715758 - DNA, 597 bp, Homo sapiens
tttaagtaattgtgagatgtttaaagtttagactttctgyttatcaaaaatgaattgtgggatataacatagcatcaaataacaactgcggctacccaccaatatttccttggtattactacaataggcagaagactgggctgggggaatatcaggcagctaattttgattgcagtgtggtttgggaatgagaataaacagtgtgctttcagagcttccgtggtatagtgttgtgcattgggattcagcacctggaaagtttgaactgtgatctctccaaatactagtggaccctatgtttgttgttctgttggtgattatttacttttggctttctttaaaccattgaatcaaattgctatttgatgtttactgggtaaaaattgttgcaataaatgcatcctaattctaggcatttcacatttttctgttctatatttcacattattttacattatcttgacattatcaacatcattcttatttgacattatctaatagagacactcattattttttacaatgacattgcacatatatacataggacgtggcaaggggagttagaatttaacttcaaatcttttattttcaagaa

SEQ ID NO: 715759 - DNA, 529 bp, Homo sapiens
tgaatcactaaatcacaaagctattggacacataaaaaagattccaacaggtacaggagaaagcaacgaatctttctgatctattttgtcgaattgagggcttatatcatgtttttagaacacttgtaaagaagaccaattcttcttactttgaaaagaacatttcagcttttgttttacctctttgatataaatcactaatattagtatttcctctggtaaattcttctgaaaatgactaaatcttttaagtaaaactaattttgtaaatcttttgatatgtattagggacttaggacccatttttctacattatgattctataattgtgagcactagatcctaggttacataactaaaatcaaaggttaattgaactaaaaagattatattatctcttgcatagaaacagctgcatgggagtcaggaatacaatgacmggaggtcctttttttttttttttttttttgagataaagtcttgccctgtcacccaggctggagtgcaatggcgtgatcttggctcactg

SEQ ID NO: 715760 - DNA, 331 bp, Homo sapiens
atccccctcttgggatatacgtgtctcagactgcatcagccagatcagccagttcagttcccccaaagactggactgaatttctgatggttcccagtgctcatcactcttcctctgtctgttttggcatrggagaaaatgtatcttcttgttaagaacagacaaatgatcagttgtcctcagtgtgtggccaggtttcgcattccttttcctatgacaaaaggaaactaatcatttaaattaaaatcaccaagagaaatgtaaacattagcccctgatttctgtgactgcaggtccgatggggaggcttatggcattatttaatggtgaga

SEQ ID NO: 715761 - DNA, 587 bp, Homo sapiens
ccattcactgcagcctgcatctctagggctcaagagatcctcccacttcggcttcccgagtagctgggactacaggcactcgagaccaaatccgactaatttttcaattttttttttctttttttggtagaggcrggatctcactttgtgcttagggtggtattgaacttctgggctaaagagatactcctgacttagcctcccaaagtgctaggattatagcagggagctactgctctgggtcagcttttctgctaaaatgctttgctgaggtggaaatgaggagggtgaagcagtgggcgggcatttgttttacaaaggctctacctaggctgtaccatctggtgaagtgcttgtaacttttaaggtggaaacgatgccatttttcctttattctcccgtctgtaagaccagaaggcaattggaggatcctcaaataccagggagaaaccaggtagcagaagaagtagtatggtgggaggggaagatcaaagcaaacgcctggggagtgagtgacaactgcgaccccaaattgggtctcctgacttgtcaaggcccttctctgggctcctctgcacctgtcctct

SEQ ID NO: 715762 - DNA, 587 bp, Homo sapiens
ccattcactgcagcctgcatctctagggctcaagagatcctcccacttcggcttcccgagtagctgggactacaggcactcgagaccaaatccgactaatttttcaattttttttttctttttttggtagaggcgggatctcactttgtgcttagggtggtattgaacttctgggctaaagagatactcctgacttagcctcccaaagtgctaggattatagcagggagctactgctctgggtcagcttttctgctaaaatgctttgctgaggtggaaatgaggagggtgaagcagtgggcgggcatttgttttacaaaggctctacctaggctgtaccatctggtgaagtgcttgtaacttttaaggtggaaacgatgccatttttcctttattctcccgtctgtaagaccagaaggcaattggaggatcctcaaataccagggagaaaccaggtagcagaagaagtagtatggtgggaggggaagatcaaagcaaacgcctggggagtgagtgacaaytgcgaccccaaattgggtctcctgacttgtcaaggcccttctctgggctcctctgcacctgtcctct

SEQ ID NO: 715763 - DNA, 999 bp, Homo sapiens
tttttagtagagacggagtttcaccatgttggccaggatggtcacgatctcctgacctcgtgatcccccggcctcagcctctgaaagtgctgggattacaggcgtgagccactgctcctggcccagtttttgtaaagggactgcactgggttcctttctagtactagatgtttagaaagctcaagttttgtaattccattctcaggacattgtttgcattttatattctagtatgcttaggaggtaacaaggttaaatacccagaattgcaatttaccaaatttgagtagctaaaaaagattaactgaaatgtttccccrtccaaaatgctgtcataggttaagaaaagttttactttaatgaataatctttcctaagttaagtggttggtgcacttggacgatttctgagtaatcccagatcatcaatagttaagtccatgtttgcccgagtatgttttatatcatacacctaaaagatgtactgtgaagtacgttaagtattcacatttttggaaactatactgcatcccccaagagtatgtcccagggaatccttcatatgttaatatcttttggaacattcgaaagaattaatttgaggggaaataatgatttagttagatactaatttacagagttgaatggtgctagtaaggtatgccctatgtagtcagctgggctttgagggagggaggccacagaagtgtcagaaaagacaatgtcttttggattttagactcaatctccttgctccttttctccctcccctctttcaggcaagttttgatggtagatgagtgagacagtaaatgaggatgccttctaaatagtatgcagaaaatcaagcatttactgcacttggagtcagaggaccccagctcttaatagctatataacagccctgggtgggtcatgttcccaatttgatagtcgggggttaggagtttttttcaagggaatagctcatgattttagtttgtgtccgaagttaatctga

SEQ ID NO: 715764 - DNA, 594 bp, Homo sapiens
tattcattaatcaaataataacaccaataaacatacatttataaattagatatatataattggataattttatgaagaacaggtattaaagacatgataaaaaagcaagaagaagaaattttctcctagaaaatcagcaacatttttaaaaattgctcccttaagaaacacttttttttccttcaacttttattttaagttctagggtgtatgtgcaggatgtgcaggtttgttaggtaaatgtgtgccatgttggtttgctgcacagatcagcgcatcacccaggtattaagcccagcatccattagctgttcttctggatgctttccctctccccactccttgctacaggccccggtgtgtgttgctccctatcacgtgtccatgtgttaagatgaaatggacaaattccgtttacactgctggtgggaatgtaaactagtacaacaactatggaaagcaaygtagagattccttaaagaactaaaagtaggccaggtgtggtggctcacgcctgtaatcccagcactttgagaggccaaggcaggcggatcacaagttcaggagttcgagaccaccctggctaacacgatg

SEQ ID NO: 715765 - DNA, 660 bp, Homo sapiens
tcaatgggtacagcgtttcagtttggggtgatgaaaagttctggagatggatggtgaggatagttacagctgggtggaaatcaggtgaccccagccagggggtgtggtctggagaggcaggaaggagacaggctaggatatgcgtttttcacaatgtgagtgtatttaatgccactgaatgagtacagtggtaaattttctattatgtatgttttataacaataccagaaaaagaaaagtcttgctaactttttgcaaactgatggtacctgtgtgtttccacctttctcccgtctagatttggatgggctgctctagggtaagaaattgatataaaggtggtgcttttttgaacaccacttacatatttcaaattatagtactggttcatgaacataaagccctattatgtayatttttgcttaatcataaattaaccatgcttggtttattacattgactagtctacctttttgagataatagttgcacacttactaattgtattcgctttcaaatatacttttggttaaaaatataggctgaaatttgagaaactgagtttctttcattttttgcaagtgtataagaagtagaatttaaaaaaaaaatctttcaacatcacagcagtaaccaggccgacttggctggaagctggtgg

SEQ ID NO: 715766 - DNA, 660 bp, Homo sapiens
tcaatgggtacagcgtttcagtttggggtgatgaaaagttctggagatggatggtgaggatagttacagctgggtggaaatcaggtgaccccagccagggggtgtggtctggagaggcaggaaggagacaggctaggatatgcgtttttcacaatgtgagtgtatttaatgccactgaatgagtacagtggtaaattttctattatgtatgttttataacaataccagaaaaagaaaagtcttgctaactttttgcaaactgatggtacctgtgtgtttccacctttctcccgtctagatttggatgggctgctctagggtaagaaattgatataaaggtggtgcttttttgaacaccacttacatatttcaaattatagtactggttcatgaacataaagccctattatgtatatttttgcttaatcataaattaaccatgcttggtttattacattgactagtctacctttttgagataatagttgcacacttactaattgtattcgctttcaaatatacttttggttaaaaatataggctgaaatttgagaaactgagtttctttcattttttgcaagtgtataagaagtagaatttwaaaaaaaaatctttcaacatcacagcagtaaccaggccgacttggctggaagctggtgg

SEQ ID NO: 715767 - DNA, 1167 bp, Homo sapiens
tctccctgattttggctctgccctgcctccaccagagtctctacaccccctttagtccctttcttttttttctttttttttttttttgctagctgatcgagtttggaactggtctgttctttgttgcccccctggactcagccatagcatctcagaccaaaagttcctaacaatggtccctccttgcaaggagaggcttcctgaattattttctcccccatttaccaggaaatccactgattttagagattttccacccctaaggacagtaagaacctgagggcagagagtgtaaggcatcacggggcaggagaggtgagcatctatgtggtggaagctggggtgccgatgcacgtggctgcaacagcatctcccagtggccaagtcacaggggaagaaaagaatgtttgtgtcaaccaccaaagggctgaggtaaacagttgtcttcactcactgcccattcctgaagatgagtcacttcccaaacttccagagctgtgacgacaattgtttatctgacatggacattgagcttgttttcattgctgcaataccatctcaaagcacactgggttgtccttcttctgagtaacaacatcctcttattatgaattctgtatttcatttggacccaccttcttagcatttgtattactccgtacaacttgttctaggaaattgtgaaaatagcaatattgaggtaaatagaattctttttytttttcatttatttttaggaaaatcttactgctttgattttaaaatctgatgacaaatctgtggttaaccccacccatcactgtgctgaagaaagaaattggatattttttctgtggaatttcagcagtcaatactctttccttattgctcaaagtcctcccacagagaagttctggggaaatagagagaaggcaaagggtggcagttgggagccaaaatgcttagagttatagtaaatgcaaaatgtgttaaaaagaaccttgagctttcagtggtaccactgtcttatatccaactcacagagcaatgtggtgggggatgtatcaggcaaggttcaatcaaggaagcatgaccacgatgaatgatgtagaaaaacacagatttgcaatagagattggacctggagtcatgatgggagctggtggagatgtctgtgcaaggctgttc

SEQ ID NO: 715768 - DNA, 658 bp, Homo sapiens
ggtcaggaatttgagatcagcctggccaacatgttgaaatcctgtctctgctaaaaatacaaaaattagccgggcatggtggcacgcacctgtaatcccagctacctgggaaactgaggcaggagaatcgcttgaacctgggaggtagaggttgcagtgagctgagattgcaccactgcactgggcgacagagaaagactccaagaaaaaaaaaagagagagagagatttaaataaactagcattgtcacaaagtaggaataaaagagattcccacagtctttttttttgtttttccttcggaactgtaaggttcttaacttctccaatagtgcacggctctgaaaagtacttttagaaagcagttccaacatttcttttcaggcagttcttaagaatgttggaatgtgaacaacaacaaaaaaaagttgcttcaaccacagcctgcactctgcatttggccsgcaagcactgctgacgttgcagaataaataccaatgacaccacaagcaacttgaaaaaattttttggactgacaaagctcacattatgcaacacttaattgagtatatttcttcacatagagagaaacagcacagtggtcacagggtaaaatccagtgaattgaatatactgggcattttaattgcagaaaattg

SEQ ID NO: 715769 - DNA, 2701 bp, Homo sapiens
gaagaccctcatcactgaaacatcatgaatggtaaattaaacatatgaagaaatatctgacaaaagacattaagtggtttaactgcactgatgacaagccagcccctaatctgtttgacgcgatcgtttccggtgaaaatctacaccccctccctcacccctacacccctgcagaaaaccaaaccgaactctgaagcatctgctttctactggaagccattcgaaatgagttactgtaatttgatccattgcattgtaacctttacattatcgttgcatttataacaagttagactaagaagatttggtgcaagcattttcatttcaagcaggacagaaggggccatctttcaagggtttagcaagcacagcggggcccaccgcggcaggtagcagccctgtgcagccgcttgagctgacagaccaccccgcctccagctgaagcacataagctcctttgcagcagagattacagcaagttatacggcagtaatgcagcctaattccccagggcgggcgtctgtgcaggcacagggagggctggcccttggcttcctccgtgatgagggcacaagaggaaaccttgccacctggggcctggcwgagcaggcgcccctcagtgcagtaggcaggtgtgtcaccttcctggaggatgggtcttgagaaacgagaccctaacagcagggagaatgcctctgaaagccgctggttcccataacctaagtgttgtccttacgagatggagtgtggtgctggcaactcactagtgtgtacatttgactcggtgaacacactgagtagtgaatggaggtggctgcaggaacacccagacctctaggtgatccttcaagtgcatggcaaggaggcaaatatgacaatcattttgctcaggtcaactgctatgtagatggccagtgagcgctctgagcctgctgggctggggggaaagaaacccgtgtccacttctgggctcagtcagggcctaggctttgatgcctttgtgaaatagcagggaggggctcagacactttgcctataggaatcaataactcatcagcagggccatgaaggcgtgttggggctggggcgggaataagatgagacatccgagggtcagagttccttccattatctgaactgtcaaagggcccaagctgtgagtttacaagcgccctcctccctggccctcacatcccggagtggagggaatgttccaccttggctcctgaggcctgcctgcttttgcagcaaagagggaccgtctcatgaccttgtgacacgtggcgtctccacagaaggccttgggatgctaggtccacatccacgctccggtctcatcccagcccagaacagcagtgcagggaagttgacccaccttctggaagcaagctgcaggttcccctagtctgccagtgctgtctgccccataaggctctcctggttccattccatgcagggtccctggcatccaaccacaaagccgggatcccactggcaacctctccccacacacttcactgggtcatgaagccacatccatcttctgccctgaggctccccgccagggtcctcatgcccaagagagaaggaattccctcatttgtgtgcaaagttcaaaaatgttgtctatgcatctatgcctacagctctgccttcctggccaggacaaacttggtggccgtttgtgggaagtcctgagctggtgctgggaggaaggagggaggttccccttcatgcttttgtgattgtacccttctcctcttcttcagccatattacacggcacgattttaacatactgtccacaggagtcacaaagcaggaagccacagtggaagggttaagcaggaagcctccagagattcagggggaagggatcagttccaggcccagcaggggctgcaggtctcagcctgtgcactggcaggagtactcagtgcggaggatgggagggcacgcctttggcaggaggcacatgtggagagggcgctcgagggagtagggcagtgtggttcccaacacgccaggggacgggcgggaacaagagccccaggcctccttgaggggctctagtgagacagatactgccacatggtcacagaaggaggcccagctgtgtcacatcccacagaagggtccagggtggcagcggagcggacagtggggtgttttagctgcgtcctgggaaacagtcaggttgtccagagggagggaaagtgtgtggcagggccgcagacacggatgcccccacgacttggggcgcagcggctggaggaggtgccctgtggaacgggggatgatagacgcagggacagcagccaggctgaggagggcccgggtgcctgtggaactgccgagtccaccctctgggcaaaagaacagcaccaggtgacggaggagagtggaacctggaggccagcacgcggagtgcagacacgccactgccagggcggggagctagaggggtccggccgcgtttctggaaacggagcctggaagggaggcagtacttccatgaacaccaacactgctatcaggaagagggacagacctgatcaggagtgggagcagggaaggaaatggcaggtttcaccaagggtcattgaaattctggacgcacactcaaacgtgtcactcacaccacgtcccaaatccccccagtttgtcactatggtaaataggaaagcgtttataatactttg

SEQ ID NO: 715770 - DNA, 2701 bp, Homo sapiens
gaagaccctcatcactgaaacatcatgaatggtaaattaaacatatgaagaaatatctgacaaaagacattaagtggtttaactgcactgatgacaagccagcccctaatctgtttgacgcgatcgtttccggtgaaaatctacaccccctccctcacccctacacccctgcagaaaaccaaaccgaactctgaagcatctgctttctactggaagccattcgaaatgagttactgtaatttgatccattgcattgtaacctttacattatcgttgcatttataacaagttagactaagaagatttggtgcaagcattttcatttcaagcaggacagaaggggccatctttcaagggtttagcaagcacagcggggcccaccgcggcaggtagcagccctgtgcagccgcttgagctgacagaccaccccgcctccagctgaagcacataagctcctttgcagcagagattacagcaagttatacggcagtaatgcagcctaattccccagggcgggcgtctgtgcaggcacagggagggctggcccttggcttcctccgtgatgagggcacaagaggaaaccttgccacctggggcctggcagrgcaggcgcccctcagtgcagtaggcaggtgtgtcaccttcctggaggatgggtcttgagaaacgagaccctaacagcagggagaatgcctctgaaagccgctggttcccataacctaagtgttgtccttacgagatggagtgtggtgctggcaactcactagtgtgtacatttgactcggtgaacacactgagtagtgaatggaggtggctgcaggaacacccagacctctaggtgatccttcaagtgcatggcaaggaggcaaatatgacaatcattttgctcaggtcaactgctatgtagatggccagtgagcgctctgagcctgctgggctggggggaaagaaacccgtgtccacttctgggctcagtcagggcctaggctttgatgcctttgtgaaatagcagggaggggctcagacactttgcctataggaatcaataactcatcagcagggccatgaaggcgtgttggggctggggcgggaataagatgagacatccgagggtcagagttccttccattatctgaactgtcaaagggcccaagctgtgagtttacaagcgccctcctccctggccctcacatcccggagtggagggaatgttccaccttggctcctgaggcctgcctgcttttgcagcaaagagggaccgtctcatgaccttgtgacacgtggcgtctccacagaaggccttgggatgctaggtccacatccacgctccggtctcatcccagcccagaacagcagtgcagggaagttgacccaccttctggaagcaagctgcaggttcccctagtctgccagtgctgtctgccccataaggctctcctggttccattccatgcagggtccctggcatccaaccacaaagccgggatcccactggcaacctctccccacacacttcactgggtcatgaagccacatccatcttctgccctgaggctccccgccagggtcctcatgcccaagagagaaggaattccctcatttgtgtgcaaagttcaaaaatgttgtctatgcatctatgcctacagctctgccttcctggccaggacaaacttggtggccgtttgtgggaagtcctgagctggtgctgggaggaaggagggaggttccccttcatgcttttgtgattgtacccttctcctcttcttcagccatattacacggcacgattttaacatactgtccacaggagtcacaaagcaggaagccacagtggaagggttaagcaggaagcctccagagattcagggggaagggatcagttccaggcccagcaggggctgcaggtctcagcctgtgcactggcaggagtactcagtgcggaggatgggagggcacgcctttggcaggaggcacatgtggagagggcgctcgagggagtagggcagtgtggttcccaacacgccaggggacgggcgggaacaagagccccaggcctccttgaggggctctagtgagacagatactgccacatggtcacagaaggaggcccagctgtgtcacatcccacagaagggtccagggtggcagcggagcggacagtggggtgttttagctgcgtcctgggaaacagtcaggttgtccagagggagggaaagtgtgtggcagggccgcagacacggatgcccccacgacttggggcgcagcggctggaggaggtgccctgtggaacgggggatgatagacgcagggacagcagccaggctgaggagggcccgggtgcctgtggaactgccgagtccaccctctgggcaaaagaacagcaccaggtgacggaggagagtggaacctggaggccagcacgcggagtgcagacacgccactgccagggcggggagctagaggggtccggccgcgtttctggaaacggagcctggaagggaggcagtacttccatgaacaccaacactgctatcaggaagagggacagacctgatcaggagtgggagcagggaaggaaatggcaggtttcaccaagggtcattgaaattctggacgcacactcaaacgtgtcactcacaccacgtcccaaatccccccagtttgtcactatggtaaataggaaagcgtttataatactttg

SEQ ID NO: 715771 - DNA, 635 bp, Homo sapiens
tttattgaaatttttagtttagaaaacagaaataactttggaaaaaaatcactatgatttcctaagaaaatcgaagaatacacttttttaattaaaataataagttatgaaagacaagtgtcagagaattttttaaataaagggatttaacaaaagaactatggccataaaagttataaaaatacatatttgccccacaaaatttggtggaatttagggagggaaaacaaaaaatgaaaattcaaatttccagtaaagactgactataaatataaaagaacataaartatccaaaaattacaaccctcaaataaaaaatataaaatattttttagaaataaaattattatcagaataaaaattcctgtgtataccaagcatctgtggggtggacaggaaaatagagacgtaggaaggagtacttgctagtgattttctttatcacagatacaatgaattaaccttttgtgcctgatttaacaactttagtaataagataaaatattttaaaaagaacaaacacaattattagttgaagtaaacaggactgcatatttgagatggggtcatataaagcaaagaaactcaaaatctatagcaaatattaaatacaaagagaagttctttaaagcatt

SEQ ID NO: 715772 - DNA, 635 bp, Homo sapiens
tttattgaaatttttagtttagaaaacagaaataactttggaaaaaaatcactatgatttcctaagaaaatcgaagaatacacttttttaattaaaataataagttatgaaagacaagtgtcagagaattttttaaataaagggatttaacaaaagaactatggccataaaagttataaaaatacatatttgccccacaaaatttggtggaatttagggagggaaaacaaaaaatgaaaattcaaatttccagtaaagactgactataaatataaaagaacataaaatatccaaaaattacaaccctcawataaaaaatataaaatattttttagaaataaaattattatcagaataaaaattcctgtgtataccaagcatctgtggggtggacaggaaaatagagacgtaggaaggagtacttgctagtgattttctttatcacagatacaatgaattaaccttttgtgcctgatttaacaactttagtaataagataaaatattttaaaaagaacaaacacaattattagttgaagtaaacaggactgcatatttgagatggggtcatataaagcaaagaaactcaaaatctatagcaaatattaaatacaaagagaagttctttaaagcatt

SEQ ID NO: 715773 - DNA, 635 bp, Homo sapiens
tttattgaaatttttagtttagaaaacagaaataactttggaaaaaaatcactatgatttcctaagaaaatcgaagaatacacttttttaattaaaataataagttatgaaagacaagtgtcagagaattttttaaataaagggatttaacaaaagaactatggccataaaagttataaaaatacatatttgccccacaaaatttggtggaatttagggagggaaaacaaaaaatgaaaattcaaatttccagtaaagactgactataaatataaaagaacataaaatatccaaaaattacaaccctcaaataaaaaatataaaatattttttagaaataaaattattatcagaataaaaattcctgtgtataccaagcatctgtggggtggacaggaaaatagagacgtaggaaggagtacttgctagtgattttctttatcacagatacaatgaattaaccttttgtgcctgatttaacaactttagtaataagataaaatattttaaaaagaacaaacacaattattagttgaagtaaacrggactgcatatttgagatggggtcatataaagcaaagaaactcaaaatctatagcaaatattaaatacaaagagaagttctttaaagcatt

SEQ ID NO: 715774 - DNA, 2278 bp, Homo sapiens
ttttcactttaagtagcttagtagtctaatacaggaaaagaaatagacaatattggaaatatttaaaatatcactcagatcaatctatataggcacaatgaaaattcaaaaaaaaatgtgagggtgggggtaagaggtggaaaagtcaagaaagcattcatagaggagcaaccgttgagcattgtcttaggaagcagtaggaccatgtcaggctgaagggaatgtactccaggctgaggcagcaaagtaagccaaggctcagaacctgggaggagactaggctgcccaggaaaacagtagtttcatttggctggaaaaatgggaagtccagattatagaaacctatggcctgactctgttgtctagattttcatcctaggaaaggcaatgagattgaacccctgcaattctaaacacagtagaaacatggctgtatttgtatctaagaaagatcattttggcctcagtttggagggtaaagaggagagttggaaaccgcattggaagaccatggcaaggagcatgaatcaagatgattaagggttgaattagagccgtggaggttgtgagagatttgagagcagtgaagaaaaaaccatctcacatggcttccaggggcctgtcttgggggacaagtgatgtcgttcacagagtacaagaaagaataggtgtgggggagtgccatgagctcagtttggaacatgcacaatccagggagtaatgtaacttacagttctggagctcgtgggagaggtatggggtcatcatatacaagcaattgttgaaactaaaaattagttgagtgattcaggaaaagtatgcaggataagacagaagtgggcaaggacctgggtagcatcagcatttaagaaaagaagaagaagaagaaaaaaaaactagtacaggtgaccaagaagaaatgatccaaagataagggagagaaaaaagagcatggtgactgagaagtcaaaggaggaaaaaggtttccaaaagaaagtcatgacaggtgcagagaggacaaataacatctgaaaagtttcactatacttaggaaccaggctgtgggtgtcctgtgccacacatttcagtggagtcattagaccaaatgaaagtgaaggctatgattataaactgttcctttaaaggactcaggctgagaacagaaggcaacagggaaacaaataattgaaaggggaaaaggttgttttgtctttcttatattgtaaaaaatcaaggcaattatagaaactggaaagaatttttaaaaagaaaagtttgaatgattgctgaaagaatatctaagagaaaagagggatgcatattcaaaaatacagttgagagactggctttgaacagagcagagaaaggcctccttatgaagggtggaaggaggtragggagagtgcagtcacaggcaagtctgtgactcaatcttttctatgctggttggctaatgtctttaaaaataaaaaaagcaaaccttcctgctacagagaatcaatgtttcaaaaatagagaactgctgagatttattctgtctgttcccttaatccatctacaccctgctaacctcctgaaaaatattttgagaacataagaaaaaagacgctaaatgatggggccaaatgtcccatctcgcatcctggagaatccagcatctgttcacaggcaaatgtgtagagtaagagaatgggctatggcaatggccttaatatcagggaaaaagaaaatcacccctgaactcaggactggaacaaagaaatgaaaatgaatctgaaaagcattcttccctcccacatgccacaaaacctcctgaggtttctaattctagaactgacatctcaacagaagtgagtaatctaaaagctaaatgcaatttccaagaaatgaaaaattgcagcaatttttggaaattagaattgaccaacaataaaagcattgcatatcaaacattttaagacacacctaaagttacacccagagggaaatttgtaaatctaaataaaattattaggaagatgtaatttcttcccaaactaatctataactccaatgtaatatcaataaaaattccagttgatgagctttctttctttctttctctctctctctctctctctctctctctctctctttctttctttctttttctttctttcagacagggtctcactctgtcacccaagctggagtgcagcagcacgatcatggctcactgctgcttcaatctctcaggctcaagtgattctcctgcctcagcttccagaggaactaggac

SEQ ID NO: 715775 - DNA, 2278 bp, Homo sapiens
ttttcactttaagtagcttagtagtctaatacaggaaaagaaatagacaatattggaaatatttaaaatatcactcagatcaatctatataggcacaatgaaaattcaaaaaaaaatgtgagggtgggggtaagaggtggaaaagtcaagaaagcattcatagaggagcaaccgttgagcattgtcttaggaagcagtaggaccatgtcaggctgaagggaatgtactccaggctgaggcagcaaagtaagccaaggctcagaacctgggaggagactaggctgcccaggaaaacagtagtttcatttggctggaaaaatgggaagtccagattatagaaacctatggcctgactctgttgtctagattttcatcctaggaaaggcaatgagattgaacccctgcaattctaaacacagtagaaacatggctgtatttgtatctaagaaagatcattttggcctcagtttggagggtaaagaggagagttggaaaccgcattggaagaccatggcaaggagcatgaatcaagatgattaagggttgaattagagccgtggaggttgtgagagatttgagagcagtgaagaaaaaaccatctcacatggcttccaggggcctgtcttgggggacaagtgatgtcgttcacagagtacaagaaagaataggtgtgggggagtgccatgagctcagtttggaacatgcacaatccagggagtaatgtaacttacagttctggagctcgtgggagaggtatggggtcatcatatacaagcaattgttgaaactaaaaattagttgagtgattcaggaaaagtatgcaggataagacagaagtgggcaaggacctgggtagcatcagcatttaagaaaagaagaagaagaagaaaaaaaaactagtacaggtgaccaagaagaaatgatccaaagataagggagagaaaaaagagcatggtgactgagaagtcaaaggaggaaaaaggtttccaaaagaaagtcatgacaggtgcagagaggacaaataacatctgaaaagtttcactatacttaggaaccaggctgtgggtgtcctgtgccacacatttcagtggagtcattagaccaaatgaaagtgaaggctatgattataaactgttcctttaaaggactcaggctgagaacagaaggcaacagggaaacaaataattgaaaggggaaaaggttgttttgtctttcttatattgtaaaaaatcaaggcaattatagaaactggaaagaatttttaaaaagaaaagtttgaatgattgctgaaagaatatctaagagaaaagagggatgcatattcaaaaatacagttgagagactggctttgaacagagcagagaaaggcctccttatgaagggtggaaggaggtaagggagagtgcagtcacaggcaagtctgtgactcaatcttttctatgctggttggctaatgtctttaaaaataaaaaaagcaaaccttcctgctacagagaatcaatgtttcaaaaatagagaactgctgagatttattctgtctgttcccttaatcsatctacaccctgctaacctcctgaaaaatattttgagaacataagaaaaaagacgctaaatgatggggccaaatgtcccatctcgcatcctggagaatccagcatctgttcacaggcaaatgtgtagagtaagagaatgggctatggcaatggccttaatatcagggaaaaagaaaatcacccctgaactcaggactggaacaaagaaatgaaaatgaatctgaaaagcattcttccctcccacatgccacaaaacctcctgaggtttctaattctagaactgacatctcaacagaagtgagtaatctaaaagctaaatgcaatttccaagaaatgaaaaattgcagcaatttttggaaattagaattgaccaacaataaaagcattgcatatcaaacattttaagacacacctaaagttacacccagagggaaatttgtaaatctaaataaaattattaggaagatgtaatttcttcccaaactaatctataactccaatgtaatatcaataaaaattccagttgatgagctttctttctttctttctctctctctctctctctctctctctctctctctttctttctttctttttctttctttcagacagggtctcactctgtcacccaagctggagtgcagcagcacgatcatggctcactgctgcttcaatctctcaggctcaagtgattctcctgcctcagcttccagaggaactaggac

SEQ ID NO: 715776 - DNA, 2235 bp, Homo sapiens
gtcatgtcagggatgctgcagagcagactgtggctgtgcacagaagaaaggatgagagaacatggaaagaaggtgttctcaacactcagcaaccattggtcatcacttttttccaacattctaactagcattgcagtatgatgttggcatatagtaggtgcttaaacaatagcatgacacacagaagaattagtataaaaataatacttgctatttctggtttgaaatgaatattaaaactgtcccttataaggtcaactgatattgaaaataaaaagaatgstcccatactcattaggaatatacaaagcgatccaatacataatcagttctatgtctgctgtatataaaaggcctggaaaaattcttgttcaaatcaataactttaaaattgcaactatacggccattaaatccaaaactcacacttactaaaaatcgctgactgtgccatcctcagtagtgttatttctttatccaatatgaggtatttattacaaaatatcgccaatcaaagcattaaaaaaattatcagatgaatatgtgcaacaaaatttcaaaatttaattgtcaacatgaatatattaaatatcatagaagagaactcataaggaaaatttagataaatattatccacactggaaaaatatcatgattttacatcatctccaaggagctgcattattattcatcaggtagaaaaaacaaaggttgaagaaatagaagttttaattcttagtccactcaaattaatgtttaattttgttactaaggaacatagcactgaaaatgcaggctactttgagaagattctcatgctatcctgatgtaattctatacaactctggaggcaacgtatacaattgcagattacactggaaagaagggaacctccaggattttttttttttttttgagacggagtcttgttctgttgcccaggctggagtgcagtggcatgatctcagctcactgaaacctctgtctcctgggatcaagtgattctcctgcctcagcgtcccaagtagctgggattacaggtgtgtgccaccatgcccagctatttttttttatttttagtagagacggggttttgccatgttggccaggctggtcttgaactcctgacctcaagtgatccacctgtctcagcctcccaaagtgctgggattacaggcgtgagccaccacgcccggccggaatctccatgatgtttaaatgacttgtccaaggtgtaagagaatttacatataatttaaatatcatggaggttcagtttcctccactgtacaactgagacctctccccatcccctaaagctgctgtgaagaaaaaaatggcataacaaacacaaagtgataataatggtatgtggcacttagtactagatattctatatacagtatgtccacctctgtaaaaagttataggcaaagtttataacccacccttgctggtaacatctgagtttttccctcgaatccaaaaaccttatactttctttcctttctcactctcaaaatttgctctgactcaatgaactcattcacataagattcaataaattcattcacataagatacacatgaggagaattacatcaatgtcagcttgcatatgaagtctaatagattcagagtggcttcctggacagctgggttaagaggcgattcttgaaagcaggtgcactggggaagaattctgagattgatcctcaatggctttcatggaaggggacgcctgaaggtcacatatttgccattttttctgtgaaggataatggtaaatgtttctctatctgtaggcatttaagtatttaaaatattaaagcttcaagccaaaagaagaccattttatggccaggggcggtggctcacacctgtaatcccagcactttcggaggccgaggtgggcagatcaactgaggtcagcagttcaagaccagcctggccaacatggcgaaaccccgtctctattaaaaatacaaaaattagccgggcttggtggtgcatgcctgtaatcccagctactcgggaggctgaggatggcgaatcgcttgaacccaggaggcggaggttgcagtgagccgaaatcatagcattgcactccagcctgggcaccaatagtgaaactgcgtctcaaaagaaaaaaaaaaaagaccattttatatatcagcctgtgggagagcataataagaaaaagcggagggggctccctgatacctgcaaaaccatca

SEQ ID NO: 715777 - DNA, 617 bp, Homo sapiens
tgccaaggttgagaaaccctgccataaaggatttcaatgtgtgaattttcctcaatcactttttctttttccctttacattgttgtccttagtttcagttctcatcctctcctccctcatccagcctctcctcctctctcctatcaatctttctactccctccccttcttactgctaagttatttttcattctccctaccttctgctctatcattgtttaatgttccctccaaatattaycatcgtttcccatttagtgaccctccctcaaaattcccagcctttggaaaatattctccaaattgtcattccagcttggtcactaagtagctggatagccccttgggcgagtcgcttcacctctccaggccttggctttctccctgtaaatggacatagcactagatgatctctacagcccgaatttgtgattgacaactgtcttggcaatttgaatgactaacaatcctacaagaaatatcagcgtgagagagggaccctgttaaaaaaaaaaatgcactaaaagctcattggtatacagttagaaagaaaaagatgtttatgcaggtgtgtgagtatatggaaattcaatcctgccaaggcagttgaaggtaagg

SEQ ID NO: 715778 - DNA, 636 bp, Homo sapiens
tctgtcttatctactttagatggctgtcaaatagcatgtgttcattcagtcttctaatactggtggacgtgtagagatttattgagaaaagtacctgtgagggaaagggaaggaagttggaagaggccagaaagtcatcaagccaagatgcacgtccgagcgctatggaggaaagaagaaaggatggmaagttgggtttaaacaccttacatcactttgcagttctaagaaaatttcagcgaggccagtggggagtcctcaagtctcccagaaacaggtccaccttagcatttctgcctaactcagttgttggttcagagcaggctgtggggcacctgcttcttataaacagatggattttagagcacagcagctgaggctggaggtctgttaagctcccacactccaagatctgcattttcatggccaccatgtaggttaaaaggttctgaagtcctttttgaaatgggaaacaggtgactaatccaagctgtcattttaaattagcaagtgtttattgttgcttacaaagaagataagagaaggaaagaaagtactcaatttctgtactcaagttgcttacattttctaatcatgtgctccttcacctaaaatcagcatgagactagggtttaa

SEQ ID NO: 715779 - DNA, 918 bp, Homo sapiens
tttctttgagagggagtctcactttgtcacccaggctggagtgcagaggcatgatctctgctcactgcaacgtccacctcccaggttcaagggattctcctgcctcagcctctcaagtagctgagattatgggcgcccatcaccatgcccggctaattattttttgtattttagtagagatagggtttcaccatgttggccaggctggtctcaaactcctgacctcaagtgatccgccatcttggcctcccaaagtgctgggattgcaggcatgggccactgtgcctggccgatgaatacatttttaacctcctccctggtgtggtggcttaaataatgaagttaaagctgagaaacaataaatgggacttttgactactgtgatagcaaacaggcatttcagaattgtagaggtgaatgagattttagaattcatctaatccagcccatttactttttyttttcttttcttttcttttttttctgaaatggagtcttgctctgtcgctcaggctggagtgcagtggcgagatctcagcttgctgcaatctctgcctcccaggttcaagtgattctcctgcctcagcctcccaagtagctgggactacaggtgccggccaccatgcctggctaattttttgtattgttagtagagacagggtttcaccgtgttagccaggatggtctcgatctcctgaccacgtcgtgatttgcctgcctcggcctcccaaaatgctgggattacaggcatgagccaccgcgccaagcccagcccatttacttctaaaatgaggacaccaaggctagtgtgttaaatgacttatctaaggaggaacaggtagtcaaggttaagctgagatagctactcatgtctgtgactcctagtcccatggtctttggaccacgactcagaagcac

SEQ ID NO: 715780 - DNA, 629 bp, Homo sapiens
tcataaataaaatgtgcatcataaataaaatgcaaactatattttcctacagatggactaatatggttaacatttgaaaacaatgagacgaatgagtaggaagatgtggagtgttggtactcatatacgtaattcattggaatgaaaaatgatacagcgcatggcagaagtcaaaggggaagcaggcatcttcttcacgaggtggcaggaaggagaagaataaaggagcaacttccaaacacttataaaaccatcagatctcttgagactcattcagtatcacaagaacagcatgggggaaatcacccacatgattcaatcacctccctccctcaacacacaggggtttcaggtggagataagatttgggtggggacacagagccaacccatatcactgagtctagtatttacgtaaagttaagacatatagaccaaaggagtacatttcacggtccaagaataaacccttatgtttatgatcaggtcattttttacacacatagaaagacaattcaatagggaaataatagtgttttagcaaatggttctaagttscttatacacgtggaaaaattaatcctagatcattacttcagactatgcacaaaattaacttaaatggatcac

SEQ ID NO: 715781 - DNA, 1076 bp, Homo sapiens
caaactggaaattaataaatagtgatcagaggatattatttacaatcatagaggtaaattctaaaaaataattaattaaaagaattgaacatgcgagcctgtgggacggagtatgggcaactgagataccttgtaaaacccatggactctttaaattataggcaagtataactctacgataaatgaaagccaaattaaaaataaaacagtaagggaagaatataaaaatactgtaatggctataaagagtttgtatatttcctacaactcaaatctacttccaattgagcatagctttatgtggatatttacaaaagaaacaaaacaaactctgccaagatttttaatgttttctaaaatgcagtcagggcatctgaaaacacagaatcttgaaggcagactacatagagtaaatacatgtttaattaataagttactaagattgaatgacaagcatagatctgaatcttagggtacaattaatgtgatgattctgagatcctgctaatttttaggagtaaaatgcacactatatatggaatagacttctttatttgctgtacagcataacaaagccacataataattacaatttgtttctactgaatgatagagccatttggacacccttaatgtcatcaattagagtttaatgcataattaaattttacagctaataagcgcacaatgaaataaaaaggccaattgatggataatggaaattctccacttgaatagcaaaatatcatttggaaggcaatgacttctatgcaacgtcatttaagccackaagctagagtcatgagtcagattttcatttcaggtctagaaattttcatttatttctaattagctaactagattgtagctttgcaggaaaataagcggaggtgatttgtttatacactgaggatcctcagtcgtcggttaacatgtaaggagcttaaatactttacaacacatcataaatgctccataaatattatgtgtagtaatccctattccaaatctaaaggcatgtcactatttattttgcagaaagtttacaccaatggactttatgctctatatagtca

SEQ ID NO: 715782 - DNA, 582 bp, Homo sapiens
tcctacattcgccttctcagcccagtctgagattttctccaactttgagccttggctaacttattaaaaggtattttgatataccttttacctatatcaatatacctattgatatacctatacctatatacctatatacctatacctatataggtatacctatatgcctatatacctatacctatataggtatacctatatgcctatatacctatacctatatagktatacctatatgcctatatacctatacctatataggtatacctatatgcctatatacctatacctatataggtatacctatacctataacaaaaaggatttgttaatggagtacacggcctgtgttcagagtttacaagaacgtaattttacttttatcagagtttacccaaggcttaaaccatgactttatctgaaatgacaaaccatttttcttattggctctaaatatactacaggttgagcatcccaagtcttaatatctgaaacctgaaatgctccaaaatcaaaattttttaagctggtgctcggattttgaaatttgggatgctcaaccagtaataatgcaaatattcc

SEQ ID NO: 715783 - DNA, 633 bp, Homo sapiens
ttaatgatctacaaaatttctgcatacaagtttacggccacgcaaatttatttttcaaaaagctctcttgtattggtacagttttactgacacgttattttaatatgtagtatagtcatcagaaacacagtattaaaacaaatggagcttccatttgtttaaacatatacaacgaatggcaggtatgccccaaatcttatttgaacttccctatatttagttatgcctgacttcacctgataggttatactaaattatttactgggaaaagcagaacgcaactcagtatcttttgtgtgtcattactaaattgaagtctatcactttttctttaaatgccaaaggaaggaatcaagtacagcccaaatcccttctgtaggtcatatgaattataaatttattttcctattcatatttatatccaacagagcataatttcaggaaacagaattccaagtatgcacattcttgatgccttatttctattagctcctcagaataaattgcttgaaaacttttaagacaactagttaacaagtataaacctttagtttgyagctaacaggtataaaccaagttgtcatgagaagttttcaagtaaggcaaaactaatttctaagacggaaaaaaacc

SEQ ID NO: 715784 - DNA, 615 bp, Homo sapiens
ccccagctccctgggagacacmgcccacagcagcgtcacgtaattaagacataaaagtccacgatttccgctgcgtgtgggcaaacaccggccgggtgctaatgcaatcctttcttttagtggattcttgaatttaaatgatatgtaattaaacataattagccacggacgccattcggctaggtacacgtgcggagtggggctggccggattctcattacaaagcgtcatcttctatggggagacctcttgttccctctcggggctggttgcttttgcctggacaataagcctggccccagggcacctggggaaggtgtccaaggagggggtcctgggggccagtcccccgggggctcggatgatgaatcatgggcggtgtttgctggaagaatttttgttccgcttcgggcaacaaggaacccaaacctctcactgttgtggggagaaaagttggaaatcagatgggaactggctgcggtaccagagaggacgtcagacccgggccgcggcctcagcccccgactccttgtaagcgtgggctgggtgcacacgtggcggctgcgagcagtgctttggagctcatctccccagaccctagtgggagctgagggc

SEQ ID NO: 715785 - DNA, 615 bp, Homo sapiens
ccccagctccctgggagacacagcccacagcagcgtcacgtaattaagacataaaagtccacgatttccgctgcgtgtgggcaaacaccggccgggtgctaatgcaatcctttcttttagtggattcttgaatttaaatgatatgtaattaaacataattagccacggacgccattcggctaggtacacgtgcggagtggggctggccggattctcattacaaagcgtcatcttctatggggagacctcttgttccctctcggggctggttgcttttgcctggacaataagcctggccccagggcacctggggaaggtgtccaaggagggggtcctgggggccagtcccccgggggctcggatgatgaatcatgggcggtgtttgctggaagaatttttgttccgcttcgggcaacaaggaacccaaacctctcactgttgtggggagaaaagttggaaatcagatgggaackggctgcggtaccagagaggacgtcagacccgggccgcggcctcagcccccgactccttgtaagcgtgggctgggtgcacacgtggcggctgcgagcagtgctttggagctcatctccccagaccctagtgggagctgagggc

SEQ ID NO: 715786 - DNA, 615 bp, Homo sapiens
ccccagctccctgggagacacagcccacagcagcgtcacgtaattaagacataaaagtccacgatttccgctgcgtgtgggcaaacaccggccgggtgctaatgcaatcctttcttttagtggattcttgaatttaaatgatatgtaattaaacataattagccacggacgccattcggctaggtacacgtgcggagtggggctggccggattctcattacaaagcgtcatcttctatggggagacctcttgttccctctcggggctggttgcttttgcctggacaataagcctggccccagggcacctggggaaggtgtccaaggagggggtcctgggggccagtcccccgggggctcggatgatgaatcatgggcggtgtttgctggaagaatttttgttccgcttcgggcaacaaggaacccaaacctctcactgttgtggggagaaaagttggaaatcagatgggaactggctgcggtaccagagaggacgtcagamccgggccgcggcctcagcccccgactccttgtaagcgtgggctgggtgcacacgtggcggctgcgagcagtgctttggagctcatctccccagaccctagtgggagctgagggc

SEQ ID NO: 715787 - DNA, 639 bp, Homo sapiens
tgggggcctcatctggaagaggtgcatgatgctccctgcctgccttgctgggccctttgaggccccagagagagagtaggctgcgcagaagcttctccgctcaccaagtgtgctccctctgtgtgctcccaggcaccaagtgtgctcccaggctggcctggggcaggaggcagcctggggcctgcccgagcggcaggcagagcttgaacaggatttcaagggtacgcaggccagttctgcttggcgtcagctgccagcgatgggggtagggctgacactgtgcacaagtgggtgcagttcaacacctgctcccagggcagagcacaaaatccagccttctcctcagaatgatgcacaygccacagacaggacagaggctgagacagtgaggggcactcccggcgcagtcctggatatccccaaccggactgcagcaacgaggtcgaatagcagaggggagcgagggaagagctgcgcacagagggcaggggggaattccagcctttagtttcttcccagcagatgggtggggactggggaagcaaagcagggccttggagcacccgccgcctccctcgccgcacgcctgctgacgccaagaccacagacctgtcccgagggcctgattctttcaaaggc

SEQ ID NO: 715788 - DNA, 642 bp, Homo sapiens
gttgcagtgagccaagattatgccactgcgctccagcctgagcgacagagcaagactccatctcaaattaaaaaaaaaaaaaaaaagcaaaaacaagacgaggttataaaatctggcatgcttttatgtttaaaaaaaatctctcattgaaaaacaaaccatacttagtgaaaaaatacaaaaaaaaatttatcaaattgtacagtcgtctcagctgctaagattatgaggtttttttttcactgtaactatgtatttcaaattttctataaggattgtgtaggatttttataattgtaaaaaattaagtaatcatttaatttacagaggaaaaggaaaaccagaaatacacagtttagccaattttaaaaaacacataaacacagtattttttaaaaacacagaagaaaaagaaagtagcttttcaaaatctacttcagcacttttacactgtaggcctgctgtttgcggcaaawgcaacttaaagtaattgaccaacagatgtcactgttacacttcctactttaagcatctctaaagacgcacaactttatatatgggaacaaaaccaaaaactttactaattctcatgtcatctcctgcaggactgcagctttctcatctttcagcttcatttctaaa

SEQ ID NO: 715789 - DNA, 640 bp, Homo sapiens
tttttaaaggggaatgtgatttaaaggccaggaccatggccagaatctgatgttttaaaatctcaagccagctctatgcytgtgcatttttccccagattaagattgaattatgctttgaggataacaccttccactggattgcttttcacttgtctctatttttggattcagagtacaagatataaagcaagggtggcagtctgtggcctttggctatatgcacagccttccgaaataattccaaagatgtgtagaaatagcagaataacaccatgattaaaagtaacagccactgataaatgtaaaagagaaaactatttttaaaataaatagatattaaattttagagaataattcattggatatatttgttaactcaacactctgcctcatgtcattattggttgggacatgagaaaaagacaaccttttcgggttgtaattggattacaagtattatatcaaactgataaagcagagtactgaatattgaaagcgtatgttttgttttatttctttttttttttttttttgagacggagtctcgctcttgtttcccaggctagagtacagtggcgtgatcttggctcactgcaacctccgcctcccaggttcaaggaattctccttcctcagcct

SEQ ID NO: 715790 - DNA, 640 bp, Homo sapiens
tttttaaaggggaatgtgatttaaaggccaggaccatggccagaatctgatgttttaaaatctcaagccagctctatgcctgtgcatttttccccagattaagattgaattatgctttgaggataacaccttccactggattgcttttcacttgtctctatttttggattcagagtacaagatataaagcaagggtggcagtctgtggcctttggctatatgcacagccttccgaaataattccaaagatgtgtagaaatagcagaataacaccatgattaaaagtaacagccactgataaatgtaaaagagaaaactatttttaaaataaatagatattaaattttagagaataattcattggatatatttgttaactcaacactctgcctcatgtcattattggttgggacatgagaaaaagacaaccttttcgggttgtaattggattacaagtattatatcaaaytgataaagcagagtactgaatattgaaagcgtatgttttgttttatttctttttttttttttttttgagacggagtctcgctcttgtttcccaggctagagtacagtggcgtgatcttggctcactgcaacctccgcctcccaggttcaaggaattctccttcctcagcct

SEQ ID NO: 715791 - DNA, 876 bp, Homo sapiens
atcccgggagaagtatgttacagtgagccgagattgcaccactgaactccagcctgggtgacaaagagagactccatttcaaaaaaaaaaaaaaaattcatggtaatacggttttattcacaataaagtcacaaatcagttcattcagatttcacgtattttttctaaaacgttcaagtctttagtttcagttttgtgtttagagggagaacycagaagtgctcctgtgactgagtaaagctgttggtttccaggtgagcccagaggaattgtggagagtaaataaggtgtgcagcttgggcctcagctatgttctccctaggattcagacttgtctgggcatgtctggataatttgacagtcatgcccgtccagagtcttctgcttgagggctgggatgatcatcacaggacaaagctcatcttaaggaaagcaagaatttgagccacatccgagggtagcggctaccacggggagggacaacactgaaaatagcatgacgtatgttctccagattttctgttgcgccagccccatggattcatgcctggagatagggagagaggactgccataaaaaaagcagtgtgaaaatttaaagagtaatgttactaaaatttctttaggacattgaaagcaaattctgcataacaggatgtacagacttggggaagcagtgtccctattggaggtgctatggaagcacggtgtgaaagggcataatgaactagattttatccagtgtggttttattgatggtagaatgaatgagattttgtcttatcccaaggagaagcgggagaggtaggcagttgtgccttgggcaacacatctggcacctttgactacagcagccctggtgcccattttggaagca

SEQ ID NO: 715792 - DNA, 876 bp, Homo sapiens
atcccgggagaagtatgttacagtgagccgagattgcaccactgaactccagcctgggtgacaaagagagactccatttcaaaaaaaaaaaaaaaattcatggtaatacggttttattcacaataaagtcacaaatcagttcattcagatttcacgtattttttctaaaacgttcaagtctttagtttcagttttgtgtttagagggagaactcagaagtgctcctgtgactgagtaaagctgttggtttccaggtgagcccagaggaattgtggagagtaaataaggtgtgcagcttgggcctcagctatgttctccctaggattcagacttgtctgggcatgtctggataatttgacagtcatgcccgtccagagtcttctgcttgagggctgggatgatcatcacaggacaaagctcatcttaaggaaagcaagaatttgagccacatccgagggtagcggctaccacggggagggacaacactgaaaatagcatgacgtatgttctccagattttctgttgcgccagccccatggaytcatgcctggagatagggagagaggactgccataaaaaaagcagtgtgaaaatttaaagagtaatgttactaaaatttctttaggacattgaaagcaaattctgcataacaggatgtacagacttggggaagcagtgtccctattggaggtgctatggaagcacggtgtgaaagggcataatgaactagattttatccagtgtggttttattgatggtagaatgaatgagattttgtcttatcccaaggagaagcgggagaggtaggcagttgtgccttgggcaacacatctggcacctttgactacagcagccctggtgcccattttggaagca

SEQ ID NO: 715793 - DNA, 876 bp, Homo sapiens
atcccgggagaagtatgttacagtgagccgagattgcaccactgaactccagcctgggtgacaaagagagactccatttcaaaaaaaaaaaaaaaattcatggtaatacggttttattcacaataaagtcacaaatcagttcattcagatttcacgtattttttctaaaacgttcaagtctttagtttcagttttgtgtttagagggagaactcagaagtgctcctgtgactgagtaaagctgttggtttccaggtgagcccagaggaattgtggagagtaaataaggtgtgcagcttgggcctcagctatgttctccctaggattcagacttgtctgggcatgtctggataatttgacagtcatgcccgtccagagtcttctgcttgagggctgggatgatcatcacaggacaaagctcatcttaaggaaagcaagaatttgagccacatccgagggtagcggctaccacggggagggacaacactgaaaatagcatgacgtatgttctccagattttctgttgcgccagccccatggattcatgcctggagayagggagagaggactgccataaaaaaagcagtgtgaaaatttaaagagtaatgttactaaaatttctttaggacattgaaagcaaattctgcataacaggatgtacagacttggggaagcagtgtccctattggaggtgctatggaagcacggtgtgaaagggcataatgaactagattttatccagtgtggttttattgatggtagaatgaatgagattttgtcttatcccaaggagaagcgggagaggtaggcagttgtgccttgggcaacacatctggcacctttgactacagcagccctggtgcccattttggaagca

SEQ ID NO: 715794 - DNA, 631 bp, Homo sapiens
ggctcccctgcctcagaactggacctgcccaggatctcaggctaacactaagatcctcctcctggccccctggaaccaggaagcagctggcctgggggtcaggagcgagggcaggcctgagcatggcagccacagtgcctgtgcagccattgtctctaatcctcagaacraggcgtaagaaagctcccccaccgcgtggcacaggagaagccattgaagctacgaagacgcgggctgaccggcccaacgtcaccgggaagaaaaacacacgcctcctaactttgtcatcccgactgtgttcacctttcccttcaagcacttggggccaagggaagctccatggagtgggctgctcctggggaggagtcaggggacccagagaggattctgagggggcacacgcctggcccatacgtcacagatgaccctacagatgactgtaccgaagcagcagcgagagcccttgccacacgcagagttcttcccagtcacttctaccatgagcacacaatttcggcagggctgcagcatgacacccattttgtagatcaggaagctgaggccggggcagggtgaggcgtgcctggggtgcgcaatcagtgatgggggcctgaccctgatccagatctga

SEQ ID NO: 715795 - DNA, 631 bp, Homo sapiens
ggctcccctgcctcagaactggacctgcccaggatctcaggctaacactaagatcctcctcctggccccctggaaccaggaagcagctggcctgggggtcaggagcgagggcaggcctgagcatggcagccacagtgcctgtgcagccattgtctctaatcctcagaacgaggcgtaagaaagctcccccaccgcgtggcacaggagaagccattgaagctacgaagacgcgggctgaccggcccaacgtcaccgggaagaaaaacacacgcctcctaactttgtcatcccgactgtgttcacctttcccttcaagcacttggggccaagggaagctccatggagtgggctgctcctggggaggagtcaggggacccagagaggattctgagggggcacacgcctgrcccatacgtcacagatgaccctacagatgactgtaccgaagcagcagcgagagcccttgccacacgcagagttcttcccagtcacttctaccatgagcacacaatttcggcagggctgcagcatgacacccattttgtagatcaggaagctgaggccggggcagggtgaggcgtgcctggggtgcgcaatcagtgatgggggcctgaccctgatccagatctga

SEQ ID NO: 715796 - DNA, 623 bp, Homo sapiens
agtgaattaacaaatatttataaaatttgttttaatttctaatatactaaatatcattagatataatacatatcaacaaaagctctttgagatcgtcaataattcttttaagtataagggatccctagaccaaatgatctgagaactgctggtctaggggaagatgatggtacctaagtgaaagctctcaggttccacttgtgctcaagttctgccttttcagtcctctctgttttacctggttccttattatctctggacttctgttatgaacatgatattaccattaattatgaaacttaatcatatattcatatattagtttatggtatctttttttttttaagacagagtcttgctctgtcgccaggctggagtgcggtggcatgatctcagctcactgcaacctccgcctcccgggttcaagcgattctcctgcctcagcctcccgagtagctgggactacaggcgcgagccaccatgcccagctaatttttgtatttttagtagagatggrgtttcaccatgttggccaggatggtctcgatctcttgacctcgtgatctgcccgcctcggcctcccaaaatgctgggattacaggcctgagccaccatgcctggcc

SEQ ID NO: 715797 - DNA, 654 bp, Homo sapiens
tgaaatactccttgggtcatgcccatagactgctaagtgctttataatagtcaatgaagatgatactttaagatttaatctaataaatacatgtacatttgttaaagaccaaatgagtcctgactgcctacactattgctttcttctggatgctggcccaaatgggaatgagtgtggttagaagggagtgttaggtcttaattaggcagttccattgggaagcattcacccaactcaaggcaataggagcaggatgcaaatagaggtatctaggcaggcttaccatgaagccamtcaagcttaaccctcaaggcttcttattgcccttgcccttccaagactctgtgaggggccctggcgattctgcattccccaccttgcattcctgtaaaaaaaatatttcattaacacattcatcactacccatagttactgtgtgtgtgtatgtgtgtgtgtgtgtgtgagtgtggtgtgaagacacttaaaatatgctgtcatcaaattttaagtaaacagcacagtgttactaactgtagtcaccatgctgtagagtgatgttgagcacctttccatatacctgttggctacttgtatgtcttctttgaaaaattgtctattcaggttttttcccattttttaattgggctatttgat

SEQ ID NO: 715798 - DNA, 1119 bp, Homo sapiens
ttaattacatttgcaagaccttatttccaaataagttcacatacggaggtttctaatgaacatggatttttgggggatgccattcaacccactatgctgtgaaaggggaccaggaacccctattctccattgctgtgaggatgcaagttaggcaatttcttggtggagggtaaagtattgttcaaagtttcaaaggtaaaggtttgctgtggttgttttggactcaggagctgccaatgcttggcagggtggtggggggctggtaggaggagcagttaagctctggttccactggttgtttccctctctcctggaggcagctgctgacaagaggacactcatgattttctcattggctttgccctcattttagtattgagagtgtagggcttggagtcagaccaaggttcaaatcctagccatgtactagttctttgtgtttagacaaattacattatcctactagggaagaagttattgaaaatcccccctgagagatccctatagcagacactctgtggcatttagctatatcttttatgtgcttctaaatagggattttactcagcttctttcaaacaaaaacataaggactagactttacatacatggaggactcaacaagccccatgttaccatcctcaagtacaaggcacagggaaggcatggagaataacaaaacattatgtttctggaacacctgctgtataacaacccatccgtggtccctcagctggtggtgttgacccattacatgaaagagaacctgtccagggttttagtagggcatagtagggacttaggtgggcacaagcattgatgagtggataaataaatcagtgagtcagcaagataaatccagaaaaaaatgagggaaaaatggggtaagaagaaaaagagaacaggaaagagaggagaaattcagacacrtttggaggatggctggtaacaccagttctcatgggaggatttcaaagtataaatggcttaattcacctcgtagaactttgtctttcaagattctgaggaccagtgacttttctccttcttagcaagcaaaccaatgcaagattgagcaatggacacaggtagtgtctgcgtagtgagaacaagatgata

SEQ ID NO: 715799 - DNA, 758 bp, Homo sapiens
gattggctctaaataaatatgattgattttttaaagaaatatatacagtcaaatgttgctgcatcttttaagtgaataactcaggagtttgttcacttattttcatagaactgtcattattgcttttagaatggccttttgaagtctgcactacagtcttctggtgatttttgctggtaataagttcttattcctcaaaaatggcagtaatttatagaggttatgaagtcattccaagtcaaatctggtgaaccatgcagataatctgaatgcattatgacattaaaactttttaaatcaattataacaaaagtaatatgaataaattgtcttctayagctttctatttcttaagttgatattaaaataagaattccaatgataataatatatacattaataaaaatgatgattatgataatgataagattattgagcactctctctgtgccaagctcttttctgggtactctgtatccattatcttaaggaattcattacctcatagaccaataaattaagaactatcatcaccactttacaaatgagaaaatcgaggcttaaaaggttctagcagctcaaagtcacccagtacgtgggtgatggagctggattctagctcaagactgctaggctccatcacatcatactgaagcacaaccatattagtctattacaggtgtaggcctccagttcctagttatgatttaactagtagagatgactagttacataaatgttacactttgagcttatca

SEQ ID NO: 715800 - DNA, 336 bp, Homo sapiens
gcctcggcctcctaaagtactgagattgccaccacaccgggccaaaaagwtacattttattacaatcaccttacagataataaactggagctcagagtggttgagtgacttgcccaaggtcacacaactactatgacaggtctgagtgactccaaagccactgcttattgttaaagaaagggagaacaaataaataaaatagggaaggagggaggaaagggaaaggaaaaataaaaaaagagagagagacagagaaagaaacagagagagaaatcagacacttcattttagatggactgtctagcattagccatttctcccaccacaagcacccat

SEQ ID NO: 715801 - DNA, 665 bp, Homo sapiens
tcgacaactgacacagtcttcaaatggtgaaggtatttcatatagatgacattcccacagagttaagttgaaccttagacatcaacaataattaaaacaaaatgctgcatttcctaagattagaactgtccaaaaatagattgaattgttctagtaggggatactgttccatccctggaagtctgtaagctaaggactgaagcacctcttggctccaggtgctgtagagggatccaggaacctacctggaggtcacaagatgtgacaagtgacgtcccagattcctccatttcttacattctgtgattctttttttgtttgtttgatttgagacacggtccctctcagtcacccaggctggattgcagtgrtgcaatctcggctcactgcaatcttcacctcccacactcaaacaattcttgtgtgtcagcataagagtagctgggattacaggcatgtgccaccatgcctggctaattttttgtatttttagtagagatggggcttcatcatgttggtcaggctggtgtcgaactcctgttgatccacccacctcgacctcccaaagtgcttggattacaggtgtgagccacagaattctatgattctttataaggcattcatgaatcatgcagactttgagaagctagctttggcatgttgga

SEQ ID NO: 715802 - DNA, 649 bp, Homo sapiens
gaggttgaggctgcagtgagccgtgattgcaccactactgcattccagcctgggtgacagagtgagacgctgcctaaagggaaaaaaaaaaaaaaaagaatttccaagccaaagcatgggaaggtggggttttacccactgtccctcataggttgataattgctctggggagcgttaaatccctgaaactttgagattgaccattgcctctgctgagcagctcccacagtgccagagaaagccctcatacagagcatcagggaggcttgggcagcccaggtgggaagctgtcagtgtgcaggaggggcagagctgcaggtgaactcagagataggccacaggcatgtggggtggagtgccaatggcatctgtagaaaagcctcaagctctgccagctcctcctcacccttatccctctcattccctctctcccacctaactcctgggsatctgctatcactgctcctgccttctcattcttagccactgctgaagctcagtccctcattctctctctcctagaaacaataactttctgttatggactgaattttgtccactctgccccctaaaagtcatatgctgaagccctgagccccagtgtgactagtttggagatggtgcctttaaggaggcaattagcgttaac

SEQ ID NO: 715803 - DNA, 1108 bp, Homo sapiens
tcgtgggctctcttccttttgtttttcatccaaacgatcttccattattgcaatcacaatgtactcataaaaactttgttccttcttactaaagttagytgaagaaggatttttatgtgttgcgatatggacttacaattatccattttaaaaattgcatagttttcaatcaggtagatgcactgtaatttaacattctcttaactgtggacatctcatttacttttaattttttgcataaaagagtttccaatgaatgtcttatgatcatcgcgttttccattttggggggaatttctttaagataattcctggattacataatgacattgtctaaaatttggtggctttggtaagaccaattacaagggggtgttagagactaaaagccagttttcaatgggttgaagggtgagtgggggtgaagtcctagaacatttttctcctgactgtagaaaatattttcaacaaaataattgaagctataggaacaggaaagaatgattaaatgaaggaggtcctgaaaaggcaggaggggtccagaattgttgaatgcccatggaaagttaacagtaggaaaaggaacatctccccctttaagtgagggaaatcacaattgtagatatggatgcaagttagcctgttggtttagtgacaagaagttgaaggagttgcaggggtcatttgcctggaggagaacagagaatatctacaatggtcattattaagagtgaaagaaaatggactaatgataataatagcttgaaatttctcttgtgtactccatgtgattgcaagtgtgctgagtgctttttatgaattgtcccataatagttgtgtcattttccaccaattcttaatggcactaggataggcagggtgaagaatttactcaagtatgagtttttgcgaggttagtgccatggaagagcaatgctaaaaggcaattaagaatcttggcatgagagatgggtgggatcatccttctcatgtagatggtagagggtatagaagagcatgcactgttgaatattttatgcagaaataaggacaaatgtgtgccactgcattggctgaataaaccataaataaaaggacaattcggggg

SEQ ID NO: 715804 - DNA, 1108 bp, Homo sapiens
tcgtgggctctcttccttttgtttttcatccaaacgatcttccattattgcaatcacaatgtactcataaaaactttgttccttcttactaaagttagctgaagaaggatttttatgtgttgcgatatggacttacaattatccattttaaaaattgcatagttttcaatcaggtagatgcactgtaatttaacattctcttaactgtggacatctcatttacttttaattttttgcataaaagagtttccaatgaatgtcttatgatcatcgcgttttccattttggggggaatttctttaagataattcctggattacataatgacattgtctaaaatttggtggctttggtaagaccaattacaagggggtgttagagactaaaagccagttttcaatgggttgaagggtgagtgggggtgaagtcctagaacatttttctcctgactgtagaaaatattttcaacaaaataattgaagctataggaacaggaaagaatgattaaatgaaggaggtcctgaaaaggcaggaggggtccagaattgttgaatgcccatggaaagttaacagtaggaaaaggaacatctccccctttaagtgagggaaatcacaattgtagatatggatgcaagttagcctgttggtttagtgacaagaagttgaaggagttgcaggggtcatttgcctggaggagaacagagaatatctacaatggtcattattaagagtgaaasaaaatggactaatgataataatagcttgaaatttctcttgtgtactccatgtgattgcaagtgtgctgagtgctttttatgaattgtcccataatagttgtgtcattttccaccaattcttaatggcactaggataggcagggtgaagaatttactcaagtatgagtttttgcgaggttagtgccatggaagagcaatgctaaaaggcaattaagaatcttggcatgagagatgggtgggatcatccttctcatgtagatggtagagggtatagaagagcatgcactgttgaatattttatgcagaaataaggacaaatgtgtgccactgcattggctgaataaaccataaataaaaggacaattcggggg

SEQ ID NO: 715805 - DNA, 570 bp, Homo sapiens
ctcatcttatatttttatagagctgaacccatgaaaccttgacaaagtggaattgtggatgccctgtagtgtttccacacatgctcttgactacttgccatatgcataggtacccctgtagttttccccaaatcgtagctcacattccaagtgacatcctctgcttgaactccatctacagcctacacgtattctagctttagaaacaatggccacctgttctattttcccctacatttctttattacatactgttagggtagagtgatgaaaggaagggagagacgagtagggggttcaacagttaagacaggtttattgagagtaaacctgagaagggcttctggccatcagggtcaggagcaaacttctcttacagyataaggctttttaaaaaggcccagtgggggaagtgtgctctaagaggggttcctatcagggaggggttgggaaagtgctggctagacttggataagctatgttagctgtgttgcgattagagtcattatgttctgttgaagatgtgggtggggctgacatttgcagtttagtcaggtagcaacagacagt

SEQ ID NO: 715806 - DNA, 815 bp, Homo sapiens
ttgatctgggatgacttcatactgttgcaactaagatggagacttagaagtaaaataacattgttttaaatggatataactgacaaattattatgctcttctgcaatttctttgtcattttactttcagccttaacaactttttcccctatttaatgaaagcccacaatgggagataataatactacaaattagtgrcctaatattctgtcatgagctcactgtttaatgggggagctccagatggtgatcattttccattttagaaatttttttatattgatgattttaagaaaaaaacaaaagattttttaactagtccagcaatattttaattagattcctgaatatattacttggaattctaagtgtcactttcagaatcattttatttaagataatattcatttctttggttatttttattagcctagacttgtgtaattctaccaaagtgaaaaatttgaagtttaaggaaaaagcatctaatgctatacttgccatataaatttctcgcttagttatccaggccctagaacgtcgttggcattcacaaatgtttatttaataatgttgtgttaccagaagtccaaatattgccactcagagctataatgcaagtgtgcttctttaatgaatggttcgtattaaaaatgttagaatgcctttcagatgaaaaacactttgaattcagaagatcattttttttctcaacaggcaggaactcattaacagaataaaactggtaactgaggcatttttcaaagaaaattatatccccgataaatgcaagctgcatatcttcttatctttgta

SEQ ID NO: 715807 - DNA, 652 bp, Homo sapiens
ttccgtctcagcctcccaaagtgctaggattacaagtgtgagccactgtacctggcctgtttgttattcttacacctctgtctgctgtatattgtttctagtcayttcatcttcctaagaattctctaaagggctaccctaaaacattctcttatacgcactatacttagaataggacaactccgtcatctggcaactacagaggtatataaatacttaaataatacctttagaaatattctaaaatgatacattataaatgagtttatcgcaaattagacaagcaaaatagcttaaagcctgtaaatacctaatctatatttacaaatacctagaacatatcaccaaatacagagtccaacacccaataagaagataatctgggttttagtcagaatttcaagaagagagtacacttgaaatagataccccatagatcagcaatgaatccgaagtaacaaccaatcactatcacaaatgattttagaaataattttttacataaaacctagtattattctatatctgaagaacttgatttgttcattaatgtaaagaacccccaaaaatgatataaattactgagaaaaacattaaagccccaaaaaaagaagtggagggagagggaagaaaagaagaagggagaatttca

SEQ ID NO: 715808 - DNA, 652 bp, Homo sapiens
ttccgtctcagcctcccaaagtgctaggattacaagtgtgagccactgtacctggcctgtttgttattcttacacctctgtctgctgtatattgtttctagtcacttcatcttcctaagaattctctaaagggctaccctaaaacattctcttatacrcactatacttagaataggacaactccgtcatctggcaactacagaggtatataaatacttaaataatacctttagaaatattctaaaatgatacattataaatgagtttatcgcaaattagacaagcaaaatagcttaaagcctgtaaatacctaatctatatttacaaatacctagaacatatcaccaaatacagagtccaacacccaataagaagataatctgggttttagtcagaatttcaagaagagagtacacttgaaatagataccccatagatcagcaatgaatccgaagtaacaaccaatcactatcacaaatgattttagaaataattttttacataaaacctagtattattctatatctgaagaacttgatttgttcattaatgtaaagaacccccaaaaatgatataaattactgagaaaaacattaaagccccaaaaaaagaagtggagggagagggaagaaaagaagaagggagaatttca

SEQ ID NO: 715809 - DNA, 652 bp, Homo sapiens
ttccgtctcagcctcccaaagtgctaggattacaagtgtgagccactgtacctggcctgtttgttattcttacacctctgtctgctgtatattgtttctagtcacttcatcttcctaagaattctctaaagggctaccctaaaacattctcttatacgcactatacttagaataggacaactccgtcatctggcaactacagaggtatataaatacttaaataatacctttagaaatattctaaaatgatacattataaatgagtttatcgcaaattagacaagcaaaatagcttaaagcctgtaaatacctaatctatatttacaaatacctagaacatatcaccaaatacagagtccaacacccaataagaagataatctgggttttagtcagaatttcaagaagagagtacacttgaaatagataccccatagatcagcaatgaatccgaagtaacaaccaatcactatcacaaaygattttagaaataattttttacataaaacctagtattattctatatctgaagaacttgatttgttcattaatgtaaagaacccccaaaaatgatataaattactgagaaaaacattaaagccccaaaaaaagaagtggagggagagggaagaaaagaagaagggagaatttca

SEQ ID NO: 715810 - DNA, 820 bp, Homo sapiens
tgaatccactgtggtttggatctgttgcctctttctcttttctgagagtagagagagctaccttcgtaaataatatttgctaacaacagcaaggcaaaaacaattatcaatgcatttgtgtctttcagggcagattggtctatcaagtccttaatttcccctctctcctttctccctcccttccctaaaggatgtgcctgtggtaggtacatctttctaccatccatcacaacttttcattctcttttctgatgttcaaatacaggtcaattctggtcatcaaacaaactgccaaaaggataagtaatgagccactcagattaaggtatgcactaataaaaatttaatatcagaaaacagcatttttttaaccattcacaattaaagtggaaagagacaaaattataaggcagccatccatggaatgatttcatgtttacaagggatccagaaaaagggacatttaaaatcactgttccagctaytgaaccaggggaactgcagtcttatcccatgagacttctaacttgctggaagatgccacaagaaaaaaagatcaaagccaatctccttgtgttaagccactgggttaggctgagtatatctagagaattcctaaatggttgtctagttctttcccacaagttacacatttccttcaggcctcctgaggtgaatctagatgtctcaggtacaaagaggttttaatttcacagcatctccaacagtgcactttgggtgatgtggaccattctgtattgagcagaaattttctaatggaaggaaggttcctctgcagaacaactacagaggattttca

SEQ ID NO: 715811 - DNA, 930 bp, Homo sapiens
  misc_feature 830, 831, 832, 833, 834, 835, 836, 837, 838, 839, 840, 841,842, 843, 844, 845, 846, 847, 848, 849, 850, 851, 852, 853,854, 855, 856, 857, 858, 859, 860, 861, 862, 863, 864, 865,866, 867, 868, 869, 870, 871, 872, 873, 874, 875, 876: n = A,T,C or G
  misc_feature 877, 878, 879, 880, 881, 882, 883, 884, 885, 886, 887, 888,889, 890, 891, 892, 893, 894, 895, 896, 897, 898, 899, 900,901, 902, 903, 904, 905, 906, 907, 908, 909, 910, 911, 912,913, 914, 915, 916, 917, 918, 919, 920, 921, 922, 923: n = A,T,C or G
  misc_feature 924, 925, 926, 927, 928, 929: n = A,T,C or G
tggttgaaatgttttttaacgtcgacggtagactgaaaagttaaagatgtctatwtgagggccaagcatggtggctaatgccaataatctcagcactttgggaggccaaggcaggaggatcacttgatgccaggaattctagactgcagttgagcaacatagcaagaccctgtctctacgaaataaaaatttaaacattagccagatgtggtggcatgtgcctgtagtcctaactactcaggagactgaggcaagaggatcactcaggcccagaagttcacggcttcagtgagctatgattgcactccagcatgggtaacagagtgagaacttgtctcacaataaaataaagatctctatttgtaaaccctagagaaatcactttaaaaaaaaagaatccaaaagaagataggatatcaggataatgtggaaacctgcggttggaggagttgccatggtaatgttaactcccaccttcatctacaggcttttgttgtggaggcttttgttttactgtgtgccaggaccccagaacaaagaataggtgggaaaatagataacaaacagcaatatggtaaatttagacccagtcattaataatttcattaaatgtaaatggtctaaacatttcaatgaaaagactcggattgtcagactggatcatgaagcaagacaccactatatgtggtctataagaaatccactttacatgttaagacacagatacaataaaagtgaaaaggatgcggaaagtatgtcatgcaaacactaagcattagaagcaggagtggccatacttaatataagggcaggagacttcataacaaggnnnnnnnnnnnnnnnnnnnnnnnnnnnnnnnnnnnnnnnnnnnnnnnnnnnnnnnnnnnnnnnnnnnnnnnnnnnnnnnnnnnnnnnnnnnnnnnnnnnnc

SEQ ID NO: 715812 - DNA, 930 bp, Homo sapiens
  misc_feature 830, 831, 832, 833, 834, 835, 836, 837, 838, 839, 840, 841,842, 843, 844, 845, 846, 847, 848, 849, 850, 851, 852, 853,854, 855, 856, 857, 858, 859, 860, 861, 862, 863, 864, 865,866, 867, 868, 869, 870, 871, 872, 873, 874, 875, 876: n = A,T,C or G
  misc_feature 877, 878, 879, 880, 881, 882, 883, 884, 885, 886, 887, 888,889, 890, 891, 892, 893, 894, 895, 896, 897, 898, 899, 900,901, 902, 903, 904, 905, 906, 907, 908, 909, 910, 911, 912,913, 914, 915, 916, 917, 918, 919, 920, 921, 922, 923: n = A,T,C or G
  misc_feature 924, 925, 926, 927, 928, 929: n = A,T,C or G
tggttgaaatgttttttaacgtcgacggtagactgaaaagttaaagatgtctatttgagggccaagcatggtggctaatgccaataatctcagcactttgggaggccaaggcaggaggatcacttgatgccaggaattctagactgcagttgagcaacatagcaagaccctgtctctacgaaataaaaatttaaacattagccagatgtggtggcatgtgcctgtagtcctaactactcaggagactgaggcaagaggatcactcaggcccagaagttcacggcttcagtgagctatgattgcactccagcatgggtaacagagtgagaacttgtctcacaataaaataaagatctctatttgtaaaccctagagaaatcactttaaaaaaaaagaatccaaaagaagataggatatcaggataatgtggaaacctgyggttggaggagttgccatggtaatgttaactcccaccttcatctacaggcttttgttgtggaggcttttgttttactgtgtgccaggaccccagaacaaagaataggtgggaaaatagataacaaacagcaatatggtaaatttagacccagtcattaataatttcattaaatgtaaatggtctaaacatttcaatgaaaagactcggattgtcagactggatcatgaagcaagacaccactatatgtggtctataagaaatccactttacatgttaagacacagatacaataaaagtgaaaaggatgcggaaagtatgtcatgcaaacactaagcattagaagcaggagtggccatacttaatataagggcaggagacttcataacaaggnnnnnnnnnnnnnnnnnnnnnnnnnnnnnnnnnnnnnnnnnnnnnnnnnnnnnnnnnnnnnnnnnnnnnnnnnnnnnnnnnnnnnnnnnnnnnnnnnnnnc

SEQ ID NO: 715813 - DNA, 1535 bp, Homo sapiens
ttcagaaaataaatggaaaataaggatgttcaaaactgagagcagagccatatagaagtagcaaaattaaatattttatactggtaacacaatctttaataagaaaaatgacagaactgctaggaaaaaattaaattaaataattaagtaataaataaagattagagacattagaaaaaagagcaagtcattgtgatatgcctcatttgtattattcaggcacaaaaacctaggagacaaatacacatttaggtatatgaccaaagaaaatttttctgaagtaaagaaagaattaattcttctgcttaaatgtgacctctgtgtctcaaggaaaaaactctacagaaaaccaatatcaagaaaaagtacaatgaagttaaatttcaaagaatcagaaaagacagtatggattcaggcaaaaagacaaggaaaagacagcaagctcatctcagatttctccagtgcaacattcaattgctagaagacactggaacaagaaataaattctgattaaaatgtatcacccaggaaaactcaatgcagaaacatttttatttaagtataaatgcaatgcttagtatgctaaaactcataagatacagaatttctcagacccttggaaaaataattttaagttaccacagatttcaaaaaastagaagagtgttaattaggcaatgaagaagtagcggttgcagggttgagagtgagttctgcattatttttgaaatctaacaaaataagataattctaactatggaagcttgtgttgaatatcaattttggaaatagaaaaataatataatatcattaaaaagagtaaataaatgtcaaaagaagaaaatgttggtaactccggcttttatgaaaaaataatatcgtattaaaaatcaataactatggaaacaataaatgtgttcattttaaattttgcagatgaagacaaacactaactcattaaataaataaattaattaataatagagaacaaatcaagttaccagaaagaaaaagctacatttcaccaaatcaaagcctccatcaatgttttaatgatatacccaaaattttatatcataaaggaaagaaaatagatgctattagttaaactatcaaaattttctccatttttgaaaatcttcttttcttaggtcctatgaaacccttcctcggtgctttgatagtaaatataaaattcattcattcttccaataatggatattgacctcactaatatcaaaattttactcattcctattttatttctggaatattttgggtacaaaataacttagttttattttaatgctaaattataatgtaatcttttcagagacatatttagagttaaactcaacatgcctagtacacaaattccagtaacttattataactaatgaccatatgtacagcatgaccaagttcaactatacaagtcagtaataaccaaatttggactacagtttaaccgaaatggttgtaagatgtatttttattatggagatatctaaatgtagggaaaaatgtatcttaga

SEQ ID NO: 715814 - DNA, 615 bp, Homo sapiens
ctgtttatgcctgcttctggtctacaaattcagctagagggacagaaagagtccttgagttcccatgtgttttattttctaagggaaaacattatagaggattcatttacctgtcaggctttctgatgttatatatttccctgggagctaggtaaaaatgatgaaataaaaattgtttggagattcaatggtttagaattttagcacactttccttttctatccttaatagctctgtgaacacaaacttctctggagctacagtttctccaaaaatgacacttttctgtgggaagttacatatgrtagtgtattagtctgttctcacactgctaataaagacatacctgagactgggtaatttataaaggaaagaggtttaattggctcacagttcagcatggctggggaggcctcaggaaacttcttatggtggaaggggaagaaaacatgtccttttcacatggtggcaggaaggagaagaatgagagccaaatgaagggggaagccccttataaaaccatcagatctcatgagaacttactatcacaaggctagcatggggaaactgcccccatgtctcatttaccgcccaccaggtccctcctaccacacg

SEQ ID NO: 715815 - DNA, 945 bp, Homo sapiens
tatctatcagcaaatccaaaatgaaagatatgatcaaagtatgattaagctgcctcagaaacatgagccagtaatgctgtcacggaaaaaactattacatcatggaattgtttactgtgatctagggttgaagcatttcaatacttttcaacttgcaactgaggatgccaactgaagcatatagcatgacagcagcagaaacattagactcaatgtcaggcagaacatcgtatgtttcatttgcttgcttatgtttaagttttaaaattcgcatgaaacttgttattggtaccaacagaggacttacatcatgcccccctaacagctccctggtagtttgtgttatactttcatccytacacagaccaaataaatacaggtaaactggtttattttgttatccaagcaaatttgaaaaggatgtgagtttagaaagacatattctgaaatcagaaggaataggttgtgtatgggaatggccaatttatcttagctgaaggagaagttctatcaaatttagtaatttaaaaaaaaatagtttgggattttttgtccttattttctctttccctttgcttacccagactctccatccagtcagccagaaaattcagtattctttgcttcagggaataactataatttcacagagcagagaataagtacttttttttcccctcttttaagtttccattgtgtaggttttaaggaactagaaagaacacttgactgaaaaaagaaaaatgatcatttagaaaaatatcatgaataaaatgttaaacaaatgtttagaggtcagacactcaattgtttttaaataaaaaatttgattagaaaagtgcagtacataattgagaagaagcccaggaacctattattgtcgttttcaattgttggtttgagttcctaaagttctaatcacattgaattttaaatgaaaatgac

SEQ ID NO: 715816 - DNA, 945 bp, Homo sapiens
tatctatcagcaaatccaaaatgaaagatatgatcaaagtatgattaagctgcctcagaaacatgagccagtaatgctgtcacggaaaaaactattacatcatggaattgtttactgtgatctagggttgaagcatttcaatacttttcaacttgcaactgaggatgccaactgaagcatatagcatgacagcagcagaaacattagactcaatgtcaggcagaacatcgtatgtttcatttgcttgcttatgtttaagttttaaaattcgcatgaaacttgttattggtaccaacagaggacttacatcatgcccccctaacagctccctggtagtttgtgttatactttcatccctacacagaccaaataaatacaggtaaactggtttattttgttatccaagcaaatttgaaaaggatgtgagtttagaaagacatattctgaaatcagaaggaataggttgtgtatgggaatggccaatttatcttagctgaaggagaagttctatcaaatttagtaatttaaaaaaaawtagtttgggattttttgtccttattttctctttccctttgcttacccagactctccatccagtcagccagaaaattcagtattctttgcttcagggaataactataatttcacagagcagagaataagtacttttttttcccctcttttaagtttccattgtgtaggttttaaggaactagaaagaacacttgactgaaaaaagaaaaatgatcatttagaaaaatatcatgaataaaatgttaaacaaatgtttagaggtcagacactcaattgtttttaaataaaaaatttgattagaaaagtgcagtacataattgagaagaagcccaggaacctattattgtcgttttcaattgttggtttgagttcctaaagttctaatcacattgaattttaaatgaaaatgac

SEQ ID NO: 715817 - DNA, 945 bp, Homo sapiens
tatctatcagcaaatccaaaatgaaagatatgatcaaagtatgattaagctgcctcagaaacatgagccagtaatgctgtcacggaaaaaactattacatcatggaattgtttactgtgatctagggttgaagcatttcaatacttttcaacttgcaactgaggatgccaactgaagcatatagcatgacagcagcagaaacattagactcaatgtcaggcagaacatcgtatgtttcatttgcttgcttatgtttaagttttaaaattcgcatgaaacttgttattggtaccaacagaggacttacatcatgcccccctaacagctccctggtagtttgtgttatactttcatccctacacagaccaaataaatacaggtaaactggtttattttgttatccaagcaaatttgaaaaggatgtgagtttagaaagacatattctgaaatcagaaggaataggttgtgtatgggaatggccaatttatcttagctgaaggagaagttctatcaaatttagtaatttaaaaaaaaatagtttgggattttttgtccttattttctctttccctttgcttacccagactctccatccagtcagccagaaaattcagtattctttgcttcagggaataactataatttcacagagcagagaataagtacttttktttcccctcttttaagtttccattgtgtaggttttaaggaactagaaagaacacttgactgaaaaaagaaaaatgatcatttagaaaaatatcatgaataaaatgttaaacaaatgtttagaggtcagacactcaattgtttttaaataaaaaatttgattagaaaagtgcagtacataattgagaagaagcccaggaacctattattgtcgttttcaattgttggtttgagttcctaaagttctaatcacattgaattttaaatgaaaatgac

SEQ ID NO: 715818 - DNA, 945 bp, Homo sapiens
tatctatcagcaaatccaaaatgaaagatatgatcaaagtatgattaagctgcctcagaaacatgagccagtaatgctgtcacggaaaaaactattacatcatggaattgtttactgtgatctagggttgaagcatttcaatacttttcaacttgcaactgaggatgccaactgaagcatatagcatgacagcagcagaaacattagactcaatgtcaggcagaacatcgtatgtttcatttgcttgcttatgtttaagttttaaaattcgcatgaaacttgttattggtaccaacagaggacttacatcatgcccccctaacagctccctggtagtttgtgttatactttcatccctacacagaccaaataaatacaggtaaactggtttattttgttatccaagcaaatttgaaaaggatgtgagtttagaaagacatattctgaaatcagaaggaataggttgtgtatgggaatggccaatttatcttagctgaaggagaagttctatcaaatttagtaatttaaaaaaaaatagtttgggattttttgtccttattttctctttccctttgcttacccagactctccatccagtcagccagaaaattcagtattctttgcttcagggaataactataatttcacagagcagagaataagtacttttttttcccctcttttaagtttccattgtgtaggttttaaggaactagaaagaacacttgactgaaaaaagaaaaatgatcatttagaaaaatatcatgaataaaatgttaaacaaatgtktagaggtcagacactcaattgtttttaaataaaaaatttgattagaaaagtgcagtacataattgagaagaagcccaggaacctattattgtcgttttcaattgttggtttgagttcctaaagttctaatcacattgaattttaaatgaaaatgac

SEQ ID NO: 715819 - DNA, 837 bp, Homo sapiens
taaaaaatgtttcatacatttacaaaataacaaacacatgtttaaataattcttgagtcagagaagaagtcatagtgataactacaatacttggaactaaatgatacagacaatattatgtatcaaaacttgtgaaataactgtgaggaattcccctcttcccctagccaccaaaattcataatgacgcgtaagtagcaatatggttttcattgtaatgatgacatttgagccactaaaaatatctcctcaataattgaatgcttgtttccaatttctactgctttctttggaaaagacattatttttgaactatgcgctcatgcaaacttttacctcctgtgttgcagcacctatcccatcagactgtaaattatcygctttatgtgttcatcactcactgtggaatataaagttgatggacttgacaattagtgttatgagttattcaacttctttatcagagtacatagtaggaactaaaaaaattttttaactattttgaaaatctaaatataaaactttttttaaagtttctaaatggttatatttcaaaataaaaagatgaaaaattaagtatccacattaagatgttagcaacagaacaacagaataaattcaaagaaaatagaaaatagaaaaaatatagaaaagatgaaagtaaattctattaaactttcaaggataacatcccattcttataaaaagtatcctagaaaataaaatgcaaccattcttttagctcactttatgaaagcaaaattagacaagcatagtgactaaagaaaaacaacagtccattttgattcataaacatagctagaaaaagactttctta

SEQ ID NO: 715820 - DNA, 837 bp, Homo sapiens
taaaaaatgtttcatacatttacaaaataacaaacacatgtttaaataattcttgagtcagagaagaagtcatagtgataactacaatacttggaactaaatgatacagacaatattatgtatcaaaacttgtgaaataactgtgaggaattcccctcttcccctagccaccaaaattcataatgacgcgtaagtagcaatatggttttcattgtaatgatgacatttgagccactaaaaatatctcctcaataattgaatgcttgtttccaatttctactgctttctttggaaaagacattatttttgaactatgcgctcatgcaaacttttacctcctgtgttgcagcacctatcccatcagactgtaaattatctrctttatgtgttcatcactcactgtggaatataaagttgatggacttgacaattagtgttatgagttattcaacttctttatcagagtacatagtaggaactaaaaaaattttttaactattttgaaaatctaaatataaaactttttttaaagtttctaaatggttatatttcaaaataaaaagatgaaaaattaagtatccacattaagatgttagcaacagaacaacagaataaattcaaagaaaatagaaaatagaaaaaatatagaaaagatgaaagtaaattctattaaactttcaaggataacatcccattcttataaaaagtatcctagaaaataaaatgcaaccattcttttagctcactttatgaaagcaaaattagacaagcatagtgactaaagaaaaacaacagtccattttgattcataaacatagctagaaaaagactttctta

SEQ ID NO: 715821 - DNA, 837 bp, Homo sapiens
taaaaaatgtttcatacatttacaaaataacaaacacatgtttaaataattcttgagtcagagaagaagtcatagtgataactacaatacttggaactaaatgatacagacaatattatgtatcaaaacttgtgaaataactgtgaggaattcccctcttcccctagccaccaaaattcataatgacgcgtaagtagcaatatggttttcattgtaatgatgacatttgagccactaaaaatatctcctcaataattgaatgcttgtttccaatttctactgctttctttggaaaagacattatttttgaactatgcgctcatgcaaacttttacctcctgtgttgcagcacctatcccatcagactgtaaattatctgctttatgtgttcatcactcactgtggaatataaagttgatggacttgacaattagtgttatgagttattcaacttctttatcagagtacatagtaggaactaaaaaaaytttttaactattttgaaaatctaaatataaaactttttttaaagtttctaaatggttatatttcaaaataaaaagatgaaaaattaagtatccacattaagatgttagcaacagaacaacagaataaattcaaagaaaatagaaaatagaaaaaatatagaaaagatgaaagtaaattctattaaactttcaaggataacatcccattcttataaaaagtatcctagaaaataaaatgcaaccattcttttagctcactttatgaaagcaaaattagacaagcatagtgactaaagaaaaacaacagtccattttgattcataaacatagctagaaaaagactttctta

SEQ ID NO: 715822 - DNA, 2806 bp, Homo sapiens
  misc_feature 1979: n = A,T,C or G
gtactcaccacagttcaatatttcttgccaacctctgaaaaatcaaagccatgaaatacagacaaagggattccaggtcattggacatgattttaggctacctctgacaaaagcaacagcaaattgagaaaacattttttattaaacacttacattgcctcagcatagtcctaagcattttatatgtattaggtcatttaattctctggacaactccatgatacagttgtcattattattgacttttttttgccacagatgaggaaatcgagtcccagaaaacttaaattaactgtccaaaatgacaggaagtaagtagttgtgccaagattcaaatccaggccgtcttttttccagagtccagtcttttaactacaatatgctgctacctctcattaacagtcatagctaacattatttatgcacactctaggtctttcctaagttcttagcaaaagtggggtcactctttataaagtgctcttcagactgtgaaataaccttaccttcctgggtaccgtgatttgaatgttgctgtcccctgcctcaaaattaatatgttgaatctaacccccaaaatggtattaacaggtgaggctttggggacataattaggtcacgagagatgagccctcatgaaaggaattagtgcccttataaaagaagaggctcaagcaagtttccattcctcttccaccatgtaaggcaacagccagaaggtgccatctatgaaaatgcaggccctcatcagactctgaatctgccagcaccttgatctcatatttctccacctccagaactgtgagaaatacatttctgctgtttataaagtaccagtttatgtattttgttacagcagcccaaatggactgtgtattcaattgatgttaaagtggtagtacctggaggtatagtcttcagttcatattttcatggtggactataggaatgaagaggcagaaatataatgtagctgtttgaaatgggtgtctttggttcacacaacaaatattttcagttaaccattccctttacaaaactgacaaaaatgggacaagaatggcatttcaatttactatgatttattactttgttaataattattttatcccatttggcaatccctttttatatgctcagtttaatagttaaatattacataaagaaacagcttaagccatctgtaggaaaatttaacctaaacgcaatgtggtttatgttcactgctttttatactgggattattcaaaaattatttaaatcattcagttcagaaccctgattcaaattataactggagtgagaaaatggataaggaatctcaaggtagcatatgagaaaagaggtatgtatatagcaagagataaatcaaatattgctttaagaaagaaaaaaatggttttcattgcttttagtgtattaaaacatgttgcaggttttggaggatatctgagtatgagtaagaataagacaaggagatgaaatttctctgcttgagaaagtaatagcaatgtggagatttcccatttggtagcctggtggaagtagtaaaagatatcagactaggaggctcaaagagatggtgacaagctgaggtctaatgaagcacgatagtcagcaagaaatttcccttggtatggaagacataataaatatttaagacagtggtttctacttaaattttttttctgtgggctctaattatcctttactacacctttggtaagtgtccgtaatatacaatagcctatgtaagcaatgatttacaaaaatgaagggaaggatcaagccatttgggtttggcatgacagcagttgcaggagcttagggtgatgatgagaatgagcttaaaatgatgaagtcaaatgtagcaccttccttgaggaggatttcaagaccctctatattgatggcaatatagagatgaccccagaaagttagaccagccgatctctctctctctctctctctatcggtcnatctatctatctatcatctatctattgagacaatgcagacagacagaaagggaggaagagagtttattttccttaaggaattttaattattttcacaaagggcctacagagaaagatgcccaccctgcccacccccactaccccactctcacttccacaattactacggaaagagatcaaattaacacatggaactaacacagcagacaatttccacagtagtcactgcatcaagacagagaccaagattccaaactagaaatataataatcacattattaccttttctctaataaaacaatgacctcaatccagtggttttattcaaaataaaattaaaaattatttcatttggcctgtaattatttatatttttatgccaataataaattgttattatgtagaagaaggaaaaggaaccaattttaaatagatttgttacttttaaagtctggctgtgtattggcttttattttgtagccaggatgtccatgactacatgcataaattgagtaatgagatatcttagtccattttctgctgctgtaacagaatacttgtgactaggtaatttataaagaacagatatttatttcttacttttctggaggctggaaggtccaagatcaaggagcccatcttgagagggmcttcttattgtgtcatcttgtggcaaaaggcagaagagcaaaaaagaacaaaagggctgaactcacttctacaacaaacctactccgatcattaaaccaccccagagataacagcatttatctacccatgagggcagagtcctcatgatctaatcatctcatgaaggtctgacttct

SEQ ID NO: 715823 - DNA, 654 bp, Homo sapiens
cccatcacccattagtgcatgagacccataattagggtcacaaatgtcaagtatgttccacagggagaaaagcaaagtccaatccagaaggacatggtttataggagagaaaaaaaagagagagggaagaaaaatgataaaaagggcaatactcaccaattcaaagtaccagaaacatgggtaaatgtagtgcatgaatcctaagaacattacaccacagagcacagaattcaacactgaataaggctgaccccatccatgtgagagcacttacagagattctagctgaatgtgctgatttgggcaccatggagcagctctcacagtttgcatggatggtggagtgaatttgaacttaatgatggctcacatctgaagaggccagactctcctgctctctgtgatggacttgttcagggaaatstctgcatcccagagaacatcttcttccaccatacccaggacaccatcttggttgaatctggtgagcaagcacagcaagaaccctaaatgtcttaatgagacacatgtgtggcaaagagtgaacaataaaccccatgaaatctcgaggcccatgccttggggaggtttctcatggccctgtggtctgaagcatgtttgggcatttcttccaaagtgaaacagaagttgtta

SEQ ID NO: 715824 - DNA, 641 bp, Homo sapiens
tttttgagacgtagtctcgctctgttgcctaggctggagtgcagtggcgcaatctcggcttactgcaagctctgcctsccgggttcatgccattctcctgcctcagcctcccaagtagctgggattacaggtgcccgccaccacgcccggctaattttttgtatttttagtagagacggggtttcacagtgttagccaggatggtctctatctcctgacctcgtgatccgctcgtctgggcctcccaaagtgccaggattacaggcgtgagccaccacgcccggcctacatttttcaaaatttaactcaatcttttatgtttaaaaatgtgcatatactgcctgttcaagtacttaatctttgtatttattatttgaaattggaagtccatctttttagattgttaggaggtcttcacatatttgaatgagttattaagttgatacaactattttggaaaaataattatcattatctactaaatttaaacacataatttatgaccagcagtttcaacagagacacctggatgttcatcaggatagaatggattggaaagctccatattcattcaacagggtgctacacaaaacaaaaaggaatgaaacactggtccataacataaatagatttcacaaatg

SEQ ID NO: 715825 - DNA, 641 bp, Homo sapiens
tttttgagacgtagtctcgctctgttgcctaggctggagtgcagtggcgcaatctcggcttactgcaagctctgcctcccgggttcatgccattctcctgcctcagcctcccaagtagctgggattacaggtgcccgccaccacgcccggctaattttttgtatttttagtagagacggggtttcacagtgttagccaggatggtctctatctcctgacctcgtgatccgctcgtctgggcctcccaaagtgccaggattacaggcgtgagccaccaygcccggcctacatttttcaaaatttaactcaatcttttatgtttaaaaatgtgcatatactgcctgttcaagtacttaatctttgtatttattatttgaaattggaagtccatctttttagattgttaggaggtcttcacatatttgaatgagttattaagttgatacaactattttggaaaaataattatcattatctactaaatttaaacacataatttatgaccagcagtttcaacagagacacctggatgttcatcaggatagaatggattggaaagctccatattcattcaacagggtgctacacaaaacaaaaaggaatgaaacactggtccataacataaatagatttcacaaatg

SEQ ID NO: 715826 - DNA, 1094 bp, Homo sapiens
caaaaaaaaaaaaaaaaagaaagaaagaaagaaaaaaaaaaagaaaagaaaaaaaaggtggggcatggtggctcatgcctgtaatcccagcactttgggaggccaaggcgggtggatcacaaggtcaggagatcgagaccatcctggccaacatggtgaaacctggctctactaaaaatacacaaaattagccgcaggcacctgtactcccagctacttgggaggctgaggcaggagaatggcatgaacccgggaggcagagcttgcagtgagccgagatggcgccactgcactccatcctgggggacagagcgagactccatctcaaaaaaaaaaaaaaaaaaaaaaattaaccatcacagaggagcagagaaaaaccttctcaaagacagaagtcattgatttatttccatcccggcacaagccccttaattctgtaacttgtccagaatggtttcctgtcactgtagattctgcatcagaacatcctcttatgcaaagctaaaaaactccaaaccacctctgttaactgtgcggtgctccatggtttcacacagtccagagctgcttgtgtttatcaaaaatgaagcwgaaaacaaaattcttccttcacacaaccactacattccattgcacatttaccaaagacatttaccacattggcattatttgtgcatccatcaagaagtgctgaaaagcattcccctcacacactgcatgtgtcctgtgagtggatcttccattttacttgccagttctggaaaactttgaatttgtgtgtcgatggaaaattaaagtttagtggcatctttgccccacattcacccaacttttctaaggaactatttcaatgctacttttcactagtgtcacttttcagtcttagcctcctggagtacaactttattagaagcccgcaaagcactagtgttaaaatgagaaatagtaaacatctgattctgttgtgttttaactccatgcttttctctaatgtttcattgttttgaatttaattctttgtgcttcccacgtgaatgcaacttacagtttgaatgtcttctttcttcactagccgatgcatctgtgccagtaac

SEQ ID NO: 715827 - DNA, 1094 bp, Homo sapiens
caaaaaaaaaaaaaaaaagaaagaaagaaagaaaaaaaaaaagaaaagaaaaaaaaggtggggcatggtggctcatgcctgtaatcccagcactttgggaggccaaggcgggtggatcacaaggtcaggagatcgagaccatcctggccaacatggtgaaacctggctctactaaaaatacacaaaattagccgcaggcacctgtactcccagctacttgggaggctgaggcaggagaatggcatgaacccgggaggcagagcttgcagtgagccgagatggcgccactgcactccatcctgggggacagagcgagactccatctcaaaaaaaaaaaaaaaaaaaaaaattaaccatcacagaggagcagagaaaaaccttctcaaagacagaagtcattgatttatttccatcccggcacaagccccttaattctgtaacttgtccagaatggtttcctgtcactgtagattctgcatcagaacatcctcttatgcaaagctaaaaaactccaaaccacctctgttaactgtgcggtgctccatggtttcacacagtccagagctgcttgtgtttatcaaaaatgaagctgaaaacaaaattcttccttcacacaaccactrcattccattgcacatttaccaaagacatttaccacattggcattatttgtgcatccatcaagaagtgctgaaaagcattcccctcacacactgcatgtgtcctgtgagtggatcttccattttacttgccagttctggaaaactttgaatttgtgtgtcgatggaaaattaaagtttagtggcatctttgccccacattcacccaacttttctaaggaactatttcaatgctacttttcactagtgtcacttttcagtcttagcctcctggagtacaactttattagaagcccgcaaagcactagtgttaaaatgagaaatagtaaacatctgattctgttgtgttttaactccatgcttttctctaatgtttcattgttttgaatttaattctttgtgcttcccacgtgaatgcaacttacagtttgaatgtcttctttcttcactagccgatgcatctgtgccagtaac

SEQ ID NO: 715828 - DNA, 1094 bp, Homo sapiens
caaaaaaaaaaaaaaaaagaaagaaagaaagaaaaaaaaaaagaaaagaaaaaaaaggtggggcatggtggctcatgcctgtaatcccagcactttgggaggccaaggcgggtggatcacaaggtcaggagatcgagaccatcctggccaacatggtgaaacctggctctactaaaaatacacaaaattagccgcaggcacctgtactcccagctacttgggaggctgaggcaggagaatggcatgaacccgggaggcagagcttgcagtgagccgagatggcgccactgcactccatcctgggggacagagcgagactccatctcaaaaaaaaaaaaaaaaaaaaaaattaaccatcacagaggagcagagaaaaaccttctcaaagacagaagtcattgatttatttccatcccggcacaagccccttaattctgtaacttgtccagaatggtttcctgtcactgtagattctgcatcagaacatcctcttatgcaaagctaaaaaactccaaaccacctctgttaactgtgcggtgctccatggtttcacacagtccagagctgcttgtgtttatcaaaaatgaagctgaaaacaaaattcttccttcacacaaccactacattccattgcacatttaccaaagacatttaccacrttggcattatttgtgcatccatcaagaagtgctgaaaagcattcccctcacacactgcatgtgtcctgtgagtggatcttccattttacttgccagttctggaaaactttgaatttgtgtgtcgatggaaaattaaagtttagtggcatctttgccccacattcacccaacttttctaaggaactatttcaatgctacttttcactagtgtcacttttcagtcttagcctcctggagtacaactttattagaagcccgcaaagcactagtgttaaaatgagaaatagtaaacatctgattctgttgtgttttaactccatgcttttctctaatgtttcattgttttgaatttaattctttgtgcttcccacgtgaatgcaacttacagtttgaatgtcttctttcttcactagccgatgcatctgtgccagtaac

SEQ ID NO: 715829 - DNA, 1852 bp, Homo sapiens
tgtagagagtggcacattgttagaagcacatttatttgtaatgaactaatttgtgggttcattggttgtttcaccaaatttcattatactattcaataaatacctatataaaaaatcacaaagctttctcttttccattctcagctcagagaaatataaagcttgaaacaccattgttcccacccttataacaatgaaagagctagacagactacaaattaatgactttcttgaatacatcaaagaactgaattctcacaacatccaacccatccccagtgtgggaaagccaagagtctgcaggggaagtgtcaggagcacaygcgtaacaagggcagctaccactggacatgaaataagccagtaaaaagaattcagctgaaatgtttacttgttatcgaaggccaagtttgagctagtgtgcaaatggaaatcccttagaaattgcagatttagggaaggttcacacctcttatggactcttctccataaaccccaccagacactcacagggacgattagaaagactcctaaggaatcatgccttttgatactagctagaggaagagcatagctgaaactgctgaaactttgcctagaatcatctcatcttcctcctctatagaataaaggtattggttttcagatgaaaagacaacagattttcacctaaaaagcctggtagcccactgaagctgggttaaggaaataagggcaataaaaaagctctgtcccagggcaaaaggcatgaataagtgctaaacccaccattacaggtggagaaggggcctgagtaattgttaaaaaaagaaaacctcatcagattctcagacatagtgcctgcataagacttagactaaatcagaacacaagagattatttctaaatctcccgagtagctgggattataggcacctgccaccatgcccagctaatttttgtatttttagtagagatggggtttcaccacgttggccaggctggtctcgaactcatgccctcaggtgatccacccgccttggcctcccaaagtgctggcattacaggcatgagccaccgcacccggccctctacttccaacaagaattgggtaaaataataggaatacagagcatcaagagacaaattccttttgaagtgccaatgaaaagggaaaaacaatgggcaagggataccaacaaacaagtgtccagccagggaagtctcttcatgccctcaggcctgacacctgcctccccacagttagacacccagggcccagcctaggaaaccccttcctttacctcaggcagcaacagcagggtagctaggtgtctgcagcagcaccagataaaccaaacacatcaaatcatacctcaaaggctctgaaaacataactacttttgaaaccatagaataggccaaacctgcatgccagagctaaatagagtgaatgtctgctaaaataaaagatttaaatatgacccatcttctcctaacataagtcaaaacaactaggatacaattcagaattaccacacaaagcaagaaataagaagataacagcctgagtgagaagacaatcaactgactacaacacgtagatgaatcagtgttgcaaattaatgactttaacaattaagttaatttaaggaattaaaatttatttgaaacaaattaaaagtagaaaatctcagaaaataaatagaagttataaaaaacaataaaatgaaaacattgataaattggacttgcagtgggttgaatattgtttaaaaacaatacagaatacagaaacctcagaaacctatgtatgtatgtggtaaaattatttagaactaaatacacacacacatgcaaacacatagataca

SEQ ID NO: 715830 - DNA, 1852 bp, Homo sapiens
tgtagagagtggcacattgttagaagcacatttatttgtaatgaactaatttgtgggttcattggttgtttcaccaaatttcattatactattcaataaatacctatataaaaaatcacaaagctttctcttttccattctcagctcagagaaatataaagcttgaaacaccattgttcccacccttataacaatgaaagagctagacagactacaaattaatgactttcttgaatacatcaaagaactgaattctcacaacatccaacccatccccagtgtgggaaagccaagagtctgcaggggaagtgtcaggagcacatgcgtaacaagggcagctaccactggacatgaaataagccagtaaaaagaattcagctgaaatgtttacttgttatcgaaggccaagtttgagctagtgtgcaaatggaaatcccttagaaattgcagatttagggaaggttcacacctcttatggactcttctccataaaccccaccagacactcacagggacgattagaaagamtcctaaggaatcatgccttttgatactagctagaggaagagcatagctgaaactgctgaaactttgcctagaatcatctcatcttcctcctctatagaataaaggtattggttttcagatgaaaagacaacagattttcacctaaaaagcctggtagcccactgaagctgggttaaggaaataagggcaataaaaaagctctgtcccagggcaaaaggcatgaataagtgctaaacccaccattacaggtggagaaggggcctgagtaattgttaaaaaaagaaaacctcatcagattctcagacatagtgcctgcataagacttagactaaatcagaacacaagagattatttctaaatctcccgagtagctgggattataggcacctgccaccatgcccagctaatttttgtatttttagtagagatggggtttcaccacgttggccaggctggtctcgaactcatgccctcaggtgatccacccgccttggcctcccaaagtgctggcattacaggcatgagccaccgcacccggccctctacttccaacaagaattgggtaaaataataggaatacagagcatcaagagacaaattccttttgaagtgccaatgaaaagggaaaaacaatgggcaagggataccaacaaacaagtgtccagccagggaagtctcttcatgccctcaggcctgacacctgcctccccacagttagacacccagggcccagcctaggaaaccccttcctttacctcaggcagcaacagcagggtagctaggtgtctgcagcagcaccagataaaccaaacacatcaaatcatacctcaaaggctctgaaaacataactacttttgaaaccatagaataggccaaacctgcatgccagagctaaatagagtgaatgtctgctaaaataaaagatttaaatatgacccatcttctcctaacataagtcaaaacaactaggatacaattcagaattaccacacaaagcaagaaataagaagataacagcctgagtgagaagacaatcaactgactacaacacgtagatgaatcagtgttgcaaattaatgactttaacaattaagttaatttaaggaattaaaatttatttgaaacaaattaaaagtagaaaatctcagaaaataaatagaagttataaaaaacaataaaatgaaaacattgataaattggacttgcagtgggttgaatattgtttaaaaacaatacagaatacagaaacctcagaaacctatgtatgtatgtggtaaaattatttagaactaaatacacacacacatgcaaacacatagataca

SEQ ID NO: 715831 - DNA, 1852 bp, Homo sapiens
tgtagagagtggcacattgttagaagcacatttatttgtaatgaactaatttgtgggttcattggttgtttcaccaaatttcattatactattcaataaatacctatataaaaaatcacaaagctttctcttttccattctcagctcagagaaatataaagcttgaaacaccattgttcccacccttataacaatgaaagagctagacagactacaaattaatgactttcttgaatacatcaaagaactgaattctcacaacatccaacccatccccagtgtgggaaagccaagagtctgcaggggaagtgtcaggagcacatgcgtaacaagggcagctaccactggacatgaaataagccagtaaaaagaattcagctgaaatgtttacttgttatcgaaggccaagtttgagctagtgtgcaaatggaaatcccttagaaattgcagatttagggaaggttcacacctcttatggactcttctccataaaccccaccagacactcacagggacgattagaaagactcctaaggaatcatgccttttgatactagctagaggaagagcatagctgaaactgctgaaactttgcctagaatcwtctcatcttcctcctctatagaataaaggtattggttttcagatgaaaagacaacagattttcacctaaaaagcctggtagcccactgaagctgggttaaggaaataagggcaataaaaaagctctgtcccagggcaaaaggcatgaataagtgctaaacccaccattacaggtggagaaggggcctgagtaattgttaaaaaaagaaaacctcatcagattctcagacatagtgcctgcataagacttagactaaatcagaacacaagagattatttctaaatctcccgagtagctgggattataggcacctgccaccatgcccagctaatttttgtatttttagtagagatggggtttcaccacgttggccaggctggtctcgaactcatgccctcaggtgatccacccgccttggcctcccaaagtgctggcattacaggcatgagccaccgcacccggccctctacttccaacaagaattgggtaaaataataggaatacagagcatcaagagacaaattccttttgaagtgccaatgaaaagggaaaaacaatgggcaagggataccaacaaacaagtgtccagccagggaagtctcttcatgccctcaggcctgacacctgcctccccacagttagacacccagggcccagcctaggaaaccccttcctttacctcaggcagcaacagcagggtagctaggtgtctgcagcagcaccagataaaccaaacacatcaaatcatacctcaaaggctctgaaaacataactacttttgaaaccatagaataggccaaacctgcatgccagagctaaatagagtgaatgtctgctaaaataaaagatttaaatatgacccatcttctcctaacataagtcaaaacaactaggatacaattcagaattaccacacaaagcaagaaataagaagataacagcctgagtgagaagacaatcaactgactacaacacgtagatgaatcagtgttgcaaattaatgactttaacaattaagttaatttaaggaattaaaatttatttgaaacaaattaaaagtagaaaatctcagaaaataaatagaagttataaaaaacaataaaatgaaaacattgataaattggacttgcagtgggttgaatattgtttaaaaacaatacagaatacagaaacctcagaaacctatgtatgtatgtggtaaaattatttagaactaaatacacacacacatgcaaacacatagataca

SEQ ID NO: 715832 - DNA, 1758 bp, Homo sapiens
catatatatatacacatatatatatacacatatatatatacacatacatatttttgtgtgtgtgtagttggtaaaactcttacgtcacaaaatcctttagggagtcgctttcacaaacatagaggatctcttttggtttgcagtgaaacaagtccttaattttctccatgatctttatggctagggctgtcttcctgactcctggaaagcagtagatgaataattcacgtgtcttctgaagactctcagaaagcaactggctctgctccattatgagcaagttgaaaaattcacagcccatctggtcactcagaagagatctggaggacagggagaccaccaccagagcctgcagcaagtcttccatttcctcctcatcagcaagcctgtaggacctggggtaacgcagggggatctcaccaggtctactctgtgtgctgctcaggtgtatcagccttggaatgatgcacactttccctgtgtaaccaccaacagtttgcagtttctgctttaactgatgagctgtgtttcgggcatattcaagtcctccaggccaattggggtctattaagattgtatagagtaccacggggctgttaactgctatcaggagagcatcacacaggacattctgttctttcctgaagccaacatcaccagcccagcttctagaaaatatcacaatcccctgagaacaaggatgtatcagggtcttcattaaaccctccagttctttatgatctgagaacagcttcttacagagggattctggtttaaattgtacctcttcctgtgtcactgaaaattcaaggaatagatgttaccaaaacttacaaaagcatgtggtaagtattcctgcaacgttgcagaaaaaaatgatacctggtgcatttgggaaaataagagctttcctttagarttgtgattcttaatcaggagcagttttactccccaactctcccccatccccgcggacatttggcaatgtctggaaaattttttctttttttttgagacggagtctcgctgtcacccagactggagtgcagtggtgtgatcttggctcactgcagcctctgcctccctggttccagtgattcttctgcctcagcctctggagtagctgagattacagtcacatgccaccacacctggctaatttttgtatttttagtagagacagcgtttcaccatgttggctaggctggtctcaaactcctgacctcaggtgaggtcacccgccttggcctcccaaagtgctgggattacaggcatgagccaccatgcccggcctgagaattttttattgtcacaattggaggggagctactggtatgtagtaggtaccagataggaatgctgctaagtattctacaattcacagggctctccctcccccagcaaagagttatctgactcaaatgacaatagtgctaaggttgagaaaccctgctttagaagaagttcagataacccaatggctccttctgcattggaaagctaggggcagttttttgatggttgagacctgagaaattccctgcactctcaaatttggaaaacaaaagccatatgttatgagaagttggaaggcacacagaaatagtaatagtgggaatcagatgactggaaacaagggtcagatatatagatatataaatattatatataattatatataataattatataataaattaataataaatattaataattattttaaataagtatatatatgacccttgttttcagtca

SEQ ID NO: 715833 - DNA, 1758 bp, Homo sapiens
catatatatatacacatatatatatacacatatatatatacacatacatatttttgtgtgtgtgtagttggtaaaactcttacgtcacaaaatcctttagggagtcgctttcacaaacatagaggatctcttttggtttgcagtgaaacaagtccttaattttctccatgatctttatggctagggctgtcttcctgactcctggaaagcagtagatgaataattcacgtgtcttctgaagactctcagaaagcaactggctctgctccattatgagcaagttgaaaaattcacagcccatctggtcactcagaagagatctggaggacagggagaccaccaccagagcctgcagcaagtcttccatttcctcctcatcagcaagcctgtaggacctggggtaacgcagggggatctcaccaggtctactctgtgtgctgctcaggtgtatcagccttggaatgatgcacactttccctgtgtaaccaccaacagtttgcagtttctgctttaactgatgagctgtgtttcgggcatattcaagtcctccaggccaattggggtctattaagattgtatagagtaccacggggctgttaactgctatcaggagagcatcacacaggacattctgttctttcctgaagccaacatcaccagcccagcttctagaaaatatcacaatcccctgagaacaaggatgtatcagggtcttcattaaaccctccagttctttatgatctgagaacagcttcttacagagggattctggtttaaattgtacctcttcctgtgtcactgaaaattcaaggaatagatgttaccaaaacttacaaaagcatgtggtaagtattcctgcaacgttgcagaaaaaaatgatacctggtgcatttgggaaaataagagctttcctttagagttgtgattcttaatcaggagcagttttactccccaactctcccccatccccrcggacatttggcaatgtctggaaaattttttctttttttttgagacggagtctcgctgtcacccagactggagtgcagtggtgtgatcttggctcactgcagcctctgcctccctggttccagtgattcttctgcctcagcctctggagtagctgagattacagtcacatgccaccacacctggctaatttttgtatttttagtagagacagcgtttcaccatgttggctaggctggtctcaaactcctgacctcaggtgaggtcacccgccttggcctcccaaagtgctgggattacaggcatgagccaccatgcccggcctgagaattttttattgtcacaattggaggggagctactggtatgtagtaggtaccagataggaatgctgctaagtattctacaattcacagggctctccctcccccagcaaagagttatctgactcaaatgacaatagtgctaaggttgagaaaccctgctttagaagaagttcagataacccaatggctccttctgcattggaaagctaggggcagttttttgatggttgagacctgagaaattccctgcactctcaaatttggaaaacaaaagccatatgttatgagaagttggaaggcacacagaaatagtaatagtgggaatcagatgactggaaacaagggtcagatatatagatatataaatattatatataattatatataataattatataataaattaataataaatattaataattattttaaataagtatatatatgacccttgttttcagtca

SEQ ID NO: 715834 - DNA, 1758 bp, Homo sapiens
catatatatatacacatatatatatacacatatatatatacacatacatatttttgtgtgtgtgtagttggtaaaactcttacgtcacaaaatcctttagggagtcgctttcacaaacatagaggatctcttttggtttgcagtgaaacaagtccttaattttctccatgatctttatggctagggctgtcttcctgactcctggaaagcagtagatgaataattcacgtgtcttctgaagactctcagaaagcaactggctctgctccattatgagcaagttgaaaaattcacagcccatctggtcactcagaagagatctggaggacagggagaccaccaccagagcctgcagcaagtcttccatttcctcctcatcagcaagcctgtaggacctggggtaacgcagggggatctcaccaggtctactctgtgtgctgctcaggtgtatcagccttggaatgatgcacactttccctgtgtaaccaccaacagtttgcagtttctgctttaactgatgagctgtgtttcgggcatattcaagtcctccaggccaattggggtctattaagattgtatagagtaccacggggctgttaactgctatcaggagagcatcacacaggacattctgttctttcctgaagccaacatcaccagcccagcttctagaaaatatcacaatcccctgagaacaaggatgtatcagggtcttcattaaaccctccagttctttatgatctgagaacagcttcttacagagggattctggtttaaattgtacctcttcctgtgtcactgaaaattcaaggaatagatgttaccaaaacttacaaaagcatgtggtaagtattcctgcaacgttgcagaaaaaaatgatacctggtgcatttgggaaaataagagctttcctttagagttgtgattcttaatcaggagcagttttactccccaactctcccccatccccgcggacatttggcaatgtctggaaaattttttctttttttttgagacggagtctcgctgtcacccagrctggagtgcagtggtgtgatcttggctcactgcagcctctgcctccctggttccagtgattcttctgcctcagcctctggagtagctgagattacagtcacatgccaccacacctggctaatttttgtatttttagtagagacagcgtttcaccatgttggctaggctggtctcaaactcctgacctcaggtgaggtcacccgccttggcctcccaaagtgctgggattacaggcatgagccaccatgcccggcctgagaattttttattgtcacaattggaggggagctactggtatgtagtaggtaccagataggaatgctgctaagtattctacaattcacagggctctccctcccccagcaaagagttatctgactcaaatgacaatagtgctaaggttgagaaaccctgctttagaagaagttcagataacccaatggctccttctgcattggaaagctaggggcagttttttgatggttgagacctgagaaattccctgcactctcaaatttggaaaacaaaagccatatgttatgagaagttggaaggcacacagaaatagtaatagtgggaatcagatgactggaaacaagggtcagatatatagatatataaatattatatataattatatataataattatataataaattaataataaatattaataattattttaaataagtatatatatgacccttgttttcagtca

SEQ ID NO: 715835 - DNA, 651 bp, Homo sapiens
gccagtaaggctggagcattttgagcaaggacccattgagtggcccctttgcatcacctcagaggaaggtgcccagacatccaggtgggccaacctgtgctctttcagaaacaacacgatttagggtgcagtcgctctcagtctctcagctaccgggaagcctcttaagatccaggagcctgggaactcattatcctactttggaatctgtcacagttctagttagaagaaacctaaggctgaggttaaccatgacagccccctaattttacacataagggaactgaagccctgagaaggggaaattttttgggcttttgctttgtttctgaaaatcaagtaattggcaggtctcctggctcccagtctggcgtccaccacgctggcatcataacacactgacctcgtctcrtaactcagctctgaacacagtcgaggcattcagcaaatgcttatcggcagacttaggggctttgtgtataaagctgattcttctgcaactccatgggtaaaacataaggtctgtgttctccatccatacgttaggctgggctctgccaacctcttctctccttccagcccgttgtactaagggctcgtgtttgcagaaaaatgatgaaagttagaggaactattgctttttttattttt

SEQ ID NO: 715836 - DNA, 647 bp, Homo sapiens
ggtttttagtgggaaaaccagtggctctgatgttttgctttggggacttgccagcaggtgtttcaagaaggcagttgcctctgcccatttcaaagcccrgtgggtgctgtttccttctctaggccgagaggaggggaccctgcaaaccctgcctccttgcagagctacagaactgccctgtgcccgccgccccggctgagccgtgcgcctgcagctatgtatgtccgccgccccagctgagccgtgcgcctgcagctaggtatgcccgtcgccccggctgagccgtgtgcctgcgtcctcaccaccccagctaagctgtgtatctgggtcacaatgcccctgcaagggacttgaggaactgagatgagagcaagctcacctgttgctgtctcctgtaatagctgccattcctggcacatcattgttctatgagaatgtacaggagaaatttctgtggtttttctgtgaggaagagggaaggatttcctgagaagccagttagccttaaagaaaaagtgtgtgatagtttctttcttcccagtggctgccaggaagcttatagccaaatctgttgtccactccagtgaggatgctggacttcacagagtcttgtggctcatgaaccttgccttgtgggagcctctcct

SEQ ID NO: 715837 - DNA, 647 bp, Homo sapiens
ggtttttagtgggaaaaccagtggctctgatgttttgctttggggacttgccagcaggtgtttcaagaaggcagttgcctctgcccatttcaaagcccagtgggtgctgtttccttctctaggccgagaggaggggaccctgcaaaccctgcctccttgcagagctacagaactgccctgtgcccgccgccccggctgagccgtgcgcctgcagctatgtatgtccgccgccccagctgagccgtgcgcctgcagctaggtatgcccgtcgccccggctgagccgtgtgcctgcgtcctcaccaccccagctaagctgtgtatctgggtcacaatgcccctgcaagggacttgaggaactgagatgagagcaagctcacctgttgctgtctcctgtaatagctgccattcctggcacatcattgttctatgagaatgtrcaggagaaatttctgtggtttttctgtgaggaagagggaaggatttcctgagaagccagttagccttaaagaaaaagtgtgtgatagtttctttcttcccagtggctgccaggaagcttatagccaaatctgttgtccactccagtgaggatgctggacttcacagagtcttgtggctcatgaaccttgccttgtgggagcctctcct

SEQ ID NO: 715838 - DNA, 647 bp, Homo sapiens
ggtttttagtgggaaaaccagtggctctgatgttttgctttggggacttgccagcaggtgtttcaagaaggcagttgcctctgcccatttcaaagcccagtgggtgctgtttccttctctaggccgagaggaggggaccctgcaaaccctgcctccttgcagagctacagaactgccctgtgcccgccgccccggctgagccgtgcgcctgcagctatgtatgtccgccgccccagctgagccgtgcgcctgcagctaggtatgcccgtcgccccggctgagccgtgtgcctgcgtcctcaccaccccagctaagctgtgtatctgggtcacaatgcccctgcaagggacttgaggaactgagatgagagcaagctcacctgttgctgtctcctgtaatagctgccattcctggcacatcattgttctatgagaatgtacaggagaaatttctgtggtttttctgtgaggaagagggaaggatttcctgagaagccasttagccttaaagaaaaagtgtgtgatagtttctttcttcccagtggctgccaggaagcttatagccaaatctgttgtccactccagtgaggatgctggacttcacagagtcttgtggctcatgaaccttgccttgtgggagcctctcct

SEQ ID NO: 715839 - DNA, 647 bp, Homo sapiens
ggtttttagtgggaaaaccagtggctctgatgttttgctttggggacttgccagcaggtgtttcaagaaggcagttgcctctgcccatttcaaagcccagtgggtgctgtttccttctctaggccgagaggaggggaccctgcaaaccctgcctccttgcagagctacagaactgccctgtgcccgccgccccggctgagccgtgcgcctgcagctatgtatgtccgccgccccagctgagccgtgcgcctgcagctaggtatgcccgtcgccccggctgagccgtgtgcctgcgtcctcaccaccccagctaagctgtgtatctgggtcacaatgcccctgcaagggacttgaggaactgagatgagagcaagctcacctgttgctgtctcctgtaatagctgccattcctggcacatcattgttctatgagaatgtacaggagaaatttctgtggtttttctgtgaggaagagggaaggatttcctgagaagccagttagccttaaagaaaaagtgtgtgatagtttctttcttcccagtggctgccaggaagcttatagccaaatctgttgtccactccaktgaggatgctggacttcacagagtcttgtggctcatgaaccttgccttgtgggagcctctcct

SEQ ID NO: 715840 - DNA, 619 bp, Homo sapiens
ttcttccacgtcaacctcttgagtggctgggaccacaggcacgagctacaacacctggctaatttttgtatttttagtagagatggggtttcaccatgttggccaggctggtcttcaactcctgacctcaggtgatctgcccacctcagcctcccaaagtgctgggattacaggcatgagccaccacgcccggcctgatggcctgataagtgttttgttcgcatagtgcagagaggaggtaaatctggagaagtaattaaagaagggatattctacacagacataaagaatagygtctctttgggattgaataactggctagaacttctctatcagttgaaatcgaagctataaatagatggtggtttagcgtgtgaaaaggtgcacaacattgttagtcattaggggaatgaaagttaaaaccacactgagatacctcttcatacctattagaatgtctggaatttaaaaattgaccattgcaagtattgactggaatctggagcagctgggaccggagcatcagcaccacactgatggtgggaatgtaactggtataaccactttggaaaacatcttgcagttccttaaaatgttaaatataccccagcactttggg

SEQ ID NO: 715841 - DNA, 619 bp, Homo sapiens
ttcttccacgtcaacctcttgagtggctgggaccacaggcacgagctacaacacctggctaatttttgtatttttagtagagatggggtttcaccatgttggccaggctggtcttcaactcctgacctcaggtgatctgcccacctcagcctcccaaagtgctgggattacaggcatgagccaccacgcccggcctgatggcctgataagtgttttgttcgcatagtgcagagaggaggtaaatctggagaagtaattaaagaagggatattctacacagacataaagaatagcgtctctttgggattgaataactggctagaacttctctatcagttgaaatcgaagctataaatagatggtggtttagcgtgtgaaaaggtgcacaacrttgttagtcattaggggaatgaaagttaaaaccacactgagatacctcttcatacctattagaatgtctggaatttaaaaattgaccattgcaagtattgactggaatctggagcagctgggaccggagcatcagcaccacactgatggtgggaatgtaactggtataaccactttggaaaacatcttgcagttccttaaaatgttaaatataccccagcactttggg

SEQ ID NO: 715842 - DNA, 791 bp, Homo sapiens
gtatactctgccctaattcctatcttcccaattttctattacaaaaaataattaaaattgaattttattatgaaaatattataaatggatataaattgttaatgaattatgagtgcatataggactgtcatgacatatattcactgtatatcttaatttctcttaaaaatgagttcaaggtcaggtgcggtggctcatgcctgtaatcccagcactttgggaggccgaggcaggaggatcacttgaggtcaggagttcgagaccagcctggccaacatggtgaaaccccatctctactaaaaatacagaaattaggagggcatgatggcacgtkcctgtagtcccagctactcaggaggttgaggaatgagaatcgcttgaatctgggaggtggaggtttcagctagctgagatcatgccactgtacttcagcctgggcaacgaagcaagagtgtctcaaaaatttttttacaaaaagagtttaagtatatttaccaagattcatcatttgaaaatagattattgacagggagtctattaaggaaaaatatgtatacagacacaacttaatcttaaatttatgtttttagagaattggaaaatcatttagatgatatgataaatcaataaaacagaaaagggaatacaatttgcttgatatatactttctgctaaaatataattagaatttcttatttaacatgttcaatatattagatcataaatatcataggtcatcaaatttgaaaatggatcgaatcaaagtattctgtggtacaagtctaatttta

SEQ ID NO: 715843 - DNA, 647 bp, Homo sapiens
tttatttatttatttatttatttatttatttatttatttatctattttttgagacagagtctcactctgtcgcccaggctggagtgcattggcgccatctcrgctcactgcaaccttcgcctcccaggttcaagcaattctctgcctcagccttccaagtagctgagattacaggcgcccaccaccacgcccagctaattttttgtattcttagtagagactgggtttcgccatcttggccaggttggtgttgaactcctgacctcctgatccacctgcctcggcctcccaaagtgctgggattgcaggcatgagccaccacgcctggccttcaatgctgcttataaaagggcttggggccaggagttgaatctcttgctctctggcactcttgtcttccaccacaagatgatgcagcatgaaggccctcaatagctgtgggcccctcaatcttcgacttcccagcctccaagactgtaagaaagaaatctccattcttgataaattacctcatctgtggtatactgttacagcaccacataacaaactaagacaatgattgaagagggaagtgtttttcaccccctggcaacaggtttcaatatttcacttgtttaaggttgaattaaagaaaggaatgcagaata

SEQ ID NO: 715844 - DNA, 3176 bp, Homo sapiens
  misc_feature 826, 827, 828, 829, 830, 831, 832, 833, 834, 835, 836, 837,838, 839, 840, 841, 842, 843, 844, 845, 846, 847, 848, 849,850, 851, 852, 853, 854, 855, 856, 857, 858, 859, 860, 861,862, 863, 864, 865, 866, 867, 868, 869, 870, 871, 872: n = A,T,C or G
  misc_feature 873, 874, 875, 876, 877, 878, 879, 880, 881, 882, 883, 884,885, 886, 887, 888, 889, 890, 891, 892, 893, 894, 895, 896,897, 898, 899, 900, 901, 902, 903, 904, 905, 906, 907, 908,909, 910, 911, 912, 913, 914, 915, 916, 917, 918, 919: n = A,T,C or G
  misc_feature 920, 921, 922, 923, 924, 925: n = A,T,C or G
ttaaggtagcaccctgaccagccccggtctttcttcagttatactgtagaattttgttactgatacaactaaaagatctcaaagtataatttggggtttcagaataatggaaagctctctggagtcatagtcatcttttctatttttaaaaatcagagtctattaccatgcttggcacaaaagatgtcctcagtgtatatttattaaatggacgattgaatgaatgagtctaacctatgggcaaaacaccgtacctagcaatttgaaggactgctagccatagaaatagagaaacagagtgatctcaccatttaccaaaacccttgtgatgtcaaggagtttaatattggttgcctttctccataagagtaatacaaatgataatcagggaaacaataggatatatggaatagaatacaccaaattaattttgtattaaggagagtcataattgagagtttgttgcagctgattaataatgttccttaatatttctggaaagaaacagaggaagtcaaatcacattgatcatgggcttgggatatggacaaccttcttaaatactttcagaactatccttccattgcatatgttggttaattctctgtgaggctttattatctgccccgttcaaattacaaagaataaaatagaaggaggtttaatgttttggtgatatcagtagttggtaaacagcagaactggggtttcaacctttccctccaaattcagctctgaagctcttactcacttagtgatggcttgtgactgaatgtgaacgagctggtgctacaattggcttagctgcagagattcaaccacatannnnnnnnnnnnnnnnnnnnnnnnnnnnnnnnnnnnnnnnnnnnnnnnnnnnnnnnnnnnnnnnnnnnnnnnnnnnnnnnnnnnnnnnnnnnnnnnnnnncacgccggggcgcacgcaacggcggttgcaccggctaagaaacgacagatgaaatcgatacggaagcaagaaagcacaggcagcaggacggagaaagaaggaagaaggggcgaacggatagacagcaaagcacgcacgaaacgaccagaaggaaggtacaatagaaagacgacgaaggaaagaaggaacaactkctcagagttcacaatgtgcctacgatgtcactggaaacaatcagctcattagcagttatgggtgcttctcaaaattatactgcaggctccccaagtgctgcctaaattctctggttatttcaactgtggatgagagaatttgccctgtgtgcatggatgagtagcaggaaggccttctattgttatcacagaagacacatgggaaaatgtgtttgggggcttactgcaaatcatacttataggattgtcagcatgcttgcagagcaattatctgtcatcccataaaacaaacctgtgtcattatattcttgatacatgcattggagccaccaaaaaaaaaaaaaaaatgtttcctagacctaaatgtgaaaaatcccagccgggtgcagtggctcacacctgtaatttcagaattctatgagaccaaggcaggaaaatcatttgagtctaggagttcgagaccagctgggcaacatagtgagaccctcatctgtacaaaaaataaaaaattagctgggcatggtccgcatgcctgttgttctagctacaggctgaggcaggagaatgccttgagcctgggaggtcaaggctgcagtgggccctgactacatttctgccggggcaacagaaaaagaccctgtcaaaaaaaaaaaaaaaaaaaaaaaaaagaaaagaaaagaaaagaaaagaaaaagaaagagagaaaaatccctaaacatggatgaatatcgtcttttaaccccttttccattgactagaccatttttactttgtaggcccggtaactcatgaaatctcacctttacaaggaaaagtctctctgttttttttttctgcctcagaattctttaatataatgtagatatcttaagactcaatgcacaagacaatatgttgaattttcaccaatctagaaatgatgaatagccctttaaatattctgaaattaattgaattatggaatgttatagattgcatagacttttgacaagatagaatcccatcctggagactgacatagctttgcctaaaatatgtatttagaaaagttttgaactcatgtatatacatcattaactcaccctagtaaagcacctgatgacaaaaatgacacgagttagtgccaacagcccataatcatgtatttaaatatagcttttattttgcatcctaatttcttgtgatacttgaatgttcttttgatttcctgtgatttaacttttttaataattcaaccttgtgcatttgtgctctctgtgctggaaagtacaggtggcatgagattgacagaccattctgaaaacattacatcaagaagagcaagttttgagtggacaggagacctcagaaaactgaatgaggggggtccatttttagcacaagcttcgccagcaaacagctatgttcctacccatatgcaatgtctctgaaacccagtctccttattcctcaaatgcatatgcattttacctgtctcaaaattgagagattaacatgaggtaatgattatgagactctcttataaatggaaaagtgctttatagttgtaaggtagcattactttttttttttttaaggaaactgacaagttaattaagctattcaagataattttaaaataccatgttgttaatatattttaaataaattctaagattaccactcatttggttcatagcactgtaaataaaacttgtattttaatatcatggagtaaacctaatgtctgtttttaattttttggtcgttgtttgttttggggaaagcattaacgttgaattttaattttggtaaatgttaaattctactaatgttatttaaaaattcataattatcaacataagtttaagattatttattgaatagtcacacaccacagctggatggaaatatatatgtcatattttgaacacacaccatgaaccggattttatttctctttccccatgtatgggaatccaacaaaattctctgcagtacaaatacaaaaacaacaagagctagcatcatacgtaatggtgaaaggctggatgcttttcccctaatatcaggaacaa

SEQ ID NO: 715845 - DNA, 3176 bp, Homo sapiens
  misc_feature 826, 827, 828, 829, 830, 831, 832, 833, 834, 835, 836, 837,838, 839, 840, 841, 842, 843, 844, 845, 846, 847, 848, 849,850, 851, 852, 853, 854, 855, 856, 857, 858, 859, 860, 861,862, 863, 864, 865, 866, 867, 868, 869, 870, 871, 872: n = A,T,C or G
  misc_feature 873, 874, 875, 876, 877, 878, 879, 880, 881, 882, 883, 884,885, 886, 887, 888, 889, 890, 891, 892, 893, 894, 895, 896,897, 898, 899, 900, 901, 902, 903, 904, 905, 906, 907, 908,909, 910, 911, 912, 913, 914, 915, 916, 917, 918, 919: n = A,T,C or G
  misc_feature 920, 921, 922, 923, 924, 925: n = A,T,C or G
ttaaggtagcaccctgaccagccccggtctttcttcagttatactgtagaattttgttactgatacaactaaaagatctcaaagtataatttggggtttcagaataatggaaagctctctggagtcatagtcatcttttctatttttaaaaatcagagtctattaccatgcttggcacaaaagatgtcctcagtgtatatttattaaatggacgattgaatgaatgagtctaacctatgggcaaaacaccgtacctagcaatttgaaggactgctagccatagaaatagagaaacagagtgatctcaccatttaccaaaacccttgtgatgtcaaggagtttaatattggttgcctttctccataagagtaatacaaatgataatcagggaaacaataggatatatggaatagaatacaccaaattaattttgtattaaggagagtcataattgagagtttgttgcagctgattaataatgttccttaatatttctggaaagaaacagaggaagtcaaatcacattgatcatgggcttgggatatggacaaccttcttaaatactttcagaactatccttccattgcatatgttggttaattctctgtgaggctttattatctgccccgttcaaattacaaagaataaaatagaaggaggtttaatgttttggtgatatcagtagttggtaaacagcagaactggggtttcaacctttccctccaaattcagctctgaagctcttactcacttagtgatggcttgtgactgaatgtgaacgagctggtgctacaattggcttagctgcagagattcaaccacatannnnnnnnnnnnnnnnnnnnnnnnnnnnnnnnnnnnnnnnnnnnnnnnnnnnnnnnnnnnnnnnnnnnnnnnnnnnnnnnnnnnnnnnnnnnnnnnnnnncacgccggggcgcacgcaacggcggttgcaccggctaagaaacgacagatgaaatcgatacggaagcaagaaagcacaggcagcaggacggagaaagaaggaagaaggggcgaacggatagacagcaaagcacgcacgaaacgaccagaaggaaggtacaatagaaagacgacgaaggaaagaaggaacaacttctcagagtkcacaatgtgcctacgatgtcactggaaacaatcagctcattagcagttatgggtgcttctcaaaattatactgcaggctccccaagtgctgcctaaattctctggttatttcaactgtggatgagagaatttgccctgtgtgcatggatgagtagcaggaaggccttctattgttatcacagaagacacatgggaaaatgtgtttgggggcttactgcaaatcatacttataggattgtcagcatgcttgcagagcaattatctgtcatcccataaaacaaacctgtgtcattatattcttgatacatgcattggagccaccaaaaaaaaaaaaaaaatgtttcctagacctaaatgtgaaaaatcccagccgggtgcagtggctcacacctgtaatttcagaattctatgagaccaaggcaggaaaatcatttgagtctaggagttcgagaccagctgggcaacatagtgagaccctcatctgtacaaaaaataaaaaattagctgggcatggtccgcatgcctgttgttctagctacaggctgaggcaggagaatgccttgagcctgggaggtcaaggctgcagtgggccctgactacatttctgccggggcaacagaaaaagaccctgtcaaaaaaaaaaaaaaaaaaaaaaaaaagaaaagaaaagaaaagaaaagaaaaagaaagagagaaaaatccctaaacatggatgaatatcgtcttttaaccccttttccattgactagaccatttttactttgtaggcccggtaactcatgaaatctcacctttacaaggaaaagtctctctgttttttttttctgcctcagaattctttaatataatgtagatatcttaagactcaatgcacaagacaatatgttgaattttcaccaatctagaaatgatgaatagccctttaaatattctgaaattaattgaattatggaatgttatagattgcatagacttttgacaagatagaatcccatcctggagactgacatagctttgcctaaaatatgtatttagaaaagttttgaactcatgtatatacatcattaactcaccctagtaaagcacctgatgacaaaaatgacacgagttagtgccaacagcccataatcatgtatttaaatatagcttttattttgcatcctaatttcttgtgatacttgaatgttcttttgatttcctgtgatttaacttttttaataattcaaccttgtgcatttgtgctctctgtgctggaaagtacaggtggcatgagattgacagaccattctgaaaacattacatcaagaagagcaagttttgagtggacaggagacctcagaaaactgaatgaggggggtccatttttagcacaagcttcgccagcaaacagctatgttcctacccatatgcaatgtctctgaaacccagtctccttattcctcaaatgcatatgcattttacctgtctcaaaattgagagattaacatgaggtaatgattatgagactctcttataaatggaaaagtgctttatagttgtaaggtagcattactttttttttttttaaggaaactgacaagttaattaagctattcaagataattttaaaataccatgttgttaatatattttaaataaattctaagattaccactcatttggttcatagcactgtaaataaaacttgtattttaatatcatggagtaaacctaatgtctgtttttaattttttggtcgttgtttgttttggggaaagcattaacgttgaattttaattttggtaaatgttaaattctactaatgttatttaaaaattcataattatcaacataagtttaagattatttattgaatagtcacacaccacagctggatggaaatatatatgtcatattttgaacacacaccatgaaccggattttatttctctttccccatgtatgggaatccaacaaaattctctgcagtacaaatacaaaaacaacaagagctagcatcatacgtaatggtgaaaggctggatgcttttcccctaatatcaggaacaa

SEQ ID NO: 715846 - DNA, 3176 bp, Homo sapiens
  misc_feature 826, 827, 828, 829, 830, 831, 832, 833, 834, 835, 836, 837,838, 839, 840, 841, 842, 843, 844, 845, 846, 847, 848, 849,850, 851, 852, 853, 854, 855, 856, 857, 858, 859, 860, 861,862, 863, 864, 865, 866, 867, 868, 869, 870, 871, 872: n = A,T,C or G
  misc_feature 873, 874, 875, 876, 877, 878, 879, 880, 881, 882, 883, 884,885, 886, 887, 888, 889, 890, 891, 892, 893, 894, 895, 896,897, 898, 899, 900, 901, 902, 903, 904, 905, 906, 907, 908,909, 910, 911, 912, 913, 914, 915, 916, 917, 918, 919: n = A,T,C or G
  misc_feature 920, 921, 922, 923, 924, 925: n = A,T,C or G
ttaaggtagcaccctgaccagccccggtctttcttcagttatactgtagaattttgttactgatacaactaaaagatctcaaagtataatttggggtttcagaataatggaaagctctctggagtcatagtcatcttttctatttttaaaaatcagagtctattaccatgcttggcacaaaagatgtcctcagtgtatatttattaaatggacgattgaatgaatgagtctaacctatgggcaaaacaccgtacctagcaatttgaaggactgctagccatagaaatagagaaacagagtgatctcaccatttaccaaaacccttgtgatgtcaaggagtttaatattggttgcctttctccataagagtaatacaaatgataatcagggaaacaataggatatatggaatagaatacaccaaattaattttgtattaaggagagtcataattgagagtttgttgcagctgattaataatgttccttaatatttctggaaagaaacagaggaagtcaaatcacattgatcatgggcttgggatatggacaaccttcttaaatactttcagaactatccttccattgcatatgttggttaattctctgtgaggctttattatctgccccgttcaaattacaaagaataaaatagaaggaggtttaatgttttggtgatatcagtagttggtaaacagcagaactggggtttcaacctttccctccaaattcagctctgaagctcttactcacttagtgatggcttgtgactgaatgtgaacgagctggtgctacaattggcttagctgcagagattcaaccacatannnnnnnnnnnnnnnnnnnnnnnnnnnnnnnnnnnnnnnnnnnnnnnnnnnnnnnnnnnnnnnnnnnnnnnnnnnnnnnnnnnnnnnnnnnnnnnnnnnncacgccggggcgcacgcaacggcggttgcaccggctaagaaacgacagatgaaatcgatacggaagcaagaaagcacaggcagcaggacggagaaagaaggaagaaggggcgaacggatagacagcaaagcacgcacgaaacgaccagaaggaaggtacaatagaaagacgacgaaggaaagaaggaacaacttctcagagttcacaatgtgcctacgatgtcactggaaacaatcagctcattagcagttatgggtgcttctcaaaattatactgcaggctccccaagtgctgcctaaattctctggttatttcaactgtggatgagagaatttgccctgtgtgcatggatgagtagcaggaaggccttctattgttatcacagaagacacatgggaaaatgtgtttgggggcttactgcaaatcatacttataggattgtcagcatgcttgcagagcaattatctgtcatcccataaaacaaacctgtgtcattatattcttgatacatgcattggagccaccaaaaaaaaaaaaaaaatgtttcctagacctaaatgtgaaaaatcccagccgggtgcagtggctcacacctgtaatttcagaattctatgagaccaaggcaggaaaatcatttgagtctaggagttcgagaccagctgggcaacatagtgagaccctcatctgtacaaaaaataaaaaattagctgggcatggtccgcatgcctgttgttctagctacaggctgaggcaggagaatgccttgagcctgggaggtcaaggctgcagtgggccctgactacatttctgccggggcaacagaaaaagaccctgtcaaaaaaaaaaaaaaaaaaaaaaaaaagaaaagaaaagaaaagaaaagaaaaagaaagagagaaaaatccctaaacatggatgaatatcgtcttttaaccccttttccattgactagaccatttttactttgtaggcccggtaactcatgaaatctcacctttacaaggaaaagtctctctgttttttttttctgcctcagaattctttaatataatgtagatatcttaagactcaatgcacaagacaatatgttgaattttcaccaatctagaaatgatgaatagccctttaaatattctgaaattaattgaattatggaatgttatagattgcatagacttttgacaagatagaatcccatcctggagactgacatagctttgcctaaaatatgtatttagaaaagttttgaactcatgtatatacatcattaactcaccctagtaaagcacctgatgacaaaaatgacacgagttagtgccaacagcccataatcatgtatttaaatatagcttttattttgcatcctaatttcttgtgatacttgaatgttcttttgatttcctgtgatttaacttttttaataattcaaccttgtgcatttgtgctctctgtgctggaaagtacaggtggcatgagattgacagaccattctgaaaacattacatcaagaagagcaagttttgagtggacaggagacctcagaaaactgaatgaggggggtccatttttagcacaagcttcgccagcaaacagctatgttcctacccatatgcaatgtctctgaaacccagtctccttattcctcaaatgcatatgcattttacctgtctcaaaattgagagattaacatgaggtaatgattatgagactctcttataaatggaaaagtgctttatagttgtaaggtagcattactttttttttttttaaggaaactgacaagttaattaagctattcaagataattttaaaataccatgttgttaatatattttaaataaattctaagattaccactcatttggttcatagcactgtaaataaaacttgtattttaatatcatggagtaaacctaatgtctgtttttaattttttggtcgttgtttgttttggggaaagcattaacgttgaattttaattttggtaaatgttaaattctactaatgttatttaaaaattcataattatcaacataagtttaagattatttattgaatagtcacacaccacagctgratggaaatatatatgtcatattttgaacacacaccatgaaccggattttatttctctttccccatgtatgggaatccaacaaaattctctgcagtacaaatacaaaaacaacaagagctagcatcatacgtaatggtgaaaggctggatgcttttcccctaatatcaggaacaa

SEQ ID NO: 715847 - DNA, 845 bp, Homo sapiens
tttcttcagttacttgtgtttttctgatgccatttatgttcattgagctactgttatttgaggctgatcttcagaagccactggtattactgtaactgattcagtcagtggattaaatgtctcacaacacggccatctgctagaaatggggaaagagcaatgatgccctcaggctttgacaagcttcttggctggcagaagaaagtggagtcaggctttgagactagggatttagggggggaaatgaggcccctcaaagttgatgatatcatagccacactttactattgtgccttgtactgaatttgcatggagatggcatatgtcgaggatttcaacagggctgctaagtttctccaattgcctttccaatgaacaggccaaacatcgtattggtcagtacatatatgattttaaaatgtagaattagagagagcaaaatagagagagagaaagagagctaactataagagatatttagataatgcatgttttgcagtgagtttgacattataattgaatgacttcagacattacaatggcatctactaaaatgttttccacaggctgagattgctgccttgcccttggtctacccccaagtttctcaaccatcccactgtcagaggcgtttgaaccagagcaactccactatcttgaataggggctggggaaagtaaggctgagatctgctgggctgcattcccagaaggttaggcattcttagtcacaggatgagataggaggacggcagaagatacaagtcataaagaccttgctgayaaaactggttgcagtaaacaagccggccaaaactcaccaaaaccaagatggcaacaaaagtg

SEQ ID NO: 715848 - DNA, 608 bp, Homo sapiens
attctttctttgcacatgtctgtctgtattaaatatatttttaaatgacaaccagtagtaactgtagtggagaaacctgacaaatactccttcagctgggtgatcaacgtcaaggtcaacagaaataagtgatgttggtgggacgcttctttgctaggatgtgattaataccgtactttacctctgcctttctttaaaaaacctataaccctagcctaaacatgagaaaaccatcagaaaaattgcaactaagggtcattctacaaagaaacctgagctgtactctccaaaactgtcaagatcattgaaaacaaggaaagtctgagaaactgccacagttaaaaggaacctaagaggaaaagatgattaaagatgtagggtaccctgaaagagaccctggaacagaaagagactgttaggcaaaaaggaaggaactctaaataatatacggatgttagttaatgatagtgtaacrgtttgggttaattaattgtgacaaatatacgaaacactgtgcagagatgaactttgtgaggggaaggaacttcaccataatgagtctgttttctagagttaaagagctttccagtttcagccccttcattcca

SEQ ID NO: 715849 - DNA, 597 bp, Homo sapiens
tgagacacagttgattgagaaaatggcctgtaacaaacagaacaggactgctatgaaaaatggagtgagaggaaggagtagctccattggtacttcaagtcttgagatgacagagaccaggaataggatatgaataacttgtaagtagttcagcagatagcccacagctccatgctccatgctggtttcaatcaaccagggcagtgagttggagcgctaaggccagtggaaggacagtgccctgtatagataataaagaaggaaaaaacaacactcaggcctagaagtaagctacatgtaggtacccataagaagcatatcctatccctcttgcaaaatttcttaagataggccaaaccgcatacacaggtaggcaaaagaatctcagagacaaasatgagcacataactaacacaacaaaaaaagaaacaaactcaacatgctagaatatatggcagaaaaaaacaaaggtaagaaggaaataaaaggtgagattcataaacttaaaggcataaaaaatggaaatggctctttaaacaataagctgctgtaaaacagaaaaacacatacaacttgagaataataaaattgaatcat

SEQ ID NO: 715850 - DNA, 646 bp, Homo sapiens
gttttaactccattgttcatgtttcaaacatgaataatcccctcactggatttttcatccaaatgagctctctaacacataactttaaactacagtctaattttagtctgggtattcagctcaagaactaaagaactgccacttcgagttaggccaaggattaatcttgcccaaactactaactctgacaatggcaccaagaaacttggggaagggggatatacagcatcagtgaagagtggtgagatgggagaaagaggggctataatgagggacagagaaaacaaccatcattaccaccaactgccatgtccatgatattcctagacatttcaattttattatgcaagatgaatttatatgcctgtatccctatgtctgagacctgttcccacctagccctgattatacgaggttatggcagaatcatagatagtgggcattgctgtagagcaccttagaatgagttttctatatggggaaactaaagtgcaggtaatttttaaaaactttaaaaaatattaattttagctgttatcaaagtaatataagcatatcaataaaaaatatggaaaggcctttaacacacaacagcyttgcctacctaccctcccaagcctgtagtcacactccttagaggcaaata

SEQ ID NO: 715851 - DNA, 1364 bp, Homo sapiens
atttgactgatgaattttcctttcttctctgatagttctatcttcycctgtgataagatacaattttcctgtctccatgttctcatatttttacacagtaatcctatttgtgaaattaccattacttattgattagccttacactggttaatgttacccttcatgtggaaagaactatttcctgctcatttagtttcaaagatgtgaacttcagttatcgtgtcccacagcaaagtaatcctaaaatcttagtaatttcagccttgtaagcctttgacttcacactcttgtattttaatggctttgatgtcttcttactattctctagcagaataatttcctgtgtctcagatgtctttactgctactttagttcacttgcaacttcagtctaatcattttgaacactcttttagcttttatttccgtctgttttcatcttctttccaaatattttattttcctaataaactacatatttaatgaactcaattccaagattctagttaaaagctcagaggtcaaaacaggttaaaaaaccagtctcaatttagacttgtcagtcaaacaccacttaatatactttcctctgcatgcttgaaatagtttcatggaagggaaacgaattttacaagctactaggttttttcatttgagagtagcagaaagtcttcaacatcatttaggaatgaaattaatctaccatatacagatgttaaatcaaaccatcaaaaacttggcatttgcattcttttattgttttctaagtactttgtgcccagtgctgtgttagatgctatagtagatattaaagagatgataagatagtatttcctttccagagattatggcccaattaggatatgaagtatgcacatatggaggctgggcgctgtggcgctcacctgtaatcccagcactttgggaggcagaagtgggaggattgcttgaggccaggagtttaagaccagcctgggcaacatagggagaccttgtccctacaaaaaaaaaaaaaaaaaaaatttagccaggtatggtgtgcatgcccataatcccagctactggtgaggctaaggcaggggaattgcttgagcccaggagtttgaggctatagtgagctatgatcgagccactgcatttcagcgtgggtgacagagtgagaccctgtctctaaaaataaaaactaaacaaccaaattaaaaaaaaaaacaaatgaagtaactaaaaatgatataatctaatgtcaaagcaagcaggaagaagacaagttacttatggactagagccttatgaaaaataaatttagattaataaacagtattggaaattatttcagaaataaatgagcaaataatacaatgtttg

SEQ ID NO: 715852 - DNA, 1375 bp, Homo sapiens
taaaattgtatgaccaaagctaaaattgaagtttttgtttctctcaggttaaaaaagtgagatttgggttgaggatatctcaaaaataattgagatgggcatggtggttcaggcctatagtcccagcactttgggaggccgaggtggcagagtcatttgagccaagagttcaagatcaccctgggcaacttagtgagaccctatctctacagaaaattaaaaaataaaatattaaaagcacaaaggcttctgtttagttctgaagcaattgactgtgaccttaagtaagtttcattttaataattgttgcatacattctttttaggcatgtatatacatacatatatatatatataatgtgtgtgtgtgtatatatatatacacacacatacacatatatatgtttgggttttggggcttttttttaagtgtgtgtcaagtctttttttaaatcctgtttacaaaaaaccattagatatgttttaagaatctcagttcctggttgaaggagccgaaatatttgagggattttagaggatcccctttatatcaaatgctgatataaaacattttctaaaaatagatctaattgaggggtttaaaagaaaaattataccattttatttctctctcatgtacaagtgtcagtgagatttgcccagatcaatggagaactgttgattacagtctttcagggatccatgtctcaagtcaccactttgccatgttctttatggtagtgtattagttcattttcatgctgctgataaagacatacccgagactgggtaatttataaagaaaaagacgtttaatggttccacatggctgggagcctcacaatcatggtggaaggcaaaagtcacatcttacatggcagcagacaagacagaatgagagccaagcagaaggggaaaccccttataaaaccatcaggtctcgtgaaacttatctgctaccatgagaacagtatggggaaaaccacccccacgattcmattatctcccaccggctccttccctcaacatgtggaaattatggaatctacaattcaagatgagatttgggtcgggacacagccaaaccatatcagatagtgttgttgtctacatatagtggaagctgggtcactttcacaggacgagaatgtgttcaaccaatgactgaaaacctgggcttagaaatgtgcatatcactcctattcatagtcacatagccaaatcccaaactaagggagtctgggaaatttgctctggcttggcagccatgatgctgaagaaatgaagagatgagattttagtggcaactagcttcctttgagaaagaaaggaagttcggaaagcacaatagtcactgtatttctcatctgtaaaat

SEQ ID NO: 715853 - DNA, 1763 bp, Homo sapiens
cccagtaattaaattgaagcagacactgaaaggttctcatcagggtaaacttctgtacattttttggaaatgctaggacacagattctctcttctaccagatggtattttatggggatacaaagcttatagccattaaaaaccaaatcacatgtgtgtggtgaaaggagactatgtggtctttgacagttggtatggacaccattgaaaacaaagtggaagagatttaatctggatccttggcaacatcactcagacgctagatcaatccttgcctaaagccattttctctggatttttagttaaatgagctagtaaattccctttattattagagacagtttaacttgatttttcatcatgtgcaatagagaatcctaactgatacaagaacatttcaagtaataacactaatatagaggtaaggatgaagtcaagttttgtccaacaattcacctggcaaaagtaaagaattcgtgttgatgaatactgaacaatcatatcagaaaatgaagaaagttcatattctagagaaacttgagtaacagggacaggatttttgacttgatttgtgaggcaatttgaaattatgacttgttcctgaaaaagataatgatttgaatgaagtggtggcctaggaatattgatcagactgagacgagaagaatgggttgcaggaaaaagaacaagaagggagggaaatccttcaggaggaattgaggcctaggtttatggtggtgatgatagaatagagaaaacatagatgagaggcaataaactattggttaataacatgggttctggagacagatggcctaagtttgaatctggattctgctattgttatttactctctccattaccctgctttggacaccartcatatcacttctatccaactattcacatcatctttcaattggcttttgaaagtttaatcttgtaaagattatgcatccttggataaattaaactttctgactctcaattatctcatctgcaaaatggagataaaatagcacctactccctgaggttattattatgattaaatgtggaaatacatgtaaaatgcttagaagagtgtctaggacattgtaatattcaataaacgttagctattatataaacacttttccaaggcagaatctaaagtacctggtgattgactgaaggaaacaaaaagaggcaaagagaactagattaggatacatgtgctctaactccaggtttgccacactagctgtagtgaacttgagcaaatttcttggccttgtttgggactttgattagtcatctgttaaaatatgtatttgtattagatgatccctagggctgtcttcaggcccaatatattatgagtttataaaatctaagtattgttatatcataaaaatttataaaacaatttgaatgcattaatttaaactttttaacaaccctgcgagatagaccattttacagataaggaaactgaggctcaaacgattttaatgacttcttcaagcatgtatagctgaagctaagacttaaagtcagaggttcacattttgagcaacataccatttattatgacccgttatcttcaatttaaaatgccaggattagtgtgggagctgtagtgttcctgaactctcggctatcatagaacaggtctgttttctgttggtaaatatagcagatgtggcagatacaaacagcatcgaagggcctctagattattgtaaaatattctcatttccatgagggcagtaattgtggttct

SEQ ID NO: 715854 - DNA, 650 bp, Homo sapiens
aagctttaaaaggaaaatagctgaattagaatataggccaggatgcaaggatatataactagactttaagcaatttggtagaaggagaaaaaccaaccacttgcaatgccaaggtacatacagactacaggaaggcccaacctggacagataagtaagcatgttgctatgtgtatgaaggcaaacatatatagtataaacatagaatattagataaggaaagggtaataaaaattctgtgagtggaaaaatgaaattttttaaatataaaatgtgttgataaagttacaggcctatagtcattacaraagacttgacaggaataatacaattttggccacattatagaaattaggtgatgtacttttgggaggtcttcagttatccacaaactgatcaaatattttgtcagaatgaaatgtaaaattgaggtttgcataaaaagtatggctacttactataatgagatttgtaggattcaaaagaatatggttttgaaaagatataaatatctataggagatactatataatagtaatttaattttacatactagcttaagcaagtaaaccagaattatccatcacttggttatccacctttaggagaaagagtgacaatacaatgtaggtattgctatttcaaaaatat

SEQ ID NO: 715855 - DNA, 655 bp, Homo sapiens
taaaaataaattcttctgaggtcataaattctagactagcctggccaaccatgkccaacatggtgaaactctgtctctactaaagatacaaaaattagctggacgtggtggtgcacacctgtaatcccaggtacttggggggctgaggcaggagaatcacttgaacctgggaggaggaggttgcagtgcaccaagattgcaccactgaacttcagcctgactgacagagtgagactccatttcaaaaaaataaaaaataaataaataaatgaattattcagtactttaaggttaagacactgacagtcagtgatagttttcatcagtaaattaaagtctgctgaaattaatgtggaatacattgttaggaaaggaaatttaataagagagcatacttagatttatttggaaaacatttaaattagctttgaagaaaatatagtaaaacttggatcagcaattaataatacaatttagaggaacaagaagaaaatagaacacagaatttgggaaaacatgtagatgataatatgctaaagttgtgtgtgaacctgaattatcatggtgtgcacccatgtcatccatgtgcttaagcctacaaagcaatttcaagcatattctctctctctctctctctctctctctctctctctct

SEQ ID NO: 715856 - DNA, 655 bp, Homo sapiens
taaaaataaattcttctgaggtcataaattctagactagcctggccaaccatgtccaacatggtgaaactctgtctctactaaagayacaaaaattagctggacgtggtggtgcacacctgtaatcccaggtacttggggggctgaggcaggagaatcacttgaacctgggaggaggaggttgcagtgcaccaagattgcaccactgaacttcagcctgactgacagagtgagactccatttcaaaaaaataaaaaataaataaataaatgaattattcagtactttaaggttaagacactgacagtcagtgatagttttcatcagtaaattaaagtctgctgaaattaatgtggaatacattgttaggaaaggaaatttaataagagagcatacttagatttatttggaaaacatttaaattagctttgaagaaaatatagtaaaacttggatcagcaattaataatacaatttagaggaacaagaagaaaatagaacacagaatttgggaaaacatgtagatgataatatgctaaagttgtgtgtgaacctgaattatcatggtgtgcacccatgtcatccatgtgcttaagcctacaaagcaatttcaagcatattctctctctctctctctctctctctctctctctctct

SEQ ID NO: 715857 - DNA, 649 bp, Homo sapiens
gctgcagctatttgtcaaaaatgtatgtatacagttgaagtttggctttaatggaatcatgttaaaaattaatatttaaaaggcacctatgcaatgtggtacatccaaaaatatttccccaagtttgacaaaatacatgtaattttattgaaagataatatatagaaattctccaatatgcccagaattcccccacttaaagtcctcctttgagaacagataataaagcactaattcctcagaaattaggcacagaagtaattcctcatccattctcaacagagtaatgcacttgtactttaacttacgcaaatcctaaaagtaacacctatttattagtcatattcattcttatttccctgctctggaacaagttctattcttcaggttcagcagattatgaatatcacctaataatgtcaaatacaattgagcactaatcatgtgtcaggcattatgctaagtattaaaaatccattattttatttatttctcataacaatcttatccaatatgtattcatattattgtaattattttcactttacagatgagaaaactgaggctcagaaatattttacatttacatcatgttcagctctatatgttacattttataatttgaataytaaagtagataaaaggcaat

SEQ ID NO: 715858 - DNA, 1887 bp, Homo sapiens
aatttgagcatttggtgcatgatactttattatgtgtggtcacatgcgtcagttctctagatttgctttgtttttctgcacttcaggccatcacttcaagagaacactatgaataggtgctggatctaatgacctttcaatggaatggccacttawttcaatccaggaaatgtttgagagtcaagtagatcaagggagacatttaatgacatggggacaagcatggtaccccagggatattccaggaattgagaccctattgtaccttcaaacctgagattgtatgaattctccactatttgttgctttgttttctctttctctccttctaataaagttctaaaccatctgcatagcttaaatgaaaagctctattagcaaagtttgtaattaactcttaaagctctttcaagtagattaaaatagctgaaccatgtgtatgaccatgtttttgcttatgtctctgtcttttctttataaaaattcctaaaagtgagtattttacttcctaaggggagcatttgaaaggttggagtcctatgtgacatcaggataattgaggccaaatttccttgtgatcaacactatctggaaagctgcctcagttctccagttccttttgaagttgacatcaccgctgtgtgtggtatttcgaacatctgttcccatgattcccaaggaacaagtgtcatgaatcactgcttcccaaaagagttacattttgctgaaagttgacttcaattttacttgtggtcttaaaagtctcaaaagatatattaaaaattcacttccagagtgtttgtagcaaacaattattgcttgttttgtggtgcaagactgatacgttacttcagggaagcaaaaacaatggggattttctaggcagtggcatattcttttattctctcttccctcccacaacactcaatatttcttggaaaattcccagggagtctgaaactcctaaaagttatcttctactatcaatgaggatacaattatcccctctaaaaaaagtaagatatcttttaaaaagaaaaactcattatattttcatgtccctgagaaagtttacctcatttcatgaaaattaagagttataaccctgcctaaaggttgggaatctaataatttcctctactttttacgtgagacagaaatatcttggattaaaatgttgtctttatattgaattaaaatagcaaaaccaatgaaccaagttagcttgcttaagttctgaggatctgaaatggtctgggatgaaacagcaataccttctttaaaattatatcccttttctctgaaataatttatattacaaataaattataggcaacatcatttaaactatctagcatcaaactgttatctgacgcgtgagtatatcaaaatttaaaataagatattaaagaatttgtttctgctcattgctttccatatttctgtctggaacaggattattatttttatttgctcattgataccacttcatatttttcctaatttttaaggataattataaatagaaagtaaaacttaccaacttaagtttcatataaaccttttcattttagaatagttttatacttatataaaagatgtaaagataggacaaaatattcctgtatatgctaactcaatttcctctggtgttatcatcttacattattatggtccatttggcaataataacccatattggcacatcattagtaactaaactccatattttatttggatttcattaatttttctctaacgccctttatttctgttccagaatctcatttaggatactacgtggcatttggtcctcatgtctccttatcctcctctgatctgtgacagtctctcagacagtttccttgattttgatgatgttgacag
